United States Patent Application Publication US 2009/0119022 A1 - sequence listing, part 4

SEQ ID NO: 3699 - DNA, 9279 bp, Emericella nidulans
acgacaagacaaactccaggctgccctgtcatatatccatagacgctggctgcatagctgcaggcttgctcgttccggaatgccacgaatcggatccctaggttgatggcctcttctgcgatttcgacgacggggatgccgacgatgccgaaaatcacagtgacccctagatcgcgcagactgcgcacgataatctgtgcccctgttctgatagccattactgtgttttcctagttaatggtgttgagcatggacatgacggtagcttggaggatgggtggagaaaacggatgaaatgaagcggagaggatgcgggacactaagtaccgaggctaaagagaatgaggtcattgcgcggctttcatacaacagcgtacattctagagctagacctatactctgttgcgaggatttacaagtatccaagatcattcaggcccagcctgactcctaacccttctcaaaactcaaattccttccggaatatattgacatccattcccgcttccaccaaatcggccaggtctcgtcgacccatttggctaaatacccgtcgcaacgtgtcgtaaaggttggtactttggtttgcagtaatcatgcggttgagttcggcctcgttgatgcgaccatcattgccgcctacaatctccctagctcgttcctttccttcctcctcgaccacacgatgcatggacaaggctcccagaagatgttgcgctgcttccgggtaacaaccaatattgatacacgatacgcctaggttgtagcgcgctcggacaaagttaggattgatgttcagagcttgttcgtaggcctcaatagcttcttctgatcgaccagagttggcgagcgtagctcccaggcggttccaaaggagatgaagttgctccctctggttcgtggttccggattcagtgctcgccaatgctgtcgtaaagcagtccacggccttctcgtactcttctgcgcaatagaagaggacgcccagaccaacctgaacatcaggatccatttgcgctcccgacggcgacaattgagccgcctgtatgaaaagatcggtaacacgttcatgaagaatctggcggtcagtgaatcctaggtcggcgtccgaggatagatcatctcgactaatgatctgaggatatttaacggaaagccagcgctcgagggtacggtaagctgttgagtcgtacccttcgttcgtgtatgacacagcaagccccatgagggcgtcaagattgttcggatccaccttgagagcttgctccagtgcccgaatagcagggagttccttctcattttgagcctgggcagtacccagcatagtccaagccttcacatgctgagggtctttctgcaccgccgcctcaaaagccagagctgccagggacagattgccgccttcttgcataatcttcataccctcctcaaaggggttagcgatgtcgcggaagacattctcctgctcgaacgagtaatcacccaatcgaggctccctgaaccgagtattcagattgtcgaacccatcccattcggccatatcacccatatggagattatcatcaatattgtactcagaatcctccgccaattttctatttgttgccgtctcagcttggactctttcccatacgcgctcaaaatgactgaggtcttcggtgctactggtggtggggactgacctgtcaagatcattcaactccgcctctatggctgcattggcctcgtcatccagcttcccctgatctgccgtctcgatctctttgaactgagcttcccagttctcatcgtcgagctcaatcatccgcccctttcctttatcctgcgttgaagcctcagccggctgctggtgttgcatgcccatgggtccgaatccaggctgcatcatccccatccctccgtatcccatataccccatgcccatagatcgctggtaaccacccatcattggtgactggccggcggtaactgggctagccgattgcggaacgctcatggtgctctgctgctgaaagcgggcaaactcggccggagtgaaccccgatccgttgttcatcatgggaccctttggcccggcaaaggcagcctccatgcgggcttgttctccagggtcaaactccgcagcccacccctggcgaacccgttcgcggcgttgtgtgcatctgctctagttgctgtctcacttgctccatctccatcctcatatgctgctgcgggccgccggggagttgagctgattgctgagcgaactcgtccatcatctaaataccatattattaagcagctatccaagaacgaattagtagtagagcgcatctacctggtcgtgaccccccatcattccctgcgagcgcataccctcttgcattccaggggcacgcccgacaagccggtcacgctggagggacttgtcatcttgtacgtgtttcgtaaactgcgtgagggggtttcccgcggtggaacactcagcgccaccaagaaatgacatcttgtagaaagccgcaacgacagttgcgggaagaaggtaagttcaaagagcgatatcaaggagagttcctagggatataaagggcgtcggacataaggatagggatgactgatgagaaagtcggagctagacagcctccaaatgctgtgaaacgtggggttcggcgctgcttttgagccgatcgggaggagcaaaaactgccgaggctccccgagagtcacgtggaatattattagacacacactgtagtacggaggtggcaacgacagatggtgtattcctaagtctcttcaatgatatgcatggatatatagtacagtatatgcgctaagttacatagaatcaatcagtcgaagaggtataatcatcccaatcccaatgccgagctcatacagcaacaggagatccccctgggccgactatgttgtgctataatcaatcttgagccgtcgtccgtaaggcctcctctgcgcgagcttctcatgcgcaaccatcgcgctttggatatctagaaactcagcatgaatgtaaccccggagcgcccctgactggcggtctaccgtcacccgtacatcagtaagaccgtctagatccttgacgagatcgttgaggtcacggtcggtcatctcgaatggcacattgccaatataaagtgtgttggtgggttttttgttcttgaagctatttgttatgttggtttgtgcatagtacagggtcacacggcgcccctcaaatattcgcatatgcattgcatcgattgcccgtcttgccgccgcgttactgctaaattgcacatagccgtatctgcaagaatatcacgccgttagccacgccaatcccatataacaatccaatatcatgaatcaattcaacactcaccctttgctaatgccccggctgtcgtaaatgatattcactccttccacgaccccatacttcgccatctgctttttaaggtcttccgccgtcacgtcgtaaaagaggtttccaatgaatactgtttgcttaggttcgtattgcaatcgcctcagcatatctaacttctcgccgtgggtcatttgtttcttttcagcggccgcccacgcttcttgagcggctgcctcgcggatctgagatatatcaaaatcaagatcggggtcctgctcatcgactgttgtgctcttcgtcaatgattctgaaagacttaacttggcagctaagccttgattgagcgtctgcgctttctccgcccccggcgcattcgacgatgcccgtggaacgccacttgtggccccagtcggtgccgtatttgcaataatcgtgcccgaaggacgcccttctcgcaccttttctgccccggcctcatactcgggcgctgttggtacaccactcgtatttctagtggaatctgaacttttgaggtttagattcttgcaagttcctccatcctcttgcttggtctctttcgtcgaaacggctctggctgtcgcagcgcccgtagtaccactacttaattccagctcatttttcaggtcccctttcataacatccttttcgactgcctcagcataattctcaactggtggtgataagtctagcgcattatccgcggtggctgttgccgtggtcgtatccgaattcgttgctgtacttgccgcgggggcatccttcgagcccagcgggcttttagcatcccccagtgaccgtctgctctgcgttatcggccggcggacaaccacaggtaagtgtgtgtggggtaatgctgtcaatcttgatcgggttattggagagggtgaagccagaaggcgacaagcggcgcggcgaagagtgtacctaggtagattacaagtaagtacaacgttgttgaacagacttgggaacagagaatagcgcacatttccagtctctttgatcaagacatcaactgatttcaactttccatgtacggccatttcgaccgcaagaatggaaaaaagttaatggcgacggaccaccgaagacaagtcacgtgctgataacgatagcgctcggcggatctggatgtttgctgggagccttagcgtgacgctgatttagactgacctcaagtgagctggctacaaatgacaaaaacgtatatatatataatatatttgtgtgtgtatttgaagatatactgattctttaatgtacacgcaaggcttatcacatgtcagtcggtgctatagcttttcaagccacccgccaccacccggcacatcaatcttgtatcccgtcataaccattagatacgcttcaggagcggagatgcagagcatattcatacaaaacccaaaggttcccaggaacctagggtagacaaggatgagaaaatttcaccaacagcatagatatctacttgatatgtgtggcacagtcagtccccatttggtaaattgtaaaaaggaagtacactaaaagaaatggtaccgtcttgagccgcatattttatatgcagataaagctgacttttcatgtcttcgtaatacgcaactcgatataatcgtcaacagcaacgaaacaggtgaggtcattgaccatagagtggcccggtgttcatgttaggccatcgttctcgtacccgttgttaggaaacaaatttgttgtccgaggtacagtccggattctctccgtagggttactctgtgtcgccggcagttgtgagggggataatggaccggagttttgttgaatatccataggggtccaccatgtggctgacgtgtcaagcgtcccaccttggatataattgtcccaagcatcctagagaaattagtcccgcgtgctaatgacagtttaaagtcaatggaggagattacccagtcgagattcacctgcatatcaggcatctgtccgaacatgttattgaaaatagaggaagcacccggattcgtctctggccctccaaatccccctagggttggcaatgggggttctgaaggcttcaatgacacatcattaaacgttgcgctttggccaataggcgtcattccgctactgagcaatcccaaagtcatcgcggcactttgcttctcgtcttgaggctcaaacgcgggcgtgacgggcgtcccttcaagattctgccgctgctgaaggccattaagcatcacaccgaggacaccgctggctttccaagcatccatggtctcgtctcggagttcatcccagatttctttgcttcgctgcacagccgccatcatctcttcccgcctatctcttccccaggcataggtatcggaagatgccctggaagcactgggtagattgtaaccatggtaaagatcaagacagataatcgttgcagcttgcaagaaatcgctagagctgagcgtagttactcggttctgccggctgcgtaatcgacctgtcggtcgtgtttccacatggagcatcgactgataacgtaataattccaaggctgaatcaatacaagttctacgcgaatgtatgaaccgaggattttcgcgagcccgaagaatgtatttacgatgaagcaagcattgcgctcggtggtaaacactcatcacctacaagccgtcagaatggatggaagtctcaactggctagcaaactcacagaaaatcgagacataataaggcccaggggatctaacgaagactcctcgaaggggcgcacaagcagatgatccggtatcatatcccgtgctcggcgtagttctgaatccatctctatgaccttgtcatatggcgtgttctgtaaggaggaggtctgctcaatggcctggcccagaacgttcgctaatcgcgacttcgtgataaggtaggagagtggtgtgggttcgttgggaggtcgtgatgggggtaattccttgcagttttcatcgaaatcatcatcatagaggttgcgcggaagttcggtatcactatcggccatacgaatcatactaggtagcccaacttggcaggaaaaaagcagatccgcttgcctgacaaatgaccataccctacggcgcatttcgccctggaaaggtgtgatgttcgggaatgcctttgagtctctgtggtatcccattctcatagccagtcgaacaatgacaccgttaaggacccaaaccgagacgtctgcttcctttgtctgacaaaagtcaccatggaggtggaaagctaagcactcaatgaggtatgggtagggttttgtgtaatcggcaagtgtaagacacattgctacaaggtttcgaaatgtgccagccatatccaatgatttgcccctaaattcaggaggttcatcgccttcacgataatacgacagcatggcgagccgcatcatggcgaagagcattccgatccagacaatgcaggtctgggaggggtcctcccagtgtttattatactagaaaagattcagcaacaatgccgattctcacatggttgggccatacttacctgagcctgaaaggtagggccatgaagaaagtcttgacaccttgttagcatttagtgtgaaaaatacaaaataatttagatacttacgagtcgcagggtcataacagttgaaataccgcgctatgagcatatccgttgtgtatttcgaaggaaatgaagacatgatttcggctctgctagtcgctttcatggccccaaagagcagtgtagagccaggaacgtcggtgggaagtttggttgccttcagcttctccgcttgctcttcatattgtttcttatgcgtgttgaaataattcttgacctccgatatctagaaagaagaatgaatacaataatacccaatgcttaacaggcgatgacctacctcactgaggactgacgcccaatgtgcatcactgatatagtatgacttgttgttatccattttcatgatgccgaatgacttggtcacttgttcagtctcactttcctcttggttaggcccctcgtcttcaatttccaagtcatggacatgctgagcggaccctgtgctactacttgttcccgatatagcagccatggcggctgcgggaccctctgattgcgacccgttggtcatcaatgatagtaccaagccctccaggcggtcgattctgttctgcatgtcatctggagaggttgaagcagcctggttcgccgagttcttctttcgagaatttgtttgagcgtatgtgcaggaatgagcgtcgccgcgtttgacacaattctcacaggggtgcgcacggttgcacttcagcctattgaccgttagatatatactggcgaaagagactaggagagatttgtacatactttcgatgccgacaagggccgcatgagagaggtactcggtttcgctttcgaacgattctgtactggccttccggggaagggccattgctagaagaggttgtagacggtggagttgggctcattttgacgctaacaatgccgggatcaagatagattttagaacggcagcacaagagacgagaagatttaggaataaccgacgacacagatggcgtccaaccagtcactaagccgtgcggagtgtcggtgatttatgcaaccactgctgactactaggaaatgacggggagttagaatatccctaggaaccgccaaccgtcatagattctaaaccttgatgcagttccaggggcagttgcacgaggctcgacgagtaggcgcaacagttacccggtcacgcccgcctgtcaaaataaccaagtccgtgttctagaagcggctattcttcaacgtctcgtggtttatcagttcactcgagcgcttgtacagttggaccgcgcgagaaatcgaaatgtacgtagtgtgtgtgtattggcgggcagctgggggttcagcgcggggtgagaggcgatgtaggagtactactcagcaaaggtcaaaacgtgagccggaaagaagcaggcgatgcggctgatatggtctatgatatcagttgctcaatgactccccagcaatgttggacgagttagcggggatcgaagcgtggcgatggacgtaggatgttttgcgatcgagctcaataatgccaagatcggtcgccagcgataggaggtacagagtgcgtaggttgactctgccacaaccaggggccacgaagcacgcgttattccaatgcgctctggtgttgaatccggacgagcaacacagttcgatcgttgaggaagagaaggaggagccaccgcaaacgggatcctcgagacttcctaacttggttctgcttagtgacaagtctgagaaggcgttatctccgttatcaccatggatcaccaaaggcggtcaacacctgctcttctggtcgtctctgtttcccagactctggctcgaactcggtttctggcggacggccaccaccagaatgaaggtgggaattggcttcttgagtgacgtttttcgtagaaaattcagaaaaccagctatagtttcagtgccgacactagtctcgccgtccaacaagtacccttcacaatgaatcctcgtaggctaccagagttttcgtcaccattccagatcaaccaagcgcgagcctggtggctgaaaggcctttctgaaccgtcccgtcatgttacggaagagtctgaccctggtcgagaccgcgtctttccatttgctagtccattgcaggaatcgtgttaggatgtggctttggccgatctgtcagtcacagctggtgtgcactccaatcagaataaacgatggggtgtgatccggcttctcccttctaccagcaatggctcaagttcagcgtgcaacttaaagttgagaccgtggaaaacagctgtcagacagagctggagactggaaacccgtgaccggatgggtcggtggccggatgtccacccg

SEQ ID NO: 3700 - DNA, 3037 bp, Emericella nidulans
cacatcggggccatacccagcgagcgcccaccgacacgggcgtgcgatgcaggccttctatccatggatgcacccaccgcatgcaggtctggcctcaatcagccgcaacagccgagcctagcagaaccctcacgtaatacgactggctgataaaagcagaaaccagtcagtcagtgagtcagggcggagggtaagtgtaagactggttaggtttgcgctgtgtaacgggccgcttcgtttaggtatgttctccgataggtcggtctgggagcaggcgtccttgcagaatttccatcgcaacttctctcagcacgcgcggccgcgtgcgagaaacgtgggatctgggggcgggaatgggcgatggagacggggaatgcacgaggaatggagggaaccgggcacgaccgggggaacgagcccgggggaggggtgcgtccctgcgtggtttacggtgcacatgtttctatccctggcatctggcattggatctgccagggtttatcagattcggttggctggcgcatctcagattcagctctcaggcaagcaaggggtgtcgagggcaacgacaagataggctcgaagaagcgaggagggctgcgtccgctgcagttggtttcgccgttcccctcgtgccattacgaccgggctcgctaagcccctgcagatgcagctgggcggtttgagttgagttgcgctgtgctgctctgctcgagtcgctcgagtcgaattgcctgaaactcccggttcgaaacggggaggcaagcgcaagtcgagggtctgtcttactcgggccggtcgtgacaacactagcgacattgacgacattctcgaccccgataaaaataaaacatgagatgcatggcgcagaagaagataaccgtgcaacgtggacaacgtggtcggtcagcttgtttcagggtggaatgtgtggtgcagtcagaccgagacagaaccccctcttcggcattcagaacgtcgtacaaggcgttcagcgcccaatccttcgagaatcatccggcttggatgatcgtccgtgattgggggcgtcatgaatggaggcttcatcttgtcttcgctctggcctgtgctgctgtgctcgtcctggctagcacctagttgcacctagttgcacctactagcacctagtcacacctgttagctcgacccgggtatgttatatggggacgccatcattcttttacctggaaaatttttttttctacctggaaattagcagaattagcacggcgaaacactcgaaatggtccccgatgcgcttcgtacgagccagccagcgagccatccggctcggatagtattggcgggcgatgacggctcctcgttccctcccttgtccgtctatttcttggcgataccgacctcagaaggaatctcgtatccgccggggcggtcgatcaaacacgatctctaggccaatcatacgataccccaatcgaggaagaaatcgtttggcgccgggatgcagaggctcccgagaccgattcacctatattaggcgtcctgcaaccaactataatcgtcctctaataagcgtcaccaccatcatggattagcgggctctatccccaccgggataccacgatctggacgggcggccgcccgtccagactcggtacgtttgccggccttggacaccacaagggctgaggtcgcacgtctccctgggagctggatttgtggtcggccgttacacgacaaggccagcgctgactgtaggtacagcgcggtcggggaggccgaaaaacccgaccatgggatacagacagtgtaagctctcattctattgggttatcaaaatcatgaaatttaaagatacttgcaacctcccatggattcaatcttatctcatggttctgaaactctatcctctggtctccgcctccattagctgaacgtgaaactgcaggccgtccattagcccgcgggtattatctccgctgttgcagttcgtcagagatacctgattgctgaataataggacgcctccctgccgattggaaccagacgtgatgttcttctgcagtttcctctgcagtctaatgatctcttgcctatctcagagtggttgatctgccgggcggccaatggagctttactgagcgacgcagggcgtccgggatcgcagctggatctcagtggtcttcacgtcaattactgttggtaagatgttctattattttttattatttttttctctgtctcgtttttcgcttttcccttgttttcctcgttttcctcgttttcctcgtttgggtcgtttggctcgtttcccctcagttctagtcggttttcctctttttttttttttttttctatttttatattcatttttgtctttatattcgtggcagttggggcggttcttcgaggtgcctacgttatccagtcaacgacgctgatgatggagatattgatagccgaattttctacctctacatctttgagtacggtaaattgtcaatggaagccatgaaggttcaagaagtctagattgagtaattcgatcggttttacaatgtgtagtattaagaggactactgcgcgccaggcatggaagtagctgtgcctagctccccactagacagaacaccgagacaaacatcgcccacctctgcacctttcgtccagacgctattccttcctgttcccagaagtgacgatttagcaactgatcttattaccacacgcagaatgacaacctacacaacgaaccacgcgccctctgtcctacaaacccacagctggcgcacagcccagaactccgccccgcacctcctgccgcacctccagccgggcctgaagatcctcgatatcggctgcggcccgggctccataaccgtcgacctcgcgcgcctcgtcgggcctactggccacgttaccgggatcgagtacgtttccgacccgctggactcccgcggcggcgctcgcggcctcgagcgggataaccaacgtcacattccaggtcggcgatattcacgcgctgcagttcgatggcgatacctatgaagtcgtg

SEQ ID NO: 3701 - DNA, 2006 bp, Emericella nidulans
taatcaacggcagcaggaggaggaatgtgccgacggagtttccaatggcggacttgaagatggacggaacgggctggccagacgccaaggctgcgagctcggcgagatcgggcatgacaaaacacacaggaacgaggaaaataagacctgcgatcaggttgatcacgatagtgccgaccatcgctttggggacctgcagagcgggctggcgcacttcctcgcacattctacggggcttggttcagcattttcctcagtgcacaggggtatcaaaacggggaaaacgtacgtgatgatcataccggtcgaggatgtcgcataggctgcctgcagcaagccaatgcagaacgaccagccgtcgggccagccagtctggggctcaaaatggccaaacacccacttggcgctgcgcctgccgtttttggcgatcacgagcaaacagatgtcaatagccacgacaccggccagagtccagaaaatggcaaaagacttgagaccattagcacacgacttaagagggggatcaagcgaaaaagcgaaagaaaagcgttaatctacctccaaccaagggagccatctatttccaaacgcggggattgcatggctaacgagcgtgatcgccaagaagatcacgtaggtgtgccaagcctcccaggagtcggtcaggccgacaccattctcgtcctcaaagacgttcaaacaggcgataaagaactgcgccgagccgaaattcaccgcgagggtgatcatgatctggccggtgacataggcccaaccgcacacccaggaggagatgcggcgacaccagatgggcgagagcacaaaggtctggtaataaacaccgccggcggtggggaaaacagaagtgatttctgccagggaggcggctacacagaggatgatcagcgatacgaggacccagccccagatgatgttggtcgggccgcgccggccagggcgtaagtgtaggtggtgctaaggccgtaggggaccgaggcgaggataaaggacataaaaacgacgttccatgttaccggttcggaagagttcgggcgtgtaaccaaaatgtcgagggctgcgttggcaccgtcttatcggatccggtatcgatggcgctctcgttcagtgtcgcaggggcccacggggtatcttttggcgtcgacattttctgatggtcttgctgctgctgcggggggtggcgtcacgcgggaaggtgtagtacggtgtagcggatgggagtgccgcaggggaagtgttgcttgggcacagcttgggcttgggtgtgggctgcaaggtcgaatgggcgctatgggagctaccgcaagggcatggtatgggccgggtggtagggtggtacacaacacagtacagtactgaggatgggcgctctcgatcggggccgagttggggctgagttggggctgagtataacaatctcgcaggtgagaactgactgcgacccgacgggcggacgcgcttttaaatgtaaacgaagtgagcaaaaaattttacggggcggacaggcgtgacagcgtcgaaagctaaagggtgttttagcttctcggcttgctatcaattccagcgcccgtcatttatctaatctggccccctccagtccactattggtctggcgctgcaaccgttccatgggtggagattaatgaaatgccggtcattggtcagaggccacgcgacccattgtgtgggctgagagtgacgtagagctccatccgcaggcagaagctaaatcacgtgacccagtccgaacgccgcccgcttcggactgcctcttataggctgctgacgcaggttcacccagattacctgcgtcatgaaacgctggaggaacctcggctgcccacccgaccccacagtcgcttgcccacttgcccactgtccagtgccagggcaggcttcatcattttcctgctcagtattctggcagttgatcgcgtgttttttggctttccgacgaacgtcgatctcctgttctttgatttcgatgt

SEQ ID NO: 3702 - DNA, 7085 bp, Emericella nidulans
gttggcgctttttttataagaattaataaagataaggtaattctgccggaaacttctggtgtaggcgttcataatcctgcttcgaataaaggttcgtcgagtgcagatgttatatgttcgcaacacgcgattctggtttactcgagctacgggatatatctatagtgatttacaccatgaagccaggaagccatgcagctcattctataatagaaacaggcgagaagcctaccacaatccaaattggtagcattgactaccatgaagccttgacgttgatttgcccgtcatcatctacaaacttccctcgatcccattccctcccttcgcttttcgtagaccacttgacgttctccaccaagccctcatcgctccttgtagcgacaggagtcccgctcttccagcgttcgacaatatcactattaaaccccgcctcccgcaatcggtcctcgcccttctgtttccagcgcgcccggtcacgtagagcttccagggcaagttcccaatcatcatccccagtcataagtcctgccacaggtcggcgactagaccggcttgtttgtacctcatcttcttcaggctgtatatcaagagacggatcgtaatcaggggcaaaatgagcgtcgatgttgctgttatttggtttgtatgcgccccgtccgcgagatcgaactggcgcctcttccttgggcagtggaccaacaagctcttctaatggatctgattcatcgtcagatctcctatcctgaatccctgccgcggatctttgatcgcgtgacgaatttatatccttgagattctttttagcctctggcgaccgtgagcgcgagctagagcgagttcggcggcgtagacgacggtcgtgagaatcggagttcttcccacgcggggagcgacttcgcgatcttgaatatgaatggtgccggtaactcctccgagaacgcctgtgccggtcatcattccggtcccgctcatggcgggacgtacgtgtccggtctctatccaaagaatcggaacggctcttccgtgaacttcgatgagaacgatgtctctcttcccgatccgtcctgtttcgtcgtgaatctcgatcgtcggatctgtgtgaacgaccatgacgatgatccccgctgctcgcttgcgccgaagacgagctctggtctcgtaaccgtcgcattcgatcccgggcctctctctcttcttttctcttaagagccgcattgtgggttgtccgtttctttgatgatatggcgaagaaaccgcgtgttaggcttgcgagcggaacttgtaggtctgtggcaactattagttagttattgaggagatttttcttacggcaggaacgtaccttgccggcatgtaagcttccatcccgagagtagagtacttcatggagctatcccgagcctcctttgcgagtacctgcgcgacgtagtcatcgtcatctggatcgcctattgccttccctagttttagaggcatgatagaagcacttgaaagtggcgtatgaagaaaaaggcaatgccgcgtttgaattctggctacatcacctcggcttcagaatgacaggaaccctgcaaccccacatgcaaatgaagcaagattttgagtttggaaaggacgactggtttggatggaggcggatgtgactgatgggcacgttcaccgcccgaactattgtaatgccaagtctgaggatagcgttctgtttacctccacattctgccgcggggtggagttcagcatttaagcgcgatttccacaaccattgcatatacattgttctcctgtgctttcgaacaattatccgttctctgagatggctgaaccgaatgccgcacagatacgtcagcagattaagcagctagagcaagaacatggcgagctaaagacacaattggccattgtcagaatcagcgagccgatcttctccccagacacagacaggtccccttcgaaacgcaactcagatgtctccacggtagacagtccgtcaccggcatccctcgaggcggacttgtcgcactacaaggtatggtggaacaactcgttagccgcggcggtctaacgtctccgtataggagttattttccaagctgcgcttctcgtacgtcgaacaagtgacaaaagagaaatttctgcgcgcgattgtgggtgatccgcccctggttgttggtcataacgagaatgtggaattggaagcgcagttggcagaggtaaaagcggagctgaaggcgcgtaaagaggaggtcagactgatggtggaggagatggagaagatggctagggatctagcaactcgtaagtacctgaagagctaaccatcattctcaaaactggccagggtccagaggaaaaggtgtctctaacgattctcgactctcagggtacaacaatgtccagctgcagatgactcaactcgctacactccctgaatctatcgaaaaccttgaatcaaccatcgccgcgctacgggcgaaacaaatcgccaattcagaaacctcgtcatcgcaaaacctcccgctccctgcgacattgtctctcctcgcgaaacgcgaagctgaactcgctgcgctcaaccgacaaatcgctgctgcgcaaaatactctaccacggaagacccgggaggctgaaactatggagcgagagttaggtatactggagcggcgcaagtcagaagcaataatgcaagcccgagaggcgcagagaaaaaagcaggagggcgaaagcgacggcctcgaggaagcagggaggtggtataggagtgcggaagaagcactcaagaaactgttgggagtacaaggttagttatgacgggcggttttttgatgtacgaagtacagggcggcgtttctggcgatattggggttcccactacggtgcaatcggctttactactaatcgacaagaaaatatatctagcaaatcggattcgaaactgggtcgtaggctataccttgtataatatttttttaaattcgtggaaatgcaaggtcgtacaacattatacgcgatgctgcagtgacatcgaagccccgtagatatattgtccgtaacgaaacccgccaatactcctattttagataatttactcctcgtcctcctcgccctcgtcatcaccgccaccggcagcagcagcagccttcttgcgctggacacgaccagggcgaccaccaccgaagggagaggtaagagcgaagtcgatgtgcttctgagagtcgagacggaccatgtaggagggaacgttgacaatctgcttgccgacacggatgtgacgctgcttgatcaggacacgggcgtggtggatggacttggcaaggccaagcttgtagacgcaggtctgaagacggcgctcaaggaagtcctcgacacggagggccaggacgtaatcgagcttcatgcgggactcatcgagcacaccaatgcggaccagacgacggatcaaagcgttaccttcgaacagacgcttggggtccttctcatcgagggtgaggagctcactgattcggtcgttggttagcctatattctacgcccttttcatccatatgaattgacataccgagcagcacgacgaatcttggacagggtaaactggacacgccacacctcacgcttgttgcgcaggccgtactcgccgacaatcttcagttccgagtcactagcataaccaggttagggaacaagaacacacgacataaacagaagcacgcttctgatcagtggccggagagtactaacagacgagccgactcgaaagctgcgcattgttagcctcattcttgtagatttcgacaaggcgtttccgcttcgattgggttcacttacgacgacgagggaccttgtaggtcttggagtagacgcgcctgcattgaagagacggtaattagaatcatgttcaaattgacatgatctcgtggtgtcgaatatactcacgggacgggggccatgactgcagatttcgcgctgtcgcaacggttgtcgaataactcagctgaacgacttctccaagttcaacagattgaaggaagtctttttgaagatagccgagcccgtggagcgaaaagagtgggccatgtcctaatgaggactagcgtatagggctagcccttgtggccggaggacggcgcactaagagccccgaaaagcgacaccatcgtagagggcggcagatcgagggacttcttcgttttcgacaagtttcaactctcaacgccaaaaaaccgtcaaaatgggtcactcccacggtctccgttccggcacccgggtatgttaccgcaagcatgcttttattcgcatcctgtacggtcgctaatgaagagatcagtatgccttctcccgcaacttccgtgagaagggtcagatccgcctctcgacctacctgaagacctaccggtacgacgaaatctctcatatataccagctggagaatcgaggcaacagagactgatcgtgacaacagggttggtgacattgtggacatcaaggtcaacggtgccgttcagaaggggtcagtgaaatctccgtttccaaggcgaaaaaccgcaaccgcgacgagttctgcatgaccggttttcgacctaatctgtggttttccttttggataaaatgctgagattataaaatagtatgccctacaaggtctacaacggtaagaccggtgtcgtttacaacgtcaccaagtcctccgtcggtgtcctcctctacaaggtcgtcggcaaccgctacctcgagaagcgtatcaacgtccgcatcgagcacgtcaagcactctcgctcccgtgaggatttcatcaagcgtgtcaaggagaacgccgagaagaagaagcaggccaaggagcagggcatccaccttcacctcaagcgccagcccgcccagcctcgtgaggctcacaccgtcgagggctccactcccgaaaccatcactcctctgccttacgacacccacatctaaacggatcgaatggcgagcgtgggttgtttggtgtttctgggtttttacgtctccaagtgtggagtttgcatttgtgacgagaaaaattgagggttcttgaagccggcacgtttccatactgtgcatagattcccctgaatgaaaaagatcttcaaaaagcactctgtttcctgattagcagactgttgttatgtggccatgtgtgacttattttggtatggatgattctactggtgtacttgggtacaatcagcgccggaagagattttccttcacctcccttgggtcgtatagagcgaggcgaaggtccactgcaacttggacgaatgacattactttttggttgtgtctggggagtgttcgcttccaattgacattgacctcagtgcccgtccgtgatttccgcaccgccccatgggtcctttttgtactacagagtgtaacagtatcaacctcaacacgatacccgtaagatcccaagatgctctgagaccaccatgaggatgatccaatcccgcccatcgctgcaagacgtcaaaaacagcccgaatggggcgcagttgtatcgcatttcctttcgccgatcagtaagatagagcaatagccgaccaagattaggaggctatgtggtcgaccgtctgtgatcgttcgggcatacttaattcatgcctgagccgctcactgcctcagcaaaacgaggggtcgagcagcttagcacagccagtttcggtctgcggcgctgcacgggcacggtacgctatcctcgtactttgaacagggacaattaagctacattagggagccacttagtcgaggcagccaacgggagagaagtagccagaccacgtgagacgtcaactctctccaagaagattgagttcgaccgaatattcacgttccagtaaaaagctctccaatgatggcttctcacagtcaggattcattcgaaacgtaagaactatgctgcgccattgccggcaatgcagaactgcgggattcgggcacccgagccatcattttcaggctcttgatataactacctcggctggtcttcacttgagccgcatcaatcccttactgcctgcgatcaccaggaagattactccgttcatacatattgttcacctaactagaactgttagctcagggaccggagttaagcggccatactgtgtcctccgttcaaacgtattttcacccaacttgattattagttcagagatcggtgttaagcggccatgctattgctcttgagcacaagtctacttttaggaaaccgcgcgcccaaggcacagggtgctgataggcgcgcccaaaaacgcctgacagcagtgagggagcgaacttccttgctgagaccagccgtcacaaatgagcgccctcagattacgctggtctcatcaccgtgcatgagggtgagaaggatggatgtaacgaatctgacgtgctaggagccgttacctaagcgcagcgaaaacgccgataaacagaaactacggagcgtggaggcaggtggtgtatctgactcagggtctttgaatccgaggtcgatcttgaaaattagaggatgatggcggcatcacagaatgaagtctgctcgccacaatcccatcaacaggtctaggtgcttttcgaccaaatggttcttggcgcaccccccgttagtgactagggtaatatactctgattgcgttgcaggaactatcttcatgttcgagaatcggcctagtattgcagggtctttgaagtatgaagagggtggcaaatgacatcatgtccgcaggaacagccgcactatcaaccttgggacgctcagcggtctcaaccgcaaaatatacggtatactgctttgtttgcgatctgaaacatcttgtgctctctgcttgatactcatctgggactggcgggactttctctcggttcagattgatccccagactaggagagcgagtatgacgtacccacctagccgatccgtgtagatctggggacggcggctaacggcctgaagggcagcccaggagtcaagattgaaagtgctgtatggactcgatccaagaatcaaccagagcgcggtggcaaatacatttaatggaatttgagtttgagactcttaagtcgtttataacagcgagt

SEQ ID NO: 3703 - DNA, 5977 bp, Emericella nidulans
tcaaaaccacctgtctcattgcgaaagccctcaactcctgctccaccacctccacctccctccgctagtccagctgcaccacctccaccaccccctgcagcggccgcacctcgaccacctccaccacctcctacgcgtcccactccaccaccaccccctccgtctgctacagctccaccatcactccccaatggagcgtctccggcatctctagcagttcaggctgcgcggaatgctcttggacacagtagtcagaccccgtcaatacctccccctccgcctccccttccggctgcctcagcgccttctgctcctccccctcctcctccatctgctcctccgtccgcccccccatccgcccctccaagcgaaccaccatcgcgaccacattcccacgaaactcagtccagccatataccagaccgctccagtctggcccctagtgcttatactctatccaatggcggttcatcaccgggctcaagtgccaccagcttaggggcacacgggatcgtccgcattgaagattccagattcaaattccagaatgaggggctatttccaaagccacgaccgttcgttggtggtaccaagcggtaccgcgccggtaggggaagcagtgtgccgttggatctcagcgcgttaagcggctgaaaggactattagcattgatactgtacccacaaatttcatagttttagtcctgggcatggcccgccacctgaatcaagtgctcaaatatgtgaattatttaacatggagtatacagctgggtgatgaaccagtagttcatattagacagccaatatgaccataaatcacgtgacccctgtagcttttagattcgagccgcggagagcttgaagcattaacacagcctggatttcctcatcactcaccaaacgacctacatatatttcgcattctacggtctgatcgaccaaatcatcttgaactctttcacgaacacgaattttgcgaatcgcctccttataccgagacgcgccgcaagtgattgcggacagttgacgagcgagcgagctgaatttggagctattctataccaatttcagtgtctattccgacatttgcgtctcagaaatcacaccctcaagccaacttcataattttactgcaccggttgccctattccgttgcctttgtccgctttatcttgcttacggctcactaccatgtcgattaacgcatacataaacagtgagtctggttacagggcattgttctctctcagaaggacgctaatcaagctcgcatccgacttagaaagagtcctgatcctcaccgttgacgggcgaacactcctcggcacccttctttcgaccgaccaactcacaaatctggttcttctagatacaatagagcgcattatccgaacacccgacgaccccgaaccaagctcacagatcgaacatggcctgtatctgattagaggcgataatgtggttgtatgcggtgaagtggatgaagcaattgaccaagatatcgactggaccaaagtaaaaggagaggtagtgcgaggaacgaaaaatgcatgattacggaatcggtcaactagcgatacggatttactttccccaaaaaaaaggtatccgtccatcctgtgcggcctataggagcggcggcgtgcgatgtattggcgtataattggcgtatatgttgagcaaacagcttgttcgtcttcttcctcgtttcgcgggatggcacgctggcttgtgcttggtctcgcgaggctggaaatgcacggatgatgtttctcgtgttgcctgggcctacgcccagttatgtgggacgccaccattcatattatgattgcgtctgcggctacagtgtatagtgtgcgcgtgaagatctcgcactggcggtaattggggagggggaaacattgtggtatcttcatataatttggaccagactgaggcttatcagagtatagattgcctgacgcggtaaacacattctatctactcagatgtgaggataatgagacggaacctgtataatgagcctaactacagacaatgaaagcatgaattcatttctcgaaatggctgtcttgttcggggctacatagtccgtcgtaatttcctgttctaataaagcctacgcaaccactgtgagcgagaggggccgcttgtcggagtaacacggactaactggcgcaggattatggtcgataatcagcgtttcatcccagccaaggcttgtcccattgcacgatgagttggcgctgcaccctggcccaggacagtcaatccataaaaggccccagtccgtcctcttacccaaccttgtcaagttgaaaatccagatctaaaaacagtctgctttagagtgcagactaccaactgatcagcacagtgacggctctggctaaggggcggccccgctgctttagtgagcggctcctgcgacactgtaccgtagattcccctgactttaggcttcaacgcttccaacaacctccttcctcttctctccaaccaccacccctctccaaacgacgctcgtttgcgtcttcctgtccttttaccttaccgctttgcagcagctccctcgctccttccagtttgttcgtcttctatttgcagtttactttcattcatctcagccttcgtcgctttccttaaatccacgccgctgcaaggtcgctggtcgatcttcgataattgctctgtctaccgcctcttaattctattattcgcccttcatataccttctgcgacctgactctcctgcgacgtctagccccttataccgatgcccttcatgtggtcctcgatcgccttgactacggatctctgctctcacatcgcggcacaccagtgtcaatcttgctttgcgttatcggactactagatcataacggtcaccgtctcgatttactctgttgagtctctgggctagtcggacagcatgtggctcttccggggtgcacagtccgccgtgttttactacgccacttgcactccgtgtgccgattccatggcaaagagaaagcgcaagaaggaagcagtccgtgctcgttcgcagcgagaaaagcagcagagcgatgccattgttaccgatcagcctcggccttttccccagccaactcctttcagtacaaatccggggtggatggaagagatcgccttgggaccccacggcgcgaagcggagaggcggccatcgaaccaatatgacccatcaccggatagaaagctgggacacaagcgagtactccgtcggctcgggtgaagactacgaccgcatgggttctcacgtacctcctcagaagatgagcaagctcggctctaagcatctcggtgaccgctggaatcgcatgcttcggtatcagcgtgaagacgagccattatggggagaagaagtcgaggtaaagggctcttcagttggaatctccggccagggtaaggtggatgcaaaagctccaagcaaatactgcatcacccgtgtgcccccggtcaatgatctccatccgcccatcgtcagcggacctaaaagtagagccgaaacgagatggatgcttcaacctcctcctagtgcgagagtcatggctggaaaggatccatgccgtacactcgctccacccgtggattacagaactaggcggatgggcagtgacagatcaacctcgcggcgcagcggccatacccatactctacctccattaactacagagagcagccgtgaatcttctggctcctctccttcaccacccacgcgttctcctgagacgccggaaccggccactcaagatctcccccgctcaccatcacccgccttctacgcttacggcaaggacgaatcacatttcgtcatatcatcatctatctactcgccatctgattcttgttcaactttgtcctctgtagacgattccgatcttgagtcgcccagggactcactcctctcgcctgccactcctatatcgcgacctctttcaaaggatcctaccagccaccctgatgtctcgcgtcctgcaattttcagggctttgactgcagtacacaaggataataaaaaggatattcatatgctacaatttgagctccctgacccccatgatcttggagtaggtcaagtcgaacgagtacggccattccgctggagtatggacttctgaattgagtaatggcggaaccttcctctcatacctcttaacatcctgatggtgcgttggcagaacattcttgggttatgcattgagcgggtagtatcacgattgggctcagtatcctgatagcgagtgtgcgatttgtcttcacaaccccgtatgcattctcagcgcgctacgatttgttggaacagattaccccatggcaggaccagtataacccgaacaacaacactcattcgctcttctacttctgtttcaattggttctgctgaactttcctctcttgcgcagagtaatccgaccctccttcattctttttattttcctgtcgcgctgctctcagatcgttattgactcccaatcccttgcacactgcctttgtttcagtaattttttggctgcgaaaaccgctttgcatgtctggcgctttgcttctgtttatgtttattcgtttcgcccaagcaccttttggttgtacctagcattttgatatcctgactggaataaaagctaatcctatactgtaacttctgatatgttcttttgtgaaatagaagtgccgttgtaggtagcatagtgcggtcaaaatatatgattggacctgggcacttggttcttcgtaagcagtatataaagatattgcagtacgcaaaatcgattgggttctcgcatgcatcatgtatagagttgcatgtgtattcatctcacttttacttgtgccatatcatagccttcagtttcatacacgtaatacgataaaaagaaatagaagtactagtatgatagaggctcattcgtaatcaaacagtcaagcagtcaatcaggcatagttctgcttttaagggaacaactttccaagtggtaaaaagaagtgctttgtataaatttgatatggtacggcttgctgttttcatatggtagtgaatagtgcaaatgcggaagaggaacctgcactgcagataatcggaggtaatctgcggtttgatactgaggaaagtgttctcaccccgcctgcttgccgcgtcttccctaccgtctgctgtgaatgtctgtctgccctgttgagggattctgggtatcgatatatttaatagaccttcttcttctcgtccatgctcagttggccaggacccatgttcactaagaggagcagtcctccgctgtgagaattagcaagattttcaggcgggatatactaggagtgactgcaggtgtagcttacacaatagacaggatctggaagaagtcgtacttggcaaagtccttgtgaggatggtgagggtgcagctgatgcattgtcagtttaattcagcaagtcgatagaagcgtatgcctgcgggcaacataccgtccaaaagttgttgacaaggatattgaacacgctcagcaggaggacgaggaggatggcgctgaacttggctttgaagccgacaatgaccatgacacaggcgacgaagccgaagaggctgacaaccacgcgccagagactccactgaccggagaaaatgaagccaatgaagaggaaaatgagcagtacacgaccagcgaactggacgtacatcttacggtccttctcatccaattgagggagtccggcgggaacgaatctcttgcggacccatgagtcggagagaaccatgagcagaccaccaacaacactcagattacggagaaagaaattgagatcgaaaataagtccgtagccgagaccttggacaacaacgacgccgagaagaccagcgacagcgaactccgcgtgtttgcggccaatcacgagcaaggagcatatcgtcatagttataacgttgaggatcaggaaagcgtgagtgataccccaggg

SEQ ID NO: 3704 - DNA, 2074 bp, Emericella nidulans
tgcatctcttcggtgtatacccactgcatatgcagcccgtagctgatacctagattcataaaggcaccattgcgacgacaagcaccaagcatatacatggatatcagaacataggactggatcgtgtataagctgggagtctcggtgaaagcggagaaagccagctgccggccgctgacaaagtatcgctccgcttgagcctggttggtgtcggatacctgggcgccaatggcgaggacaagatagaagattgagctgaccgtgtcctcgtctcccgtcggatttccaatccaattggcgagccgcgggtgaaattcctcgaggtcaaacagatcgagcaacggactggtagccaaaacatactgacgggcgagccgttgcgcctcatcattacttggaggctgagccagcggcccattctgcgtggctgagctgctctggaacgcctcgagcattgaatgacgcgacgtatcctccgtgaactcgcaccgtccgatcgattgagacacaatacgccgaacactctgtaaaaacgacaagctggcggagtccccgatatacataaacttcccctggccatcccgcagcaatcgcgcgaccttcggcacaggtgccgctcctccatccttatcctcctcaacttgttgctctagatttgcgcttgtgtcctcgagtgagttgagcaggtgatccatggccgtgcgccgctgtggagtggagactagatgctcgctgagtaacattgcttctttaggatcattgccgggccggagtaatcgagcaggcttgtccgagaagtggcattcggcttctttgcgccgctggatgcatatcgtgcagggttgttccccgttgcatttttgcttccttctcttgcagctgtcgcacgcccgtctgcaccggagacgggccccggcagctgtactggctcgaggcattggcgttgtctgattcaagtgtgacttccttgggggaggtttaacctgcggtcaattcgggttgacgagcggcgattagtaggcggctgacagaaggcctattcggctacttcgagataaattgttgcgcatcttttgtcagtaaagcaggtagttagcgcatattgcatgtgaagcaaatcacagtcgataatcaagctgggaggtgtgctgggtgaacatgcggtgcctggctttctggctttcccggactgtggaatatcggagcttggcatatgcctgaggcatgaagattgacattcaaagcctgaggcagactttgcttttacaccatgacaacccttatattcctgcaaatatcatggcttgtcacattaagaaatatgttcaaaggcattgactcagtcttgataaggtacagcagctaaggtacagcgcgactgaattttgtttaagctactgagcagtttccaccaactcactcagcccgaaaagacacaagccgtccgaatgtatctgcagtgccccaaatgccgtggcgcaaaccagacagctgaacaatttgactatgatcgacgaacagattgacgtcgatgccaaactctcgaatgtaccaagtatagacttggggatctgctgcttcaaacataacccgttcaggcggaagctccttcatgatcttagacactacgtccgtcctccatgacttgacgttctctgtgataccctccgactcaatcatcagacgctccacacccgcatccaagaacttccgtcccaggttcaccagttttccagggtcggacgtgccgagtgactcgagaccagccgccgaggtatcgccgccggccccaaactgaattcctagctcgggtttcgcctttaggccgtacgaatgaactttatcgaccagacgaagccagtcgtcttcaggaatcgagaggaatccggacgaaagctcaataacatcgaatctgtggtgcaaagtcagaacccggaatggaacaaggttgagcatgacaaacccaaggtcttcgcatttggtgaggtacaagtcccccactgaggttgggtctggatgagtgagttattactcggcccaacaaccctaaaaccagctagtgagaacccgtctg

SEQ ID NO: 3705 - DNA, 2797 bp, Emericella nidulans
tccgatttctattacttctttgacagatttcgaaggcgatacgtaggtcgcaatattccatctcttcaagcgcacgagcaatgcaccgaactcggatgtacactttgctagtaggccatcttacatgcctggtaaatagtccaagaacttgctcatagtataacaccctcaaataccaagagcagatatcggcttagcctactgatcgcagacccttccctaacaggacagaggcaggtctcgacgggaccctgccgtccagcccaccaagccccaactgtcagaacccggggcacggcccgtgtagtcgactcgatatggtcaaggcaggaaaagactatgacgatagtgtaactgtccacgtaaactcgagagtaaccaaaagccggaccggagcgggggcggctttcaacaagcgaatcccgtcgatactactatagaccaaagcaacgaaatttcaatccatcgactatggccaagacaggccgtgtgccaaggatgccggcggctcaacggcgcgttttctagcagccgtctagttcgggcagtaattagtgattagtatgccatatcagcgcaggagacacacatggggcatatttagacggctgggcgtggctcggagaaggtagctgagcagggcaatgcggttcaatttattgctgctcagaagttgtctatctttagcgatggcggaggctagcacatttgataggtaagctaggttacttgtaattgtcgattcagagtgtatcgtatcttgtaaggagtgaacacgtatgggtatatggtgatggacatggacgtggacttgacatgctagtaggaaagactgtaaagcagagacccgcctatgcgacaacaaaaaatggaaaacaagtatacatggcaagtgatgcaattctccaggcttagaatatgaaaaaaatgaagaagcgcaaaaaaaaaaaaaacaaactagagtacttcagcatgtctataaagcaggaaaacaccgagggaaatgcgattaggttgtcgtattggtcttcgttcttgtctttctctggtaggttgtgctgtctcctgcttcatttggctctgttcttcgtcgcttgcgtcggagttcgggtgtttgtggtggttgccgctgttgttgggtattatcttgttcttgttcatctcgttccctttctcgttcctgcgcatcaatgagatctaattgcgtttcgcactggtctgctgtatacgtagtggtggcccccagttctgtcatctattcactgttagacagggagtcttgtcccgagtgaatgcacgagctcactttctgtgctataaacttgtacttctctcgctcccagcaacttctagcctgtaaaagtatccgaacctggaaacttgtcagttacgatgacatcttggccacattccacttctttgtctcaagaagtcctggagtaatcgcgggacactcacgcacatcatggtcatcccaccgggccattcgctccttccgcctgcgctgccgcatctgcaggcgcgcctcggtggcatctttgttgtatcgctcccggaacatgtctcggactactctccatgctagtttttgctggcgaaggctgtccacaaaggcatcttcttcttctgcttgcgggttccgacgcccgcgtccaggtgcccgggccggctgagtgctggggccggcaaagctctgcctttgctgctcttctaggcgctgaagcccttctggatgcggaagaatatttactggtggttcgcgggccacggactgcctggattccctccgggcccttttcttcgatggctggggagagagagtctcttctctattcccatatccgctgggtgcgaacccgaggccatattgagggtctcgaataagctcgctgggataagatgtggtaatccctagaccatgatgggcaacggagtcggaaaccgggtactgatactcctgcgagtgatggcttagtcccgggctagtccgggtatgagcatatgaggtgtctggcagactgattggtgtaaggattgccgaagcttgatacggcggtggtgcattgtatggattgctaactgctccatatggtgactgcagaaagcccagggtatcagtttgcgcggataagggattttctgcaacagttgtactctgacataccggccactgtggattgatacctccataaaactcatccatcccttcattgggattgcatccaccctggccgaatgacattgggacgtagtattcacacaaagactggcaaaaagcatgaaacaagtcaatcagcgtatagctagaagcgccgagagcgttcgcgagtgggcccaagaggtcaatagaacgcttcgtgaatcaagcagctgggaggcctgtgtagaggacggcaaattgtaaaggctcgtccgaatagttttgagatactggctaggtagaatatatgatttgtttcggaccctgaccagatgtatgcgctgattcgtcctttgcacaataggctcaaagttctttaagatctcagcgatgtttatcttgtgaatagggtagaggatggtgatgagagagagcttagcagcgggctcgcaaaatgatatatacgtccgactgcgatatcgacaaagccctatagccttgcaaggtataaccagactatctaagctggtctttctacaacaggctcacagggttcccaattgtggggtatgcaccgacgaccatttccgagccacacaaaccctgtgttaagtagatgcctaggatggacgacgaggctgatttaagcgcccacct

SEQ ID NO: 3706 - DNA, 2514 bp, Emericella nidulans
ttgatactcggatagtgttctcgaatatggcgcatgcaagagagagtcacatccggtatccggccctatgtgtcgtcgcataagttaaacatatacctaaacatatacatctatatccaaggcataggagtttacacacctcaaagtgaaaccatctggcctctgtgcccaacttatcagcaatctgaataaattcttccagcttcatctcaggcagctcattataattgacaattgtcctgctgcctgaagcttgactcttgataatataactggaagctggctccttgaactcttgccggtaaatgcagttatttaatgacacctgaggctcaaacgcatctcggatctgctttgaagcaaccgacgtctgtgccggaagaacggcaataagtttcagcggcggttcctggccgaacgagggctgtggtacgagctgtttcagcacttccaacgtgttgggacagttacccccacgccgccgcaatatgctcgttgctcgtagcttgtcatcctctccaggataatggggtgttctgatctcgttgtgagcgggtcatcgaggttcttcaggttggaagaggttgactgacgtcaagattgtatcgatatagcatgcccctactgcgaccaaaaccatgatttatgagcaatgcactgaagaataaacagagcagctgtggtagacacttgatccaaagtgttccagagacttgctatacgtaacgttccgcggattgggagttgttggtttgcatcgaagggatggtggggcagcctgacccaccacccatgggttagctagtagtactctggtataccccggtaagaatgttagtccggtgggccttacaaggatatgactcctttggattctgccgttcgtattaatgctaatatcttactaatattttgtatggccaccctctgcctcgattactgcctgacatctggcttgcatagacccaataaggcctttcaaaaagtctgtagggactgcatcccatgaagctcgtacaatttctcgtagggcatcataagatagctggcggtcatctggatatctctcttggatccagtctttcatccagttccataccatctcaatagggttcagatcaggggagaaggcaggccaactaataggatagatactacgctcatgaagctctgctatagtatctttgctggcatggccaggtgctccatcatgcataagacaaagatagttaccttgctgtcggttcaggcgaagatagccgtcaataataggcacaattcgctcacagtaactctctgcattgatagagccccattctttctcccagaaaaggcaagggcctttagtatctccataaaatgatccccaaaacatccaaccatgctttttgggggtagacaaacaaatacaggtctcatctagctcttctcctgctcttctagtaacccagattctggtatggaagcctggagtaacccaagtctcatcagatcaaagtattcaattctattgctcaattgtccaattcacatgctcaagggcccaggcaagacgtacacgctttgtatcgtccgataaaggtggcttttgaagagttttgcatcgggaatagcctcgttttttaagtgctcgagcaagtgcagtttctccgcagggaagatttagttcttcaataacttgtttataagatagtcggcgcgtacgttgtgatgaagagataaaggtaatgatattgtctatatcctcttctgatagcttcgggcgctggccaggaggctttcgaggagtagattgctcattctggcaggtatattgcacctgacgataggtaaaaccagcatctcgtagagtcaaaatgcaaatccgatcatcgcgacttagccatctagaactttggctcctttcagatatctcagtcacctccaaaggcgcctctggaggggtgctaggtctggggatagccatattagcaatgctcaccaccatggatctcaggaggatggcgatattggaggttttactagcttcaaaactaggctgaattaagaaagcggtgctttgaaggcctcaccgcttcagaggagtcatatccttgtaaggcccaccggactaacattcttaccggggtataccagagtatatagattataatattatactactttatatactagcatattcctcctattttttataactacttaatattagatattttgcagttttaaagtgcttgtatactagcttagttaatcagaaaatatagcttagtattagctatattaataaacttaatttccttgcagcctatctataagcttaaattaatatatttaagctagatataattagaaatagtttttaagtagcaggactagtactattaaatcctaaactagtacttttaaagcttagtatttaggcttatatacttataccccctagaagctatagcagctaggcaagtattttttacctatatatactagtaaatattaataagcttttaaagc

SEQ ID NO: 3707 - DNA, 4706 bp, Emericella nidulans
accactgctctcagtgcagatatcctctcccacaacaccccgaatgactgctgggtggtcatccagggcgaggtctgggacttgacagcattcgccaacgagcaccctggcggcccttctggtgtgtgctggctgttcatattcaagaccgttggctgaaatatatgcagttattctcaagtatgccggcagggacgcaacagatgcattccttggaatccacgccccgacaatcatcagggaaaacctctccagtgggcacttcaagggcaggttggacacgtcgacgattactccaggctggacgcagattacacaaaaagcgcagcctactgggcagccccggcagcccaagccgccgctcgcctcgctaatcaacaggtacgttttgttgctcggataaatatccgaaatagaggttgaccgcttcaacagctacgactttgaaaaggcagcagcagtgagtgcctcggagaaggcgtatacattctattccacggctgacacggactgctggacgcgcgacgcaaatgagtccatgctcaaacgaatctggttccggccaagggtgatgagggacgtggccagtgtcgatacctcgacctctatgctggggatacaaatgtcaatcccgctgttcatatgtcccgctggagtcgggtcgcttatcaatccagacgcggagaaggcgctcgccagggcagcagagtcaacggggatcgtagagattgtacgtcaggtcaggaagagtgagactctgctaactctcacagatcagcaccaactccgcacatcctttggcggacatagtcgaacaagcgcctggatatccctttctgttccagttatacctgaacaagcagagacaaaagtcaaaggagctcctccttaaagcagaatcacttggctgcagagccatcttcctgaccgtcgactcggcaggacgaggcaagcgcgaatcagacgagcggctaaagtcagacgagatgctccgtgacccagtcaccggaaaactcatgaaagcaggagctggcttgaccaggattatgggcagtttcatcgaccagggaatgacctggaaggatctggcgtggatccgcagtgttactaagctgcccatcatcctcaagggcatcacgtccgcagaagatgccaaaattgccatgcagtataaggtcgacggcatcctactcagtaaccatggtggccggaacctggattactcccctccgaccattctgctactgctggagctgcacaagaactgccccgaaatattcgacaagatggaaatttacgtggatggagggttccgacggggcgcagatatcatcaaggcgctttgtttgggggcaaaggctgtgggtatgggccggagcttcttgtacgcgttgaactatgggacagaaggtgttgagcatctcatacagcgtatgtttgctctcgatcactataagtcttttcacgacatgctgacgtttcccagtgctcaaagccgagatggaggcggtcatgaaactgattggtatcaaggacctctccgaggtctatcccggcctggtcaatacagcggatgttgaccatctggtgccgtctggccctaatcacccgtacatcaagtggaggatgcgtagcaatctgtaaatataacctgccgattcagtccggcatcatcatctgcaagcgcaaaatatcatatttttccaccgcaaggaagtgccaccgtgtttccaaaaccaggcgctggggaggattgcgacatccttcggcgttagggccgcttaataggtcaccatgacatgagcggcaaagcctcggtgcctaagggcagcgcgcttcgtatagttctgcaaaccccataactgcaatggtctagtgcctgttgaacggttaatgcccaccccgtgtgctacccgcgaggtattgggtggtagctatcatatatccgcggcctccatccatggacgtcgtatcatcgattttgcgactctgtgagatgcattggtataggctaaagtgttcgaattagctatgcacttcgactccataatggaccactctgtcggcgtacatcagcctctccatggatctagacgagttttaatctcaacgtgacctggtttgagatggatttcagcaatctcaaagccacacagaatcttgtcgccaaatgcagcagaaagaccagaattcgtagaaccttgaagaacgcccaagagtttcaaatttgccgctagaatgtcaacgacctgtcatatctagcatctacccaaacggagatgtctccagattaggcaaacggtaggcgagcattttgtcttctgtcaaatatctgtatcttcctatcaacaaaattggatttgttccggaacccaccgactatgaggtaagactgaccacgttcatgtgaactctactcaacatttggcccaggggcttggaacctcgtgtgtccgtggaatgggtgacgacttgccacaggggtctatcaagaacggtagttccaccagagcttgagcttggcacatgtccatgcagcagtggatagcccttcctgcgaaccgctttatacactctcatgttactaatcaagtcactacgtatagaaatagctctaatgtctccggtacctttttgagaagagcccgaaaatatgtttgtgaccctcaagacaagctcaagtgcatcccatccgacacacgagaattccaggacaaccagccctattccatgacgaggcctagccaccagtggatctttgtctcgagctcatctacgaaacattacgatagcacgaaaaactattgtagctgggtctgaacagggtctgctcaagccacaaagctaattgccacgattcaccgagttagcacatggtatttgcggtcgaactgacaatgtagaatacccaaacactgtatggccgggactcatgaatatagaaactcgtggctgcccagcacgtctaagcaatcacgatccacagccccaactctatattaatcttttatttcttgacaactgccgacatgaaaacaatcgcgttattgggggaatgtggagtgaatgccacacggccctggagcttgccagtgctggacatcagattattctcatcgagaagggctcggagttattcaatggggtctctggtcagtttggcattcgtattcataaaggcccccactatcccaggtctgggagaccagggatagctgctgacggacatttgagagcttctaccagaagtacccggagctcgttgtccccgtcaaacagcaatctatgcccttgctgacagggacgcaaggggaagagtccaaagttgacgctgaaatattcggcgacgtctgccgcgagtcaaaggagtgctcgcctgttgaccttcgttcttggagaccagcaagtgagctcgaagatgcctacaagctgaacgagccatgtgccgtgttgtatccttacctgaagcactacttccgagaaaggttgtccagtgctggagtcagtatccgtctcaacgacgaggtcaccgcagtgcgccgttccggagagcgatattgcctctcgacattcacccgctataaaggattgttgtttgataaggtaatcaatgctaccggctatgtttctgccctttcagataggcttcttgaatctcccaattcacctcaacattaagtagcaagcatgcacggctttgatctacactgacagagatcccggccaacacccatctccttcatcgccatggatggctggttcccctgcctcgtgccctgcatcggagaacctagcaagatcggagactatgtcctcaatcacggcgcatacacaatccttggttcctacgagagcctgccgaagccagattctgcttgttaaatatggcgccggacttcatggactctcaagtccgcccagagatcgaagagcagatggaacgcttctggccgggcttttcgcggcggttccactactagggctggaagggcagtgttctgccaaagatggttacggacaccgagttccggagttctgtcgttttccagtcagaaggggtggtctacatcttctccagcaagatctcgaatgttgtcgatgctgcagaggaggtggccttcctcgttgacgggactgattcctaagtgatccggcgtgatgggtatggatacgcaaggattttggagtgatcgaagtcgcaaggagatagagatgcggcccattgcacagggtcacgatacttgttacctacaaactcatcgggagctgtgtgtaaaggtgtaaaaggtttcctcgttgttttaattgctcttagcgtcattgtttctttcaccttatgtcattgtgaaggctctgtatttatagaccgtgcaattgaacactttacggagcaggatcttctatagacgtccgtcaattaagtagagcatgcagttaagctacctcgacctcgctttagcgagtgaaattaaatccaatatttggccttcaccaacgcagagccggggaatgagcagtcaaagtggccaccggggcgtgcagtcaagcaagtgatatcaagactaactaacagtcctcattccccggttgcgattttgtcccggtactggactacatttaagtatagcagaatctcactgctagggcacgcatggggcgcattgaataaccttccggttcgtagtctgagggtacccgtgagtaca

SEQ ID NO: 3708 - DNA, 8388 bp, Emericella nidulans
tgaaatagatcagcctttttcaagtcctggacgatgaatgtgctgatatcctcggcttataccgagtgatgtcaatacacattgcggacaccgaattaagccattcatcctgcaaaaccgagcgctcgcagctgatgaggatacggactggattggatttgtcttcatccgagagagctggacgtttctcaatcatctcgaagagccgcttaagctcttcttcactgaggatatttacggagtctaacagaatgtaatgcatcgcattcctcactggagacccaaggcctaatgccgtccacagcgtctggcaggtagcgtctttaaagtagttcttgtcttttccagattcttcacagacaccagccacatgtcgtgcatagacagcatcttgctccgccatctgcgtacagatggacttgatagccgtctctggacgatttcggtcgctatccgccttgttggagatagaaaaagaatagtaccccaacagacccctctcggctttcgtggccgaattgcgggacttgacgtcctgagcaattgcagaaaccaggaatgacttacctgttcctgggcctccggtcagaaccaggagggaattcgaagtgctgcttctgtcgagccactgcttatattcgtcgatattattcaaccatttcccgcttcccttgacggaattcttccacatcttttcgcgagcatcaataacattagcggtctcttcctccttctgcgccaagttctctctaatagtcttcaggctcttctttcgagcatcattcaatccccgcttatgctctgcctcgactaacccgctcacgtctgtcttgattcctttcgcggtcgtgtcaatctcggtcacggaggacttgataaacgccacgggctggttggtttccagcgccacctcaagagttagggtggcctgcacattcaattgattctgcgtcaacttcttaaagttatcgagctcgtctcggaccgatccctcatccagaaggatccgcttagcgctccgcttgaagcttctccagcggccctcgcgatggatattgatgcaattcgcgcatatatcgacgaagctcgtcatcacctggtcgatggatgctcgcagggcctcatcaacggacatagtttcctccatccgctggtaaatgcgaaactgggcgagcgcgggaccaacttccgcaaagatcgcgttgatctccccgtgaaactcgtggaccgttttcggaatgtccagaaggaaagataaagcattgaaacagagccccgcaggaccgaaaacctagtaatcctattttagctttgcataagagtatgatccaacggacttccctaccaaggacgcgccctcacggcaatgccgcctagcaactggatacaacggattattttgaacccggtttccttcgctcttgaaatatcttcatcatctacctgcgcagcataatgggcagcaagtgcccttcgaaggtcttctgtagttcttgacacgccattgagttgctgtcccgtgcgttggtggaatctggcgatggtgttctcccagatctcctgcaccgacgccggggcggtgttcttggtttggctcattatgagagcatagttatggtcacagtatggctatcaagcggaataatgagcgtgcaacatcgaaccaaaactgggccatccgtcgggatttatgcggcatgtctggcgctaaggctcagcctcatgactcctacgattggtttcgcatttcagctcggaactctaaaataagcccaaggtcgtattctttcgcggaataagccagttattcagcgctcatagacattagcactgagcactccaaattgtataacagaacacttggtggtgtccgtttcagtccgttgagaacccataccgcgcaaaatctggattggtttattcaggaccggcctatagaatataggacaaccagtgttcaataaatggagactccgttattataggcgccgtgcaactgaaggtgcaaactttgtcggatgtttaagaggtaatacttcattacttctggaatagagtagggctctaaacatctgatgccttaggcaagtagagttccagcgaaaaaagcgaagcggcacctggcctcgtgccgacccgcgcctccaccctacaccctcattttaagcataccaaccatgtttactgaaaacctaacggcggtaaaactggcaggattctaaataagtacgagctaaatggcatcacggcttcattcagcaaaagcttctctggctgtggcgcgcagcagtcacgtttcgtttcgtttcgttttcgtttcgtttcgtttcgttttattatttaacgtcactcggcggatcacgtggcccacgtgatctgcggcctcccagggggcatctggacgtgctacctaaacagaactgcctaggaactagctagatacaggtttgaagcagcaactatggacaatatatgttggaaatgagcggaagaagcatccggcgctaccctggccaggtcttcgagggcagatgcccgttttgactacctatagattggggggaggggccgtaccctttgtccaggtagatgtgtggactgtcgcactttcaagcgctccggcgggcccagttcgggcatatgtccttgaaaaaggatgattcttgcatgatgcggctgaattcctcagccccggcagctgtacttaagagccagtctattgtttttgacgggccatcctttatacatctccatctatccttccagcgttttctggtatatgggcaaaagaagaagtgtactggggtctttgccttgccgcaggtgcagctctccaggtagtctgtgtggtcaaaatgctggtggtatgccgtaaagtctccgtggcctgtacaagcggcgacgagtcggccaagtacccaccggggcagcttgtgctcgcgggagcggctttcttttgtatggggtctgatattcagggctttgtaggtttcaggcgccttattagcatatgctgtatatgtctctgtacggagccactgttttgcctcccgtcgtaggtatgctggggagggggggatgtcggggctgtatatagaagaccctagcttagcgagcttgtctgccagctcattcccagcaattccagagtggcctggaatccagcggacctgaaggggcttctgttgcatggttaggattgaagggctttccatccactaggcggctagttggctaaaggtctctgacagaccatgtctgtaaggggttggcctatagcttgctagcagggaggctgcagctaggttatctaggaggataactagctgggtggagtagccaacgcatggttgtcccagggctgcgcgtaggccttccacagcacctatgatttctgcatcatagacttctgtcctggggcccgcgggaccatgtcccttggacatgaggatagggccaaagtagattgcatagccataccctgccccctggctggtccgtgagccatctaagtatactaaaatctgtaaaggggcagggctgtagcctttgttgtctgttgggagcatgcataatagagggagaggcagctctattatagcgtgctctggcagggggctgaggaggagctgtaggatccttttaagcctggttttgggcctgcccgcggtagtctctgcggctatttgggcaattgggtgtttagtatcaaggctcatgtatctcactgctgccctccagaggatgctgttgagtagagcttctgggtctggtaggtctgcttcgcggaggagtgctgcagtaggggtagtcttgtaggctgggataatagccagggctgctgtgcggaagagagaaagcagggagttaactacccctttttattgtttgcctgtatagaagacttctgccctgtacagagctgttagaagaacatactgtataactgctgcccacatggaggccactgggcagccgcgctgggtattgctaagtctctttaggtgctgggcgagtcgtttcccgcggctaaagaccaaattaatgtgggctttaaaagtaagctttgtatccagaagaactcctaactactgtgtatatagggatggtgtaatctcccctataccaggtagagtaactgtagggagatgctgctgctgctttctagagaagtattgtatctctgttttctctattgagaaagggaggcctgtctctgtccctagagcagtaatttgcttgtaggcctctaccagttgttgtaagctctcttccagggtattcccagttaataatatacccatatcatctgcatagcagaaggagccctctaaggtagagactattcttgccgcatatagcaggaagagtattggggataggggggatccctgggggagtctgcctttaattggtgctgtggcagtgccttctttgatatgaacagatacagagcagccagtaagccagtccttaagtagctggagtaagcctttataccatccttgcaggtgtaagtgagaaaggagccgttggtgtattacagcgtcaaatacccctttcacatctagtaggagtagtaaagcatcttttccctgttaaaaggcctcctctaccctgtgaacaagaacctggaccaggtcaatggcagagcatcctggtagggccctgaagtggcagggggctagcacatctgcctgaattgctcttacagctatctactgtgctaggaggcgctctaggcctttacctagggtagagaggaggctaattggctgccaggcattgagttaggtatagcccctctttcctggttttggtaacattattacctttgctgacttcaggctcagtggaaagcagccttcctccatacacctgtagtacagttgtgtgattatatcccctagtacgggccagagctccctccaagcagtggtggcaagtctgtcctccctgggggcagacaggggtggggcacagagagcagcccagcagtgctcttttgttggcaggtgtagtgagcccaggggcttgtttgggggtccctcttctgtctgatttggaagcagggcccccttctctaagaggtaattaaggaaggcatctgccttgccctgtggagtagtaacctgtgccccttgtatattcaggggagaagcagcgagctggtctggatgttgtatccatttagcaagtttgaatgcatctataggtgctgtggcttgttcaattcgctgcttccagtattcagcctttgcccgtacaatggccttccggagctgtttatagtcggggttttgttactgtcttgtttggtgtagtatgtctgttagttctggagtccaccatggggtcctagggagtctgcgagtattgtatcttgatgcgccttgtattgcaagctgggatgtctggaccagttgtttggctagtaggtcaattagtagggttgggtcaggcaggcttgccagggctctggctttctcccagttagtagatccaagcttgtatataggcgggggctcttcttgttccagtattattccaattgttgcatggtcacttggagtctttagatggtcttctactagggcccttagtggtaggttagagaagacaaggtctagggtgtttggtccacgggtgggggtgcctggctcaaggcgaagttccagctcatgggcatcaagccagtctaataatcctgttgcgccaggtatgacagcataagactcagtatctggctgccagaatgggtgctgggtattgaagtctcctgctaggatggtgttctctgggggtgcatatcctaggagtgtggaaagtatagagggtgttgagccagcaccagcaggggcaactaggttattaggggggcagtagacattgatgatagtaaggcctgccgtgtagattgtggtgatgtctggtaagattggttccggaagggaatgggctgggagatccctttgtacatatgttagagtcctgggtctggcagtccatcgggtcggggggctgaatagctgatatcatgggtaggtcttggttaggtgctttgctgtgtttgtccaaggttcttggacaagaataatatctgcttcaaaggagagtagcaggtcatatgcagcgcccccccttcctatattagcttgtagtattttcatagttcaggggaggtcagggtttggtttaagagctcctgggtgagctgtcttgtaggctggtttgtagtgtgggtattatctgtttgttgtttagagctttcttctgctttcttctgctcctgttggaaggcaagccggcctgccttgcggatagcagctagagcatcttttgagaggcgggtgacagtgttcctctggacgtggggtctggctgggcatttttggaagtccgctgcatgcgggccgcagcagttgatacactgcacacagcagttgtgttcctgttttgaggatctgcaggagatacagcgttcgctggagcggcaggctcgtgtatcatggaagtggtggcatcgggtgcattgcaaaggcctttgcttggggcaggtgggccttgataggccggacaggccaaagagttgcaaggggtgttgtagcctttttggaaaggctatgactgctgtgatagagtccctctctactgggtgctttgagagtttggccatgagtagtttaataccagtaatgcgctctgcttcattgctgatatctgtaattgtagtatctatctatctatccagggaccagagttgtttcgggatccaggggacaataacctggtaatactctgttggtatttcaaagtatccatccccagctaggcttgcagccttctctgacagtaagaagaccttgccttgttcagttgtagtgattgcatatcctgttgatattacttgcacctgtgcaatcctgtccagaactttccctgcaagggtgacccggatgccatgtggtccaatagcccagaggctagaggaggccgggaggcggaggaagatgcggtggtcagtcttgtttagctgcttcagctttcgttgtgctggttgcttggcttgcatacggtgttctggggcaatagtttgccagttcccctgaccagctcttggggctgtcagggatgcccaggttgtaggctgcgaggttcgcctcttcagggggccttcgcaagcttcaggagtgggaggttggtttggctgttccatctgcctggatggctgtgggggtgcagctgctgtcatcagaggaatctgctgaggggagtcctgttttgctagggaaacaaatctggctgcaagcccccgggccaggtctcttgggcggccctgtagagaggagacagttagatctagagctttagcaagagaggtcattgctagtttccaatcattaagaaggactagctggtcgtctgctaccatgctgacctgctcgcagatcgatggggcttgtggcaaatgggatacagggaccggagctgcagtgggagtcttctgtggggagaataaggcccttctcttcagggagttccggggtaggggggtcggggtggtaggtcctgaggggggttcagagttttcacccaggagcggagtccccggacgggctctgcctgggggggagtcatctacctccatggggtggagggaatgatcgatgagcaaagcgtaagagatcagttattagagcagtagggggccctgttctcccctcgtcgtggttttgtaaatgcgcccgtccgcgttacgtgggaattggggaattgagggattggggtcacgtgtcacagggccaggtcgtcgccagctgactcgcccgtgacagccgggcctacaatggttgaccccggtgatttgttagtacgtacggtgggcctgaatctcgattcgatcttcaagctctgccagttctaatgctgacaactattcctaaaggagctattaattagtattgcctccctctgcctcgctagaacgcgtggcatcttccctgcatggattcaacataatatctttcaagttccctggtactgcatcccgtgaagccagtaacctctcgaaaagatcacagggtatatgttcaattttggactgttctggacccctgtccctcgtctagttccactagtgtctattgaattgtgacttagtttaaaggctggtcatggtagataattagttccacgatcattcatctcacttatagtagcttgatcttgatgacctggtgtatttatcatacattagtcaaagccaaataacaagccataatatgtcaatcgtacctcgtatcataggcctaattgaggaaagtatctctcaatagtgttattaccctgttcttattcccagaaaaggcatggtcccacaaaaaagtc

SEQ ID NO: 3709 - DNA, 3537 bp, Emericella nidulans
aagtaatttgctaccactgagcttcgaacccgtcacagctgaatgcaaaggtgtcgccataatacctgcgttattaacggggctttgcagttatgattccttctccttggaactcgttcgcggcggcgatgacagactgccggtccatcagatccatgtggatgaagtggacgtcaccgtggggtatccgctcgaatcttttccatggtggcttcggccttactgggcgatcggggcgcccatgtacacgtgggcaccttgtttggtgagctcttcgacggtgtggaagcccaccccggtattgccaccggtgatcacgtagactttgcctgcgagcgcagcgacggcgaaggggagggtggccatcgttggtaagcgatctgtaatggaggggaaggggagacgaggaaggcaatcattccctggcaagcctagggtgcctgtagctatatcaggtcagcaaatatagaagctaaactcgcaggggagtggaggtcaccgccgctcgccaagctaaaagtctaaaaagtgtcgttaccaggtaatctgatggcatttgtttatcctgcggattacaattttcaataccttggcaggcataaagtccgctggagctgaagctgatcaagtctgcaggctcatctgaattggggcaagcgatggtggcgaaatgcacgggctcgatgtgcagtcgaagatgggggtttgtcatttatagcctcggcctcaccgaactctgtctggggatcgaccttactagtattctaagctgcatatctgtgtgcttattgaaggataagttgcagtactgtgctacagataccaccagaaagggcccctagtgcagcggttcatgaatcaatacgacatgactgagctcgacctgccctccgtgtgttgagctctcccggcgtgttcagacatacctgttagtagatattactagagtatgcttatattcttcgtagttcttgaagaaactgctttctctataattagtacccgtcagagccgggccggaacattctccctccttcctgcaacgacgatagattcacccagtcagagaacgtgtcatactcacctacctatagtctgacaaaataaaactagtcgtctcaattaagtgcaaaccttcaaaggctcgtaggagtagttgggaaccgtatctctcaaactataagaatataccgataattattctcaataaataccaataggcgggtgcgactaatgtatatcatcgctcagaaatgcaataacacccagatttttcttcaaagcttctgcaaaaccctaaagcgacgtctcagatcccaatgatgcacttacgtcaacctcagcaatcataacgtggttggtaagcgagctgcgcatgtaagcgagctgcgcacctgcatacagatttcccatactttgaccttttaaatcaaccacaacacctttatataattattatttatctggacaagcatttcttttatgcccaactctactacaagcactacatgtaggtaatgcctgtatctttggtgcttgtgcaccttctgctggtggcccgcatggaccaggtattgcctgaaaaaatgtattacgagcttcctcgagctccttagcctcttgtacagacagactattattatgagctatccatctatgcgtacgagcttgcttttgcctttgtatggcattttcagcacgtagcgccctattctcttgctctaatagtatgcccttttatactagacttgttaaaccacgggttggggcgggttttcaggcctagctgatccgcccacgcgggttttggggtgggttaccttcacagtaaaccgcccatgggtttagcaaataattctaacccaacctaaataacccaaaataacccagttatgcatatcattactctaataagcagtgatctacatagttaataaaatactgtatttaaatactgtattataactatctaagtaagcaaatataatctaaatacagtaatatacctattcagatatcttggcaacccagcgggttgctccgccgggctttggggcagccaaaaatatccaaaacccaatagataattagaaggtctaacccaacccatttcttggcgggtcggggcgggttggggcgggtttcgtgggttgggtttaacaagtctactgccttgcatattggtgtgatctctctttttttttttttttttcatagcctgtacagccagtaatagccgaccctcctttttatgggcgttttggcttgacccagcacgtaatcaggtcatggtggttgatggacgatagatgaccacattggcttgtaaaaagctggtagagtgcgcagctcgcttaccaaccatgttacacatctgagagggtgcaagggagctatggaaggaacaaccagcttgagacagatcagaatcgagtttcatctgtacaaggattgtcaagacacgggtgaattttgtaatatctttcattgccataatcaagctgccttccccgtgggaaatgtacatatatacagcttggatttggatcttgcgctgagttagcgcgggcaggtctgttcttcgctagcttgaatattgctcgacctttctgcaaccatagcggtctggattcattctggccattcatatcactaactaattattacgacttctgttacctttctttccctgacgaaaaaatcgtaaaatgcgccatagtctgctcttgttctcttcgttcggtcgcccccatagctatctcttcacgctgggcgaaagggccatcccttaattgtaaagtctgtggggaggttcactacacaaacacacaaacacacaaacaaatctagtcagcctcttacctagatcaaaattgtacatctgctgaggcaatttacgaacccgcaccgacttcttctgcctacattacttgcctctaccccatatactcagtcaaaacctatcatgctttcaaggctccttccaccacggtcctagtgggcatggccctcactagccaagcagcccaaactttcagcaacaccggcaccctcaccggctgagacagcacaaacaaagacaccacggcaccgtgcaacaagtcagcaatgttgccttcaaaggccccaaagcccttaaagtaacgcaggtctacaattccaggtacagtggacgctaccactcggagctcgtgcacaacgccggctatcgccgcggcgacacagccttctacggctttgcgttccgcctgcagcaggactgggagtttacaagccaattgtacaatctcgcgcagtttattgctaatttcaacgattccgggtgcgacgattggatgccctcaacaatgatctggctgcaaggaaatcagctttactcgcgcatgaagacaggtaccgtctgtgcgcagcagacagatatgtttccgaatatagtgtccgtctcggcgggcgagtggcataggatcatcttgcaggtaaaatgggagtctgacttgacaggatacttcaaagtctggtttactggtgtatagccca

SEQ ID NO: 3710 - DNA, 5989 bp, Emericella nidulans
aggcacgacgtcgcctgaggttctagcgcggtcgcctgagctgtagtcaccacgcaggttactgagatcacgtgcactgcattgcatcgtacccaaagccaactctccctattgtgtcaccttgcaatgcgctcgtcactttagctaaaggtatatttcaagacaatctgtcggcatggcaagagcacaaaagcaatagttgctcagacccacaagaatatgttgtggcgtgtatctgcgctgtcgaatcccatgtcagtttcaggcaaaacagaacagcttccggatttgagtacaatctgctgcactgcaaaatgggcagtgctgtttaattctgatggacggttgtgtctcagcagttgattaccctttttgttcaggagaagaggcaagcaccttactgcctggtcttttgtccgtaacatgaatgcataccgcgcggtgtataggcatctggcgtgcctatcgggcttgtaaactccgagatatgcattcgttttttaggaatacttgggtacataagctatgtgactttgtaggcgacgcaagctgtcctgacatattatagatagttcccgtgatagcgacggtgactgccgtcagaaagagacatgtaatactggcaccacagcactgttagcaccgcactatacatgtgcccgacaatatgcctggatcgagtcaagtcgccggatcagtcgaaactagagagtcagcatgacgatacgatctcgccctgtcgtttggcagggtctgcctgatcttaacgatataggttgactacaagctcccactaccaaatcttcatgccttgcaagtattgaaacgatgatttatgtctcgttctggtagtaacattgatttagaagccttatgattagagcacgtagaagatgtacagtctgtcgacctgaacaagaattgaaaggcacctagttaacgttctccggtataatgctaaaactattcacgtgtattccctttccacttggcctttgtatcagccctgtccttgtttccggcagcgaaggcagcccatttatgtctgggcttgtccaagagggtcagttagtatcatggctaggctagtcctcgagttccgctgccattgcagtttgattgatgacacgcatccagcaaaatcaacccttgcacactaaagtcacggggtcgaacgtgcacataccacagtcaaataaaaaaaaaataggcctagatttgaaagaaaagattgaacggagaccaaaaaacttgaccagtgccgggctcgatccggcgaccttatcggtgttaacgatacgtgataaccaactacaccaaccagccagtagattcttactctcgtgggtgatggatataccaatggagcggggttggatgaaaaggacgcaaaactagacttggtaacggtggggaattagggcacgtgtagtggggctcaaaccgatctggccaataggactcatggaagtgcacgagacaacggatggcccacatctacaccaccacgtgcaaattatcggcagactttgggagcatccctaaggactcgcaaggagatgccttcataccaacaagcaacaaaaaatgactagtgccgggctcgatccggcgacctcctcggtgtgaacgagacgtgataaccaactacactaaccagccaatcatgtggtatgttcttataaatcagaacctatgagaataatctccgctgcgcaaaaccccattcgcggttactgtgcgggtaacgaaccataagaccttcagactcggtataagttgaggtctgtgagagccttccctgggtcgagaagccagccaatcacaacacacaatatcaaccccggcgcaaaaaaaagaaaaaaaaaagaaaactgaccagtgccgggctcgatccggcgaccttatcggtgttaacgatacgtgataaccaactacaccaaccggccaattgctgaaagcagtattcaagatttgccaacttgttaattagttacgcggcgggctacccgaacacgaacaaatgttaacagcataacaaacaaatgtaacagcataacgaacaaatgtaacagcataattcactattgaagacaagacactgctagaaacagctctaattgttattctcggttgattacattgtctctagagctgctctagtaatatgactctagtatagtgtttgattccagtggtttttacggcatgatttgtatatataaatgtctatatatatattttcatttcgcaaggccggatatgaagatcttcgtaccaaatccatacatgatggccctgaagtgcggcagatagatcgcgaagcagacttgaaacctgcaagcgtatcggccaagggaaagaagaaaaattgtcgaggctgagagcataacgtctctgctgcaatatcaagaaaagtggacatcatcttctcagggctagacgacacagcgtcgaggactgccgggtatatatgcctcgtttgcgacaaaaaacaccagggagtacgattaagctaacaaagacggtggcattagcggccgaccagatgacacgttgactggatgtgaagggacagactggctttgacatattgataattcggtagggatttgtaggatgaggcgggtaaactggaatcccaagttgaccagttcatgacaagcaacgtcagcaagaatagccgcactcgaggtccatgataatacgacatacccggcgaatttcccgggagactctggatagcaacatagatactcctgagactcaaagatgcataagccgccctaatatccggctgttttctcaaaacgcctttgactgctccatttgtcgccactcaaggatagcaagacgcggccaaaagtaagtagtccgttaagcaagtagagtcaaccgggctagttcactggcgcacaaggtaatctcttcgatgggaaacttcccccgtttactatactatagtctcaatcgtagatgcagaaacaccttccgtgcatgacgcatgcgcatgaattagcatcccttttctattttcataaagattgccctcgcaatagtcttagaagctcccaaacgcaacaccgcaactgtgcagaaaccaaatgttcatatatacttcggctgtgctcgcatatggcttcgaaccataccggaacgccttgctcgtgagctttttctatatatgggtcaaccagcgcccgaatcacgccggaatgtaaagtagtctggctagcctaagacgagcgacggcgggcaaaatatgataccaggcttggtccactgaggatgtcgtctgatcagatcgagataccgatggtggcagccgtgcatgtactcctccttgaccgggcaaacttctccctgaattctagcgaccaagggtctgtaactccggctgaggaaatagatatgcccggcagggacctgcattattaccctcacagttagcatggatccatgtctatgagagctgttgaccggccaagctctagtttaccatacaccgccgccgccaaccttctgcgcccaccaggaaggcgctggttccaacctcgctggtaatcgacttccgaaagtgaggaccagtcatcgactccgagaaaatctcggcaagaccatgtggactggggcatccttaggatataggccgcgaaatgggagctggcaaatgctattgcaatcgcgtcgaccatgcactttgcgtagcccgattggcggttgtcatggcaggggttggtcctgtcatcattgtggtagctgcacatatgaggcttgatattctagcacatggtcagtttgggtttcgagtgggttggacatgcagagcaggtggttccaggcagccaaccgacgaggccatccgttatacaatacagtatctgggacggtcgtccgacgtaaactggtctccggaattttggaaagtgcggcgtatctcggcctaaagagaccctttgtctcctgccccactcgttggagtggttcacctttggtatatcaaattttagctagccgagcaagcatcatggtttagtcctcttgaaaatcaggcaatttcacttacctaaggttacttagcaggtgtcttccgaacaatgcattgcggatttagagggaaaacccccagaaactaaagatgattgaaattagaggtggtgcgcaagctagaactggtattatgttactcaaatgactagagaatgagttgagtaacatagcagtgtaagcatactcccgtgcggctaactttcgattctcttagaccacaaatagccttgcttgcatagtcaaacttgaagcctagttttcacaattggccggttggtgtagttggttatcacgtatcgttaacaccgataaggtcgccggatcgagcccggcactggtcatttttttttaaccctatattttaagattttgcttcggcctagtgatgtctggccatggtttcatgctgaatatcttacgaggccaatggtcaccaatgaaataaagtgaaagcccgaattccatggcagctatgcaaactgtcgcagcttacgcagttccttatcccgctctcgacattcttgctgaccagaaacgtcaagcgtcaagccataggaatcatcacttgttagtggactataacccataagcatatgccgcatttccggcgtatcagtaaccatgcaatttgtacccctgtaggcgaaattataactggcctggagcctcgtacgactggtactctgaattcttttaatcaagtggattgaagatcttttatggcgaaaacctcgagagatggtttacagcctcttgctttctaactcgaaactggtatcgccatatggtcgcgttattgaaattatcctggataacatgtatagctgcctagcaaccaaagccaagaagtgaccggatgtcgagctcgagtgcatcgtcgaaagcatattgactgtcactccgccggtcatcgtgctgatattgacgattggctatgcttcggtcccacggcattgcagagggatgcgccttgtcaaaagatcatggtctgggtgaacaaccacagattctatggcgtcaggaaaaaagacaacatagtggcgcagatcaaggaacatttcgtgaatttattgcttgatttataggcagctgtgccgcgtgcttatacgtactgctgtgggcaccgaacgaagaactttcgacagaccctggctacacaatttctggaataaggagattgtgattgagtcactctggcctgtttgtttgtgaatgctctctgttcagccaataatgtgaggcgtctataccgtacttgccgctctatcgccacagttagatatcggcgcatagttatcgtcatgccatagccacattgacgcatatacatatagtaacaagtatccttaccgtgaagatacgtcccatagtgttctatactgacctctgcactctccatgttagtttcagacggctcttcaacgtacagtgagatcactgccccgtagccacaatacctcactgagagatatgtccttcattcttcttgcaggagtatgagttaccataaagagtcgtccgggtctatgggtgctcaaatatgaaacttccaagtatctcgcactagttcgcattctattggtgaatactgagcatcaagcgcaggtatcggaatgggcttgctttacgcaacccgtcacttatagggctggaaccgctgcacactgtgccccaacggtggcctcccttgaagctataccagcgtcctgcttttgggagcgagtatgaagtatgtcttgcttagccacatactttttgtatatagactagcgtactctcgcggtttgtggtctacaagattccagcaaagaccgtccacaattactatataggccatcaccagcacaacacctccatctcgcttccaccctgagcgaatattttcctgtcaatagtatcctgtcctagtttagatgacttctgtgttgtcagcaaccat

SEQ ID NO: 3711 - DNA, 2708 bp, Emericella nidulans
tgttagtaacttgagccgctcctcgtgctccgccaaatggcgctctctgagatcttttagcctccgtcggatcggccctagcggtggcgggggaaaatcgagctgttcatggctgctccaatgtattgtcttcgcccgactgacaacagacggagcagacgcttttttccaatgctccaagtttagtgtggtggcggttactgctcgagaactggcaatgctcccctcccgttgggtaagtgtgggctctggtttctctgggacaagggtttgctcttgattggtgacgtcttctttgctgggcagcgggatcgcctttgcagttgcagaaagaacctgggttgaagatttccagtagcgagatcgacggtaaagaattcgttttcttcgaatcaacatggctacggcaagtctcttctggagtgtctcgttgcaacctggaaacctgcgctgaatgattccaagtgcgaagaggtccagaaaccaatgttcgatgtcattcccatcctcgttcaagatcctgaaactcgttgcagctctcacattctggctttccctacttgcttttcgaattgtgttagatagctgatgcatcaaggtgatttcctcggctattccgccaactatggggtcgagcgagtctgacatggactccgggctcccgcaggtggagtcagaggagggatggatgtaatctaattgtgaaagatcttaaagagtgagtagtgtatacgtaaaatcaagtacaagccaagcaccagatcttacattgttgaatatagtcgttcaaggtccgtagcagacgccggacgagacgctgtatatccggagcttcacgcaggcgataatcgagggatcctcgcgtaggagcaaaaacgccgatgttggatacccatatcgagaacctgcccagttggtcgtcaaccgcagactgctgtcgtggagagagaaggtggaactgagcgaggcaatcgttgaaagactgaaggcagatattcgcacactgcgagatcgttgcatcctgccacacaatttccatggctcaagctctccagatgagagaggtgcatggtgatgcggtacaattgacaacaacacaaggtgaagttgaggttgagagatctcacgaggctgagctgacggagtcgactctcgcctaccccgcaccgcgccccatctcaaactgagcttccctcttttatccatcttgtgacgattacggcgcttgaatcagtcgatatgataacccccggataagcaggggatttggcacaagatccaatgggcacccaggtaggcttcatctagtggcgtaccttgagcattgttgacattgtacggcgggtgatagactggccaccttctattgaggtcacttgcgattttccgcgagattgctgattatcttcaaaatgaagagggtgacgatgagttgggaaaattctttgggcacatcaatgcgtacgccgttatcctgatcgactgcctctcgccactcgatcacagtcgatccaggtccagcgaccttgaaccgctactccatctgttactattgaaattgacgacgttttttcggtgctcagttttgcacgagtatgagtccacgcttccgccatcgaatcacttcagacgcttgacagcattagtatactattggggctcagctgaggagcaccgggaaaaactgtctcatacgcagcagtgcttagatttcacctcgcaggagcagagagctgagatgacgcttctacttcgtgggtgcgttgcgactttgctgtctcagagttctgacgagccgccagtagcggcagaacaccgagcgcgaccaaaagggggagacaaaccatcgtctgtgtatttgagtgcaggcactgtgttccaggcactcgctgcttcgtcaagagcatgttctgaagtgcataatcataattgcgccgccagacttcgcttatcgactcaccacaaacaagagagcgagcaggatgagtttgaggctctcatcacgctcagtttgagttgtcatatctggcaagaaacacgaatccaggccgtagccccaggccttccggctacgaggaaagcggccgtcagatttgcgctaccggaaaccagctgcgaaaagtctcaaaatcgtcggcgtcgtcgcttggccatcattagactatgtgagcagattgagaagctcaaatctaagcctctgatgcggcttaatctggtggttgaggatggcaagctctggaaagaccagtcctctcgtattgagcgtccagtaaatcaatccgatacccagctgtctctcgcagatatcataaagtatcgtccggctagcatgaccgagaaggtaaaacgggttctggcagttttgttggcttattccgttctgcatcttcacgccacaccgtggatgcggtcctctaatttcagagcggatgatatacttttcttcggtacatccgccacaatcccactgaaaccatatttacagtcggagttgaatgaaacacactatgactcagcacatcccatagatgctgatgagctcgatccagacgacctgccatcacatccgtttcctgacattgtcatgttagctatattgctcatggagatatacctgatccaacctgtcgagtcacaggcggagcaggttggcatggacttcgaggattgggaattggtcgatgacaatacgaggtatacaattcgat

SEQ ID NO: 3712 - DNA, 1233 bp, Emericella nidulans
atcaactcatcgaaccatgcatggtggagtattgagatggagttgtggtgcatgtctcatcgagtcatttatgtacaatatcaatatacgtcatcaacataggccaagaagaaatgtagatttcgtgatacaaaggtattccagaataagcccaaaacaatgaacatggaggggtagcagggtggcttaaaaccctgctgctcgtttcttcttcttcgccttcatcccactttttctgcttgcctcacgactcccaaacaccccccgctcgatttgagtcataggaacatcctctgtaggctggctgccttggaaacgtattatgggcggctggcctgtttccggctggctaccccaggctcctctaacagcaggtacaggggaagaaacgagaggcggcataggagaatcatgactgattttctttagagtctgtgacacatttttccgcgatttaccctttgaaaccttgttcttggcagccagttgtgacccttcggatgctagtagatatgaggccggatcgagtcccggttgccaatggtcgagtatgcgttccgcacttcgagaagtcggtcctgttttgtcatatcttgtgtaggatgataatactttgaaggttggccgctggtccgtctggcgctcgggtaataccgagtcccctagcgtagagctttgcgcggctgcggtatctgccggcgacaggacgctctcgtcagcggaactcaacagtgccccataagaggatttctcatcgttgagtctcgatagggtgttcaggccactgctagaaaaagcggaccaggtcacatcttttttcgtggtagactcagccgcttctttttgaggtaccgagataatctgggaaagcacaatatcggccacaagctgccgaatagccttctcttttgtgatcctagctcgtccgggtacgtcagaaggcaagtcggtgagccaatgattaaccagccgatcatatatagcaatcaagttcaacttcgaagccccaattggtttttcttgctgggttgaccgcgcaccgaacgaatcgtatggctgtataaggaacctggctcgattcccgagcactgaacggtccgactcagcttgagagacaaaggcagctaaatcttgagcgttctggtcgatatcatctagtgtaggtgacttccgcaacgtttcaaccctgattatttcttagtaagtttctgtcgttgttttaggatacgagat

SEQ ID NO: 3713 - DNA, 8140 bp, Emericella nidulans
agcatccaaacgatgggtcctaacaacggagcaagcagcaaaactcatagcttattacccggatgatccaatcggatccccctacggctggggcaatgtaacctggcctgagaaggggctaatgtacaaacggtactcgtccatggccggtgatatcaccatggctgcgccgcgacggctcctagcaaaaactatggcaaagtacgagcagcctgtttactcgtatcggtgggatgtcgcggctctgaacgcaacgaatactattggggtgaaccattttgctgaggtgcgctgctgcgaagctggcaatgttctgactttcagttcagccaagtagattagttgcacggggcaatgctgactgggcacttaatagatcccatttgttttcgcgaatccagtccagaatatcacgaaactgggggatgacccttctcgtttggaactagcgaatctagcagcacgcatgtgggcttcttttgtgacggatctggatccgaatgggcatggcagtacgtatacatcgatctgtgtaatttttgcaagggtaccctaaccctaagcagttgttgatatcccagaatggccgcaatattcgacctcggtcagcccgtcgaatttcgttttccgtcttcccaggaacgaaagctatattgaggctgatgattatcgggtccatggtattgcgtatataaatactattccgcggtagacgatgtaggtgcgatatttgtaaagaattgtggtggctcaggccggacaatatcattgtgcgtcattagaatcatcccagcgaactagacactctattataagtctaatgtggttgtctcttgcatgatctaccctggacccacacaaggggtggatagatcctgacattggaagtattataataggcaacaaggccgtactcgcggagatatcatatccaagcagaagtaaagcacagcacacaactttcgtcggcaatgtatacaattggcgcagactgataatagaacaatcgctatcatcaggcttcagcctgggtcgtccgggactgctgtgtgccattctcagaggccgcttcatcttctgtgctccattccttttcggagctagtttctggtggtatgttttgcgtagcaactgggatgaacctctgagctccgccggcgctagcaaagaaatcctcagtccgcagcccacggacttcgcttgggtcaacagaagtaattttcaaaccctgtgctgtcttctgtcggatgaattcccggactggaaccattgcagcgtcacggcaagcttccttgatatcactaccggacatccctgccattgctttgaccaggtagtgtaggtcgaagttctggcggtcaatcttagtatccttaagtactaggctcagaatccctaaacgctgcgcggccggtggtagttcgacagggaatttcttaggcatgcgacgaagaatggcctcgtcgatatcctgcatccgattcgtggctcccaacacgacaactcgctggggctcgcccaaagagtttgccgacgttagaccgtcccaatgtgtcatgaactctgctttcaccataccactcgcttcatgctcgccgctccgccttgtgccaagtaccgcgtctatctcatcgatgaagacaattgacggttgcagcttcctggctagggaaaagaccgcgttgacgagtttattcgaatcaccgtaccacttctctgtcaatgtcgaaatatggaggttgataaaggatgcgccactttcgtgggcaagcgctttcgcaagcatggtttttccacaaccgggagggccgtataagagaacacccgaaggcgctgtgagaagtgaagatgtcgacgagaaaaggtgaggcatcgtcaggggatatattacagactcctttagctcttcaatgatatcttcaagcccgcctatatccttgaaggatacgggtatgtcctccggggccaccacatccatcgcaatcgcttgttcgtactggttgaggacaaggtcacctttccgcgtcttccctccggattctcctgatgagttctcatccaaatttccatctagtttccgtaatattgccgctgatttacgttgttgttcctcctttttctgtctatctgggtcgaaatcgaggcgagagaggagatgacggaccaggaagtatgcggtagcagactaggggaagttgtcagcattaaatgcagaaaatgccaactgtaagtactcactgtgcctgctatcatgatcaggtcttggatctgctgccatcgtggactgcgagccgaggccatgatggagagcgtagtttgactccgacaccgcttgtcgcctaacggaggactaagcgggagtggtataccaagtaaaaaagtgattgatttatataaagattagggaagaaagctccggctccggaaaaacgctcagatacagcagcgacgagatttcaaaaccagcgcgcgatgctatatggagaagatgccgtcgtcgttcggcgaaagcaggtgtggcggcgctccgcagtccccacgggccgagaggttcaggtgtggctttgcgtgtcacatgcttccgatgttttggtgggcgcgctcagcttttcctgtttgtcgcgtagtgccgctgtttgtgtataactccacgccctgcatttatacgattgttttaattctattccagcattataccacctcaaatgcctaaacgaaaagccactgcaagactttctggtttaattgaatcggacgatgaagatgtgatgcagcccggtgccgatgccgctcggaaccacgatgagcgtccgacgaagaagacgagggggagaccgcgatcgaagtcggccgaaatgaagcccactgctgaagcggagattccagcgacgcaggaaaccgaagcgacgacgacgaggagagggaccaggagggggcgtcctaaaggaagcagaaattctggacaaacggcgctcgatgcgacggaggatcaggacggatctgtgcgcgcaggtccaaatgctgccgcacaaaatacagttgttgacaagaccactgtgcctgataaaaccgcgcagacgaccaaacccacgaggacgacgagaggtgctgcgcgcggcaagaaaaagactaccgcgcagaagcaattagaaaccgatggcgagtttcaatacactcctactggcgcgcgacagcagaaagtgattgaggggcctgaggaacaatccgaacctactgaccgagaacgccgcaagtccgcgacagcagcgagtgaggaggatatcccggacgctgagcctacagtcaaggaagttgtcgaagaaacatttattcaggaggaagcttcggagccggtgactgcgccgccggagaaacaaaggcatttgtcctcgtgggcttcgcaaagctccccgacaaagagaaagtctggaggagatgaaaggggcaccgaacctgagctgaggcggaggcttggtgatctgaccaagaaatatgatactctagagaaccgatatcgtaatttgaaggagatagggattgctgaagcgaacgctaatatggaaaagctaaagaagcagtgcgagtctatggcaaacggtatgttacgttgatgctcttaccactgatatactaaactctcctcagtgtccaacaaccttgtcaactccttgaaagccgagctagaggcacaacgggctcttggtcaaaaaagccgcgcgctgcagaaagaactccgtgagcgagacgcagaagtggctaggctcacagcagaggccgaacagtcggccagtcaactcgccgctgcccagtccgaggtcaaggcgctgcagacgaagcttgccgccgcccgcaacacggctgcaacactcgaacaggctgcagtcaaagttcctggaagcgctgtcaagggcggcggcttaaaccgggcggctgctgccgccaatgctgaagctgcgcaagctgcacagtacgcgcagctaaaggaggacctatacagcgacctgactggtctcattattcgtgatgtaaagaaaagggacgaagacaatctctatgactgtattcaaacaggcgttaatgggagtaagtgctgctttgttcttctccccttacaatagaagctaatctcgggatagcccttcacttcaagctcgtcgttcctcattcttcgacagcggactttgagacggcagaattccagtacattcctttactggatgcgaatcgagatcgaggactggttgatattctcccagaatatctcaccgtggatattacctttgtccgccagcaggcttcgaagttctacacgcgggtcatggatgcgcttacaaaacgacggcaaagtcagggctagataaatgattattctgggttgctccacgtctcgctatattcaaggcttggacaagccggcctggacaattgtgaaagcaggacttgcattgccaggagttggtggataggcgtttttgcatataagttttggcagattggactgctgttatgttcagtaactctgtgtaggagaatccggttcagtgaatctatccggcgtcaaggtacttaccatcgctcccgtaccaccggcataatatcatttctggttgcgccgtctagtgtttactctgttctgtagtttacgatattaagcttcgcaggtggatgccgtgccgagtttcgcgggtctcattggtccagcatcagccaacccccaagttccccgaagctcatcgaccaaccttaggaaaaagtgtcgtctggcttagacaaacaaccgagccgatgcacttttcttttccaatcgctttctcttcttgatcagatcctggtacgcgttcctacgcactgaactcgtcgctcaattgccaattccctcctgggaatactgaagagaggcatcatggcgcgtctcggtcgtaccgggtttctcaccctcgcggtagtgtttcatctaatatatgcatactcaatcttcgatatatatttcgtcagtccgattgtgagtggaatgaggccctttcgtgtggagcgggagcccggctctgaagctccagcgaaacgtcttgtcctcttcgtcgccgacggattacgcgccgacaaggcgttcgaattgacaccggatccagaccttcctgaagaatcaaatggcgacgacttgacattccttgctcctttcattcgatcccgcgtattgtcccacggtacattcggaatttcccatactcgagtcccgacagaatcacggcctggtcatgttgccttaatcgctggattatacgaggatgtttcggccgttacgacaggatggaaattgaacccggtgaacttcgatagcgtcttcaatcggagcaggcatacgtggagctggggaagtcctgatattctcctgatgtttaaagaaggtgctgttccggggagggtcgatgcggatacatacggggaagaattagaggacttcacgagtgacgcaacggccctcgatatttgggtattcgataaggtgaaggagctatttgcatcggccaagaaagatccagaattaaatgccaagttacgggaggataagaacgttttcttcctgcatcttcttggattggacacgacgggtcatggttaccgtccctactcgaaagaatacctacggaatatcaaattagtcgaccagggaatcaaggaaatctcgcagctcgtggaggatttctacggcgatgataagacggcatttgtgttcaccgcggaccatggtatgagcgattggggcagtcacggggatggtcatcctgataacacacgaacgcctctggtggtgtggggatctggtgttgcaccaccaaagcagccccagcatggcgttccttcaggacacgaagatggcgtctcagccgactggcacttaaatcaggttcaaaggaacgatgtcgcacaggctgatgttgctgcccttatggcgtatctggtgggactcgatttccccacgaattctgttggccagcttcctctggaatatgtcgacgggacccctagggagaaggccttggcagctttggccaacacacaggaggtcctggaaatgtatcacgttaaggaagaacacaagaaagcggctcttcttcggtaccgtccgtttgaaccacttgcgagcgactacgggaattctgctgagcagcgtctcgcgatgatcaaagatctaattgaccgtggcttttatgaagatgcgatcgagacatctgcggctctgttcgcaacagctatagagggcctccgctaccttcaaacgtatgattggctcttcttgaggaccattgtcactttcggatatgtgggatggattgcctatgctttgacgaccgtcattcacctccatgtcctgcatggcgcctcggaatctgacaggacgacagccagcatcagtttcttctcctcagttcttgtggcgttgttctcggttttcctttaccagggctctccctggaggtattatctttatggattctttccgatatttttctgggaggaggtgttcgctcggagaaaggccttccacgcagggcgtgagatacttctgggtcatgtgcgctcagtgggagatcatttctcgtttggattccagctgctgctttatgttggtgtgttggaggcgctggtaagttgtcttctatctgaacgggaaacaatcacttactcatgattttataggtgcactcctacttccaaagagagatttacactgtctgttttattctcggagcattttggcctgtcttctatgggcttgacttcttacaaaagcatgcagcagtttgcggcacatgggctgttggctgccttctgatgagtacgtttactctgcttccagccaacaaggtcgaagatatcgacacaatgtaagtgtattttggtctgcgtagctggcacctgtctcacagaatattacagaacttatggtggggcgttcatgcttctcaccggcttgctatacctgctttttgaggacgaaattcttggcactagtcaccagcccgcagctgtgtcccgaaagggttcaaggaacatcatgggattgcaggtacgataacacgacggcctggaattaaggattgcgggggaaaggttgcaatgctgacgtctagtagcttggtatggtcctgctcgcactgatcgtaacaagatcaagtgcagcctcgctccaagcgaacgaaggtcttccattcggcaaccaggtagtcggatggggcgtcctcagtatgaaacccaatctatcccatatctctcatttcgtgacttgtcaactaaccgtgcttattagttgcttcacttttattgccgttcgcccaccgactatatcccaatagccactacttacatcggctaatgatcatcttcctgacattctcaccgacctttataatcctcaccatatcttacgaaggtttattctactttgcattctgcatgaccctggttacttgggtccggttggagcatgctacgtacgtctacaccgcgaaacctgtcgccaagcaggcgcaggagaccattgagccgcccaaaaaagcaaacccgggtgccacaacagttgtggatggcgaaacataccgcttccgcacactcaccgtttcagatgcacgcgtagctttgttctttttcttccttctgcaatcggcttttttcagcactggaaatatcgcctcgatctcctccttctctttggacagcgtgtaccgactcattccggtgttcaatccctttagccagggcgcgttattaatcctcaagctccttatcccgttcgctatcattagtgcgaacctgggcatcctcaaccgtcgcctggaagtggcacctagtgccctattcatggtggtgatggccatttccgatgtcatgactttgaactttttctacatggtccgggacgagggctcttggctcgacatcggaactaccatcagtcatttctgcattgctagtttcctgtgcacgtttgttgccggtcttgagttctcagcgaggtgttcatcagtggtgtggactttggactccgtactgacgcgattactgcatctgtcccgacattgtcaatgggataacttctaaaggccaaaaggatgttccaatggcgttgaggataagaatg

SEQ ID NO: 3714 - DNA, 2047 bp, Emericella nidulans
cttcggtattattgtatgaggggtgttttttgaagtcggcgtctgaacgtcaaaaagtacggcgcatgtgattgcgagcttatcgggtcgatggccttgattccatcgatctattacccacaaactcccatcttctctattattctctattctacggtgtacaattacttcttcgtgatatcgcttcgccttttacctctctccttttctcatttaccgcgttcccataccctaccgcagccgatccgctggcgatcgctgcccgtctccatctatgattcgtcgtcgccaggccaaagacaacagcgacgatgtccaggcgccagctcccacggactcgtcaccagaaaaacagctcccaccggcagtggcgaagcctaagaatgagaggaagcaatcatttatcacgaaacccaagagcaagcggcgcaatggactcatcttcctgctgggcggagtcttcgggatcttctgcgcggttttcttcgctcagcagcaggacgtcattagcctggactctttaatggatgtgaatatagactcgttaatggatgtcattcctcaaagtataatgcgggatgcgcgggagttttcggtatgttactgtcttgagatctgatggagtggtgctaatagtggttgactgcagcaacatgaacgcgatactgtcagttatgatgctttctctgtcggcctacatcttcggtctcagggggttgaagcgaaacacccgattatcatgatccctggtgttatatcgacgggactcgagagctggggaactagtcctacgtcactgatgtactttcggcgcagactctggggcagttggagtatgatgcgggcactagtgctggacaagacggagtggaagaatcatatcatgctggataaagagactgggctggacccgccggggattaagctgcgtgcggcccaggggttcgatgccacggactttttcatcacagggtactggatctggaataagatcctagagaaccttgcgagtattggttatgacccgacaaacgcctacacagcggcttatgactggcgattatcttatttgaggggggaggttttggaccactactttagccggctgaagtcgtacattgagaccgcggtgcaggtgcgtggtgagaaggtgacgcttgcctcgcacagtatggggtcacaagtggtcctcttcttctttaaatgggtagagaacccagcacacgggaagggcggctccgactgggttaatcgacacatcgccaactggatcaacatcagcgggtgcatgctaggcgccgcccaaggcctcacagccgtgctgtccggcgagacacgagatacagcgctgctcaaacttcgttcgccgtctacgggctggagaagttcctctcccgcgaagaacgcgccgagattttccgcgcaatgcccggcatctccagcatgctccccaagggcggcgaagcagtctggggcaattccacctgggctccggacgaccaaccaggccagaagattacctatggcaacatccttaacttccgcgaaacaaactccaccttcacgcagaaaaacctcaccgttcccgaaagcctcgactacctcctcgaccagagcgagccgtggtaccgcgaccaagttttaggaagctactcgcacggcgtcgcacacacaaccgccgaagttgaggccaacgagaatgacccacgcacctggctgaaccctctcgaggctcgcctgccacttgcaccagacatgaaactctattgcttctacggcgtcggcaaaccgaccgagcgaagctacttctatcaggaggaacgggaccccctcgttaatcttaatgttagcatcgatacaaccgtcacaacggctgatggaacggatcacggcgtcgtccttggtgagggcgacggcaccgtcaacctcctgagcacgggctatatgtgcgccaaaggttggcacatcaagcggtataacccatccggaatcaagatcaaagtttacgaaatgccgcatgaaccggatcggttttcgcctcgagtgg

SEQ ID NO: 3715 - DNA, 8224 bp, Emericella nidulans
ggtaaattttaagaaaagggttgctaaaggttcgcaccgaaaaacctggccgcaaaacagggggttttgctagaagttattaccgccgttttattatttaaaaagggctagtcttctatattaaaaagatttgtgcctcttaacttccgcattcccccgcccggacgaacaccagcccataaataaggtaaattcagcccaagcacaccaatttatcttttaagttggactccgctcactttccaagcccagcccaacccagatagccccagacgccgccttcaatgcttcattagtcgtataatacatcgccgaagtatgaaaagtataatcgagatatggatctgataagatcatctcggagggaaaaagacatgtacataggaaatatagaagtcgtggtaaatcaaaagcgcagagttgttgataaatgactatgctctagccgtgggtcgtggtttccacggttgccgatggaggttgacttgaggaggcctgctcccctgggtgaagtctcgaacgccgccaccgtataaaccagagccaatatccatgaggatggctttctgcggttcggctacaggtttggctgttgctttggcgcgcgtgtccgaccgcggaactgtacatttggcgttgacggggttattgagtttcgtgacatctttgatgatatcgcggagctctttgtcatctttcgtaatctgggctttgataaatgctaggttgttggtggtttggagcgcagacatgacggttttgcgaggcgtgtaggtatacttttcgggtgtagggcggaagatgggggtgattgatgggtcgaggcgggctgcgtcattcttatcaagaagctgggtgatgtttaagctctctccgtgtgggatcttgtgtgggtgggaaggtgttacgcagtccatgtcgacttccttgcgtaagacatggtcaatgtcgacttgcgagaagtaggcgcatgattgaggcagatcgttgatgccaacctgctgcgagaacatggcgcgcgtccatacgttggaaacctgcagggccagagcagcgcgatatttatcctgctccttgacaaggtatctgatttcgtcgtggacggtgatggctagacgcgcctgaatattgaagcgtcgaatgagataatccatggcgatgatcagcatgtgtagatagtcgacaccagaagactgaatagcccagttgatacgggaagtcataaagcttcctctgttgataaagcgccgcattagggcttcggtgataccggcgcctagaactggggttcgtggtctttcttgatcagcaaactcttctagcttgttgaagacaaaggactctgtgcctccccgccagaatggattatcgctcaggaggcggcgagtggttttggcacccttggtctctttataaagcttacttgctacctcctgggtttctctttcagacatcgatgggttgaactggcgcacagcgtcgccgcaaacttgacaccggctccataaatacgaccatagttgaagacctttgcgtcatttcgcgagatgcccagaatcttagcggtgcgggagtgcatgtcagttcctgcagctttggatccctcgagggtcatgaatccgattgcatttccgccgtgaagctggaattgggcatcgccaatgagacttgcgatccacagctcttgagagtcaacatcagcaccaacgaaagcgtagcccggaggggcttttatcattgctttcagctcagagccaacacggttcgccttggcattactcgctgtaagccacgtgttctccactgcccttcgagtgattgtgcccatagggatgatctgaggtagaatataacccaatttttgatcaccgttctttgaactcggagaagcaggccgtacatcattctcataaacaaccaactggcccatgattctgtcacgagcactaatccaataagaacaagatgcattcatctccaatgcctccttagcaagggcatactgagaagacagtgtgccacgctcgaaatattgcaggtaccctttggccaacggactgacgcagcgcgccgttggtccgtccttgtgaggaagtttaaagtagatgtgcttcctatcattatgtagctctggatttttttcctctgtcatattacatgcaaccactggttgattctcgtactggtgagctttgtcgcggggaactttgaacgtccagccgtgcttatctgaccagatcagtggatgcgtgtcccatgatagcttcaacaagattggcgcgatccgtgtccggaccgttaggttaatatctgcagtattcgagctgaacaaatctttgtaccactgcggcatgccaggcttcttctgcctggcggcgggtcgaggagggtcgcctttcttctttcctttcaccatcttgacctcctggccggaccaatccagctgtcgtagccagggatcattcatgtatttctctggatcatctttgacactcagcgcttcatcacatagctcgacaagtcttcgctggacatcacccagtctctgattataggtcgactcggcgttatcaagatactccttccaagtctgattaactggaagaatcacagacgagagatgcctaagagcgccaaagctgactggatgtgggcaagtctcaagaaaattaagaaaaaccttcttgtacacacgatgggtgattgcaacatccgcagcacagtagtcgagcagctcatccagctttgccagtatctgcggtctctcaagctcgccaaaatagtccctctgagacttgtcaatagtaacatcgcaatggaatttggctacatcgcggagtgagttgaccgagctccttccaacccacagttcttcttcctcttcccgtatcattttattctcgatcaaagctgcaagctcaacggagttactgtcacttgcaatcttgtctcttagatctctgttcttcttatgacgcatccatgtaggccgttgctgtgagcacatcccattcaccgcgacatgaagcgacatcgtgtcgagaaagaaattagccgtctgcttaaggtcatactcctccaagacgcgcgcacgatcatagccgatattgtgtcccacgatgatacggggcttagttggatcgcctagaggaacaagttgaatttcattctcggactcccttaataaccaaggagatatccatgcgtaccaagctgtcgggctaacagcgcatgccattacagcaaatggatgctccttgtacatcacttccgtatcaaatgtaatcattgattcgtttggcgcatccacagcttcccaactgccatcactgttgtatttggtccatccgctgcgcctgacccatttgcgcgggagttccggcgaattaacgactgcgtattctttcgagtaagtgagatatggttctgatgagtccattcccagcttatagaagtgttcatccaacgtttgaccttgaaggccggggaggtcaaaggcgaccgggtccgcatgctcctgcgccttcccaaggagatcatgtcgcgcaagatgatctttagatagcgcgactaggttcggatctggcggcgtcggcttgttgaaaaagatttgggagtaaacgtgatcgctcagctgttgaacaccaatttcattgaatctggccacaccaggcactatacagtcagtaccaaggatattgatgagtggtagcttacttaccagacaacgacttccgttggcgctcaacagctccatcttgtgtgctgtagtatcttgctgctagtggcgaggcttgcgactgagcaaatgagcgaatgcgagttttctgagcataaaaacgaggaacaccccgcgagtagggtgtgcagtgacctttaagcatattatgagcgatgaggggagggtatagactccatggtatcgaaactctactttgcttgatcaatagctattgacctagggagggatttagcttgcatgcttatcgcggaatcttcggatctggaatcacggaacattgtttattcagcctccaccgccttcatgaacgtctatcgcttatcagttggaaggcgggcagaaccatctttgacaattttgtccacctcacaaatgggcctcttatgttgcgttgatagctgaacgccgacacactcatgaacttctccggcgcttcatcagtccttcaagctgcgtcccccggagaaggcattatcttttccctcttttcccagttcgaccccgagtgagctcaatcttctcatcttgccccatcatggagcgggctgcctcccgccgcatctcagccgttgagttaccgtcttcatccccgccacgtcgacggcgatcttcgacaacccaggctggcccttcaaggctccataagcgtcgccgactgacaaatcagaccatttcatcttcatcatcgcaaccagataacgagcccgtcgagccgatcgatcttacggaggtggacgggaactcctctttagccaaggtacttgcaaaacaacgggaagacgctgtcgctgcgcagcagtcaaatgatggaggaaatgcacggtcgagattgactgcctatacttgccctgtatgcatggaaacacccaaggacgccaccgctaccatatgtggtatgtattctatcatggacagatgctgaatggatcggctaatataaaccaagggcatttattctgtcacaaatgcatcatggaatggttagcaaccacggaagagcagcgagcagaccgtgccgggaaagctccacggggtctctgtcctcaatgtcgacaacctctctccggagtagatgcaatcgggtcaaaaaggaacctagtaccattgcagattaagctattcacgaagaagcggaccaacttagcggagcagagggctacatcttgaatatatgaagtgggctatctattaacagatgcacgcttaaaacaagccatgacagaaatggctttatgacgacatacccgcaacacattcctagcaggctgtatgtgattggaatgctattggaactcggcccatggccgagacaatatgccacttgatagcgaaggctatcgctttgaggagtggtcattcccatttcctctatttgtcaatgactcggctatttgcgttatttcccgtccgaacaatacggttgcaatgtgtactgcgtcgatattgcagtgtggccacagctgtatgtgccgcggattcgttacaacgctgttgaagtaccgcctcttaagcatttagatcttaacataagactttgtatagcccatagcagaaatattaagagggctactacacccggccagtaaatgatttgtctgcttgaactctggagatcctgaactggtagaggtagtttcctgattgggaaacggggaaacggcaattaagcgcgccaagaaataaacagggtccaatgttgacttcaaagatccatcgcatccataaccttttgatatccgtcaggatttcatctctaaacgttctgaattttcgttgtcttgggactttttgaatttctaggcttcgacaactctcggtcgcctcatagagttcatccacccctgaatcgtcatcgaggatgcattactcgaatgagagtccatctgcctcaatgccaagggtggaagtaaccttcactgcatgtgcctgaattagtttcttgcttgtcgactcttaagagaacctacacctattctacaagatgagcgttcattcatttgatcacgcagcatttgccaacacgccgtcgccacgatctgaagcgggaccggatcatctcccagatattgaggctcatccacgcccactacaccgaacggtttctcccaccaactgggaaaatgcgtcaccagagtcgcatacggttcctccgcgtcaaaattcgcaggagaccgtaaggtaccgtgcacgtcgggcaaatactgctcgctcttaccgtccggacaccgttgcacatgaccccaactggcaacctgggacggagcccggtatcgaccctaccaggccactcccagcgtacaatgcagaatggatgacttcaatagcgacgagcttgcatcgtcgttgcgagataacagtagtggacttttcccagcatgaaatgcgacagtatgcacttgacaatgatacaatagagtcattcatgtccagggaacgagagccctgggttcaatgcagatggatcaatgtcaacggacttagctgggatgttattagggtcctgggtaacaaaaagggattacacagacttgccctcgaagatttgattaacgaaacgaaccgtaccaaggtggattggtactcggaccatgcctatatcgtccttaccctacagaagcttatcaatatgcgacaggagtccagcgactcggaagaggaggatgaggacagcagtgtagcctcgaggccagagcggagaagttcgattctcagcagcaaatctgtgtctctaaagaaagcgaccagacgccgtgtcattcaagcagcattgaaagatatcttctggaatagaactcgaaaatctgaagcggagaatagggacactgatggggctggagctggatttccacgtgaaatgaatgggactacaaaacaacccagatttggtggcgtagctgacattccaggcactgcgcgcagcattcagcggtaccgaggcggttcaaatgaagtccggattgctttcatggagcgccacgctgtattggcacctaagggtcggtcagtgagccttgactaggtatcaatatttctccacgcttccaatacctcgacatccttgttcgaggccagcgcagaatagattgaggctcctatgtctaggtgtctcgcgcaatcagagacaatcctgcgccagtcttgtgatgtatgcatgctcgtgcaagctatcttggatgccattattgatctggcaaaccggtcaacacggcttatcaggacgcaatcggcgatttggaactcgatgtcttgacagatccagacgttgaccaatccaagagtctatatatcctgacctctgagatctcgatcctccgcagcgctatgcagccgattgcgactatcatcaatgctcttcgagatcaccgttctgagcccgtcagcaccccttggcgtaggggttattagacccccaggctttgccacaccttcctccaccggtcaaggacacattgggctcgccaccccaaatctcatgagcatggggggtaccagcgtgtctataagcaatatgtgccacacatacctaggcgatgctctagaccattgcattaccattgtcgaaggatacgaccagatgagacgggccgcagacaacatgattgatttgattttcaacacaattggtgagtgctgctgtgccattcagtcctgatcgtacggttgaccatagtaggtgcctaccagaacgagagtatgaagcagttgacccttgtgacctgcttataccttcctcttacattcttaacggtcggtcttcatcgtgtgacacagaaatatatgtatatatatacttacgtttggcagggttactttggcatgaacttcgagaggttcactggggttactgagcatagtgatgcgtaagtacaacgttgctacgcttccgtgagtcaagctgactgattagatatttttggataatcgcgccgccgtttgttttcgtaacgacgctcttcctcatgtgaggcttctcgctgtcctttagtgcttgcgctgacccttgttaggcgtgacaaaatccagcggtatgctgtgctgttagctcagagacggcttattagcagctcgagacgtcagagaagagaaaaaatatcgaagcgagagtagccgatatgactctttgtcaatctcgcagtggtgcaacatttccttggggttccttcgagtcccgaaacatggatctattgtacaccccagtctatattgtacagtctatattgtacagtctatattgtacagtctatattgtacagtctatattgtacagcctatattgtacattctgtctcgctaagaggtatatttttacaaggatctccgttggaatgccaaataagctttccacggcagtttccagtctgacctaaggagctcagggcggaagatatcaaagtccaagctctccagtttgtccaaccagagtcgcgtcccaacctgcaggcataaacactccaaaagcccgatttacctcgtctagttgcg

SEQ ID NO: 3716 - DNA, 2283 bp, Emericella nidulans
atcagatgtgagtcttttttttgtgtttattgttatttcaacttttttttgtttttgtttttgcactccttgtctgtcactaagcacaacgtcattaactggtatttcattccaacttccaggatcacctctcttcgcttaatacaaccccaaatcgagctacgaaatgccgcacaagcggctatgtcattcgaggtcaaggcgttcaaagaagccgctaccaaggtatgcctggttccggttcgctttccttagtcatacctctaaacaaacctttgtcctctaggccgattacgatagagagtttaacgacaaactcgtccatattcgagacacaagagctagacacgccgcggcgatgcagggaggcatgatgcaacaagggccgccgaccggaatgataggggttgggcaatcgccattctcacagcagttgtctcgatcaatgcagccgtccccaatgcctggtcaacagcagatgcaaatgagcatgaacaatccgggtcaacaggcagccgttcaacagcgccagcaacagccgcagcagccacaagcaatgcttcagcaacagcgcccgcagcaacggctcggaggtgctgccgcgcttaacgacgatctgaattctctaacgccccaagaatatgagaacgtctgtcgcattgcgacccaaattcttcaaaagacatcccctgaggatatgaacaagatcaaaatgaacttgcaaaatatgagcccggatcagaaggtttacctctccaagaaaggcatggatcccattacatatttctttcgatgccaagctatgaatcatattcgtcgagtcaaacgttcacgcctggagatgagtcggaataatcagaacaatgggggagactctgcgaataatttaatgggtgatcctatgatcaaccctcagcaacaacggcagatgtttcaaaacatggtgaacatgcctcagagaaatcattcgttttccatgggtaaccagcagacactcgatccttcggcgtttatcggtaacgtcgaaaatattcagggtcaacaggctgacggactacgctctcaagaagctggccagcttgtcgtccccgctagctcgtcccaaatgaatcaacagtcatttaacgcaacccaaaatatgtttccggtggggcaacaacttggccagggcaatcaggtcaatatgaacaatgctggaatcagtccacaatttctgacacaacaacatctaccaaacgctcaaccaggtccgcaggatcggcctcaacaagcaacccaatttcagtcacagcctcaaacaacacaggcacaacgtgtacaagcggctcagaaagcgcaaatggccatgtcacaggcgaatatgcaacaaccaataacccagagcccagcgatgcccatgttaaatcgcccaattgcggccccgggacaaatgtctcctgcacaggctgcagcccaagtccacccatcttcgagacaaccgagtacgaaacaacttccagccaatgtccagcccatgggcacacagcagggaatccaaaatcgtcccccgatgcccgcgaatttcccaccgcacatccaggagcagctggctcgaatgacccccgaacagcggaatgctttcttcctcaaccagcaacgtcgtatgatggcaagcaacccagctctggccagacagaatgccgtccagcctaacatggcgatgcagcagggcataccacaacccggccaaagtcaacatatgattaacggtcagatggttaaccctcagaacatgcgagcttcaatggatatgcagcagcagtttgcgtcgttgggcggtgcccaacaaccgaaccagatgattcccgggcaacaaatgaccgttcaacaacggcagcagcagcttcagcaacaacagcagcttcatcagttccagcttcttcgccaacaagccgggtccaatatggaaatgacacccgaagagattagtcgtatggataatatgccttttcctccggcaatcttcaataacaacccaaatgcggcatcaatacctaaaaacatcaaaacttggggccagttaaaacaactggcagcagcgagtccgcagcttctaggtggattggatcaccagaaactgatgacgtatcagaaatttcatctggctcagattttaaaggagactagcaatagaaaccctgagcagaagggccagccttcttgggcgtccccaaacttccagggccagcctcagccgtttatgaatgctcaacagttccagcccggacagcaacaagcacaatt

SEQ ID NO: 3717 - DNA, 1439 bp, Emericella nidulans
atcggcgagcccccctcttcaggtatgggcttgttggcgtagagctggaagatcagggggaagtgctcggggcgcttgagtaaggtgtgaattttcacatagaaggaaagggcttctggtgagatgaatattttctcgtctgttaatagcgtgtggacaatgcggcagagggcatccgctgaaggttggtttatttgagcatcttttgttgctttagatgtctttttcatgttccgttcttcgaggttgagcagtgatgaaatttcactgtccttttcggcagctgatcgatcgggctttacaatggcttccgcgaggacgaggcatttctgaagtagttggacaactgcgtcgttagcaggcactgtttgcgcatttcgaagctctgcagagccgtgctcgatctcacgcagtgacgttttgaagtcacatgaagctgctggattcgactctgttgacttgtacctctgcagaggcaggagtgttgttaaaggagtcctcagggttttcttcgacagacattgtccaatttgaggcctgcggctggccttggttgcggacgcatacgatcgggtttgtgaacgatatcgggcggccggtaacacggaaatctgacacaattggcagataagtgcatcaggctttggtgcccgctggccggcaagtgtaaggcccttcattgcaagagcgaagacttgagtcctagaatcgcaaaccagcgagcaagtggagaagcaattcggcgcaacagccgccttgaacgcgcgacaaggcggaacattactgccgcctactggcaccgccacccactctaggcctccgtcgtcatctccttaacatcctcaactatctgttgtcttttctttttatcagtatttcagttggcaagtccggtctgcgttaggcctcgtatctgcttgctgaggatttgcgtgctcatgcttagcttttcctcgatatccgttggcttgtgacgcccttacttttaaacaccacagcaaccacgtccctatctctactgatccctcaaaagatgcccccaccaccacctcctcctccgccgccccctcctggcggtggtgctcctccgcctcctcccccagcagggaacttacctatgagaccgccaggcgccgggaaagacagggtaattctctaaggaccctaccgcccgctccggttcagctgctgattctatacttagggcgccttactctcagatatttcaaaaggcacaaagttgaaaaagaccgttaccaatgataggtcagcaccgcagataggtggcggaggggtcaagtcgtctggccctcctctcggagccgcgcctcctgtacctggaatgaagaagcctcccagcggacttgctcccccagtcccggggcaaggcgcgaatcgggcacgaagcagcagtgatgtaggcctgggagcgaagatag

SEQ ID NO: 3718 - DNA, 1813 bp, Emericella nidulans
agcaaaaggttgaagaaggaagagaagaagaggataaagtttgagaaggaggagaggagagcgcggaggagagagaagaaggagaggaagaagaacagggttgtagagaaagcagagaagaaggagaggaaggcgaaggagaagagagtaaaaaagatgaacaaggaagctgaagagcctgagaaagagaagaggcccgagggcgactatcccacaccggtatcaatggactcggactcgatggatacacaggacgggacatcgtctctggatacggaaaagctgaagaagaaagagaagaaggacaagaaggaacagagggaaaaagagggcaaaaaagacaaatcctcgaaggacagcaagaaggacaagaaacgagaactctcatcggccgagagctcaaaacgaaagcccaaaaagagcaaaacgacttgatagactcgttggtatggcatcgcatagcattgcatatagaactcggcctagcttgtacagatacccatttggtttggctatacagaaacatataaccacaacactgcattcctcaaatcatccttgacagggtaacgatcaagcctctgctggaagcctccccggcttccccgagagaatccatggcctccgctcccagaattcatccttgatgatatccacatgctcaacgatgacctgcgccttgcgccgtagtttacggagcttctcctgttgactcttcgagatgctttcttgtacagtagggccttcttcctctggagccttcagcggcttcctctcctcaagttgatactatttagactcagcaaagcagactccaccgagggtccagattggacatgacatacctgccgatataccacactcccttttttgtatatctcctcctcattgttatagttgatcccgaacctcttgaacaggatctcattcttgtccgaggagagtgttcccttcaaccgtcagtatcgtcacctccctgcccatccgatccccgaaacacgaagcagaagaatactgcaactaacctttagctcattctcagcatcagtattgctcatcccgccttttaaaaccatcatccagaacgtcgtgttgtacagattattgatatggcctaggcaaaaacgcaaaaaaagaccaccagtcaatatcaggcagcaatccaaacccaaatggcgagcttacaatcaacctgcctccaactcatataatctctcagatttctgatcgtcggatatacaactgcccgcccgtcgaacgacggcaggtgcggcggctgcaacggcgtatcagggaagtagttaccccatagatagatgtagtgtgctgtgaaggttgagacaattgttgtcaccagttttctgtcgacctagtgttagcttgcgcatcgctcctgccacggtgaatcagaaatagagacagaaaaggacatacgcgctccgccgctcaaagagctcacaggtgggatggaagacaaaacttgcatcacattagtatccatcaattactgcgccttgagtttgtgaggtcgaacctatactcatcactaacaccgtaagcaatcgccaagtctggaagatccttgaggacctccactgcggcggcgttcataagatcctacgcacgacggtcattgtgtttgtgaatgcgtatcgatcggatagtctggtacgggtggctgcagtgagtgccgtgtccgctcgcactgataggtccatccaccctgtcgatgtaagagggtacttgcgtgtaaaataaaagtccgtcaatctggtcctcaaggctcagtgtttgtaaccggaggtttgcctgg

SEQ ID NO: 3719 - DNA, 4574 bp, Emericella nidulans
tcgacgtctctgccgctctccgcttcttcaggccagaacttgaccctaatttcaaggctagcctgaaagagggaccccccagcgtctggcttaaccgccaaaactttcccgaaaccagcaagactttcaaaggccgtactttcgaaccagaatatgacgtcgagtacgcagacaccctgacttttggtcagctctccaccccgcagcaacgcctcgtcctcttccttcgtgccctcattcataagccagacatcgtcatccttgacgaaccattctccggcatgtcttcctcggtacgcgacaagtgcattcacttcctagaagtcggcgagcggaaccccgtttcaacggctactagacgcgccggcggtaaaaacccctggactgttgccgtcacgggtgacgagggcgacaaagatgtccgttttcagagaaacattctcgctgaaaagcgacacttcggccttacggaccagcaagcgcttataatgatcagccacttgcgcgaagaaatccctgatttcgtccggcactatatccgcctgccctccgcgcaaaatgacgacgccacagggttggacttcaggttcggttatctcaaagggaaaaacgcgctgcgtcaaccgcctgtttgggacctggcttggacgcataaggacaaatttgaatcaatgggcgcgaggaggaatttcaggcgggcgccggactcgaatgagactgatgaagatgtgtatgaatattggtctatttgagttaactgcaacctgtctgctgtatattacatggctccaagccggactatcttgatagagttatgttgatcagacgacatatatgtagattttattagagatagagaaaggggaattgtaaacaacttctttcatgtcccaaactagtggccgtacatgttgagggggcctttaatttgagaatgggagttgcaagtataatgctccgttcattgctcataccagatgaacatggtgctaagaatcaacagttgctaaaagaaaatgctatgtcatgccgctcggttcagccgagtccattataaccctcaccgcgaatcattgctccttactagccgcatccgccaagcccataattagtgattctgaccttgtcatctctggtctcgcagctttctcttcctcagtcagttccagctccttcgcaaccaagtctgtaaaatcgacgccaacttcagccaggatgccagcctgttcgtggacgatattgatgcaattttgccatacagttgcaccgcgttggacgctgcttagttggcgcgttaggagggcgttgaaagcgtcgaggtggtgcttagcccattttatgcaggcgcttgtcatgacggaggggaagcattgttggtaggtgctgattgtgtttttaatgagagtgaagtaaacgaaggatatttggaatatatagagggggaggtcgccttcgaatatacatgcgctgtttggacgtggttagtgatcgcggggggttggttggcggacagagtgtttgcttaccggattcgtttggagatgacatcggagcgagctttgaggtaggattctcgagcttggtcctcaaaaccgagtcgggtgagccagacgacgtttgttttcgtcgctactgggaacccgtgagtatcaaccagagaccgtgaaagtatgcctgccagtttcgcagctcgttcatcgaccttggtgttgattacatcctgcgcgacggcatttcctttgaggccacgggccaatttgcgcagtcggtcaatgtttgagacagcttcttcgaatctctgaagcgcgatatcaatgtcgagttcatccacctggctgtcgacccagcgcaagttctgttgctttccatcaacgtcaatgcggacttcaggcctgtcgcgggggttgtctgtattctcactgaggtccaatttcggcgaacataacaacgagttcctggagtttatggcactcataaacccaagagactcgccgttcttcccagctgcctcggtttctgagcgtaaagtccgccgcaggtcctctacagttttcctgaatgtcgccaaaagttcactcttggcggtgctatttcgtttgtcatgacgatatgtaaagggcttcgagccgacgcgaacgcagacagcattcgtgataccacgatcttcggcctcttcgcgagcagatccagtcaagttggcgcccaggtcaatcatatcaatatcctgcagcggccaacattcctccgcaatcagcttagttgggactggaccgcggtggttcgggttactctggtcgactctttttcgcttcttggctgcgactaaaaggtgatcgtttagaagcacgagatgaaccgggcgtcttggtttccaagtagcagagtcaagttccgcccagtttccagtttttagcacaatatgccgaccaggaaccatgggcaggaacttctgtgagccttcgacagttttccataacgtctggagctgaacgttccacatgctctccagattggcgacggagctgcgattgctgcgctttgatgctcgctcatccaaagtaggagacatggggttcggcgaatccccaatagctgtttgtcccaaggcagtagtgagttcagccatcaaagagcgaagagtcttcatctctcctttgagcttgtccgcctcctgactgatacggatgaattgggtgcggttttgatacacattctgttgaaggtcggtcgaagtgcggttcttgacctttctgagggcctgttggtattctctgatatcatcttcggaggcatttgcgagcaggttggtcacatctagatatcaaagaacgaagagtcagtactgaggctgcggataatgctaggagctctgattgagggtaactcacatcgatcaactggtaaacttggatcccgtagggcagttagatcaacttcgggaggccctgaggattcagccgactgttttctgctaggctgcgggggcccaagccctgcatatgcggagggaacttgcggtacactcggaaccggaggggcgccgtcaaaatcaggaacttgattgaaacgtgtggaatatcttcgcttgactagatccgacgtcgcatgatttgacgacgcatagtcgcgcgatccggagcccgacgaagcagtgccagagccagaagctgcgggctggtgattctggggtagcgggcccgatatgggtttcggcgcactaatctggggacgggggcggcgatttttgctgcgaagagtgagtccccggccatccatcgtaaattatgacgcaaaagacgagaaaccgaggacaaagtaagagactaagtagagctctcgagtgggataggtgtcgtagtgcagctgaaggcggagagaaacgccgatgcggaacaaagatgatcccgaggctcagtcagttcaaaattgtcccatcgcagcttccgtcaaggtgccgacgagcttcgaagtccgcatccaacgcagcgcgatacaaagggtgcttttatcttcagaaaagtatcgttttttatctacattttcaatccgcctgcttcccttcaagccgttccgttcggttcctactacatactttttaccatgaagacctcaacgttggccgtcgcctctgccggcaccatcatcaccggccttttgggtaaggaccaacccgaaattgcccattgagttgcattattctctaacatctgctctcgtcgcacagcctacgccgtgtattttgaccacaagagacagaccgaccccgaattccgaaaagcattgaagcgcaacaaccgacgactggcacgcgctgtcaaggaggaggccgaagctcaaggagcccagcaacgcgagaacatcaagaaggctctgcagcaggcgaaggaagagggattccccacggatctcgaggagaaggaggcgtacttcatgggtcaagtcgccaagggcgagggcctctgctctgacggtatgtctatcagacctctgataataagttgtatcaacaattaacttgaaatgatctaggcgcaaacaaaattgatgccgcgttggccttctacaaggcactcaaggtctatcctcagcccaaggatttgatctccatatatgacaagaccgtccccaaggaggtgctcgagattctggccgaaatggtcgccatggatccggccctgaagctcggcactttcaccggcgaaagtggcggtgctgaccaccacggtgtcgaatagactccacgcgtttgcccttgtccgcccacatttactcggcagaaaaatcttggcccgccgacgccttcctcagtatattgtgttttttgactcacgctgggccgtttaatggtcatttctttcaatcatggcctctctgacgttataatcatgccgtatttctgggtatggacgacctctccacttatgtatgtttcgttctcgctcctctgtatagctgcatcgccctgcctccgacgtggcgaaccgcttggtattttctcggcgccatgactttgtctcgtccaatttctttacccctttctttgtcggtttcgtccatcctcgatggtttgtgaa

SEQ ID NO: 3720 - DNA, 6576 bp, Emericella nidulans
gcttgaaagttcctctgcggttgaatttgagcattggcgctgagagcacgttggttgtattgctggtaactgccggagcgtgagggcgttgacgtcctgggggctactgggtttgtcgcggctgcggctgccctctcttgttgaagggtgtaatcatccttttccatactacctgggtagtctgtactctcaaccaagaccttctggcttatgttgagttcagctagttgatcgccattcagcttagcaacggcaaatggcggcagttgcgagacgagaacagctaaactagacctgagcgtttcgtagacctcttgttctgcatcggatggtttatctggggcggattgcggcgaaggtgtatctttggcctcggtgttttgattgggagctgaagcttgaccagatgttggaaactccaggtggcgtattttctggtaagagcttagtgtttctaacaaattcgagacttcagctagcagatcatctgtatccttttcttctgaagtcttgtctgcttgcgctggaccgtcctccgttgtgtcagacgggatagaagggtcgacgaagtctgccgggttaaacgacttgaccatttcctccaacgtgctttcgtcaaggtcgccgatactccccggctgaacagttgtatccggagcagattctccgtccgctagtgatagcaaaacattcaaacgttttgctccccgcttattccaccataccaaattcttcgagtctgcctgtactacagcgccggagctgtcaaaagaaggggcaaaagacgaatacacgccttgcagtatagccgcatcgtcgtccacccaaagtattgggtcttcgtgatatctctcttcaccaagttgctgagaagattgctgtttttgacgacggccccaaaaagagggcgaggaagtcactccaccatattggagccaattgccggaagggaggtgtgcaaacgaataattgtttctgtcaccaagaaagtctttataattggtgacggcgtcaaacggatctatccaggtgatctgcgaggcacgacgagctctccgcggcagctccagctgaggaagtgtagatttcggagcaaaaacctcgccgagtgttcgttttgcgacattcgacttcttgtcgccgtcatacggagtaactttcgtagtggttatcccatttggcagaccaacctcaggcagcggtgtctgtacctccacgtacttttgtggttccgatttgtctgatgacaacggaactttgacagatttctgcagactcgagtaaagttgtttaggattggcagggttgccgaacagtgttaataccaaaccgctatttcgaacttcttctgcttcaggacgccgcttctcggatatttccgtctcattgccaggtgtttccgccttaatattggcctggctcacatgcgcttggcgaacaagactgttgagcaatttcttgaacgcagctatacgattgacggtctctgtcacaggtgttccatcggctggagcgctagcctgagtcttattcctctcaatcaccgtccgcagacgccttctcaatgtcactcaggaattccgaaagcgtactgtaacggtccgaggcgacccgcgcttggatgctaggcgcctcatccttatctccagcaattcttgcgcgtttcgagcggggttttacgggcgaggacggcagagggcaggacaagagttggagttcagaatcatttcttgtaatggttagcgatttctgatatccaccgccgcgagcgaaaggggcctcttacttgctcaggatatcaaccagattacgcagcgtttcctgcagttttcccctttcatccggcattactgcagtggatgtctcgtgcgcggtcttgtcgtcgtggcttgaaacacgctttcgtttgcccggcgtcgccaggctcgacggatcaggagtggcagtggaacgctcgccgttcggggcagccatcgatgtcccgccttcgtctgcgctcattgccgcggagacgcgccggaaagcgtagttttactgttaacgtgaggacaagggccctttcgccttccaaaggggctaggccagttcgggcggaaaaaaaaagaacagagtaaaagtcgcgaccgtgcgcctgaaaccctagtaaagtccggcaacagtgggctatagagaagggcgttcaatggatttttgaagtcaggtgttaaaagttgcgatcgattgcctcgatctccgaagcggagcgccaatacggtagctcaagagagagaactggtgcgcaactgggagaggagttggtgaagtgcagagcaaacacaacaataagcccaggctggatgtgcgcagcaggcaatcttctctagaaattgagccagccacaacgcagtaaaaatggtagaaacgccgcgtattgaggggaccagaaacgaacagaggagccctgagggaatgaatcgcgccttgaaccccgtgacgatcatcacgtgactgactaaaacaaaaaatcctagatattgcggaccaagcaacttctccggataaacaggaactgcaccattacctcacccatgatatccacgccggattctatatttatggatgtcatcggtctggaatcatgccccaaaccgctccatggtcgtgtctttaagagcggcgcagtccagcagccgtttgttccgaaaggtacctccaacctaaagctcttgtcctgcattgctaaccgagtgctcgtctggtcagaagtgctcgtatagcacttactttcgcccggtgtacgcaacgtctctagacccattcgccaatgctgtctatccctcaaattccagccagcatctgtacgagagaggtgtttccggagacccttcatcttgcgagttctggtgttcatccaggctcaagtctcgtctgaatcagccacttccgcgtctggtaaacgttccggagccatgggctcccatcgcaggacgcggtagaggggaccataagccggattcaaggctttctcgtttttcgcagccgttgcgagccaattgcggagttggtcttctcgacgccaagcagggagctttgaaatggtcgctgcaggtccacccaagtccatcggacgatttgattgacaggattcaagacaaggtgttgtatcatgaggtcgagaattggacaatttctgagaaatccagggagcctctcatcactccattaacgtcagctcaacggtctatatctcggaagaagtacaaaagaacattgcaaggaatcaccgcagattttattcaacatgttgaacctgtcctgcgaaattggaaagacgcatcaaaacttgacgagaaagtacgaggtatacttcgtgataacgactttggttacttggaatcccgacagtatgatatagctgacgtggttacgtgggcgtgggtgcttatgagtgcttctacatatgaggccaccctccgcattttccttttggaaacagagggacaggggaaagaagccgttcctaaaaggaacatacccgtcttcattccactcctcctcctgcgacagaagcttgacctgaagacatttcgtttactactggtgtattctctgcaccacattactatggcttcaattgatccagacacctgcgctagattcgttgtccgcttgttttctcatgctcgacggttgtggccggaagtgctgcttcctatcgcacaggcatttagattctatcttcgcgagtatcgacgttaccgattcaattttgtgatggcaaagctcgatagattcattcagcttcttgctttgcctcctggacctcgtccctatgtgtcggcctccatacggcaacaagcacaatttgagttgctgaaagccatggcagaaatgcatctcgcttcgtcagtttcgcggcgaggttatcaagctttggctgctgtccaactagcccataagaagacggctgccgaacgcgaattcgccaaattgaagacgccctcatggccaccgtggaaggaggaaagatctggaattgactcaaccaagggtgcggaaggcacgaaaagccgcgcaatgcgtgttatatctcaaatgagtgaagcaggtcatcctcgttctctttgggaagatgtcgcaggtatcttggcggggtgggatacggacaacagcccaacgatacaaactagggcaatggtgcgcccaccgaaacacctgcttgggtcgtcaaaacaggaaaatcatcctgctatctgggaggcacgaatacgctccacgaggacagtgcgggaggcttgggccgccttcacagcctacgaaagtcgaacccgtcagccccatgctactgtctactatgcaatgggcgagaagcttgtcttcgaacgaaaagaacgaaacaagcggcctgtggcaaaggatattcaaactagcctcgcattgcctggcgatggcccggaagttttcccagaacctgcttccgcgcgagactggatctacactcctacggatccccctaagttgaatcatttcctcagaagaatgatatctcaggggatccgcccatctggtagatttttggccttgcttttgcaacacgcaacaacgtttcacgatgctctacattatcttagctgcagcgatttgacaaatcaacaaatgatggcgttgctcagcgttgatgaggatatcttgggcagtgatggcgagtataagaaggtgctgaatgaagtaccagagtatctcttttctgcctttatccgcttgctatgcaggtgttctacttctaccaaacgatcctcgccgcaagcagaaagtcaagtcgcaaattgtttccccgttcttacgagtaactgggcaaattcccaatcacagttccccacccttttttcgtacgctgcccaatcccggaataccagggagcctctgaacttaaagcttcttacccacgcggtaaagctggtacgaaagcgagactcgcggaatcctcagggatgggttcagcttctggcaggcctttgctcaaaccgcatttttagtgacaacccaaacactcatcctcgtcttactgaaatgctcctcgtctggcatgaggtcttggaagttaccaactggatggctgagcgcaacatcgatttgggatctgaaggttttcgaatactctgccgaagtttctcccgcgcagtggccgctggggtgaaagacgaaacatccatgaggaagggccaggaaacagtggccaaagcttcgcgcagacgaagagtactgcccgaagttgatccgtcaagttttgaggattttgtgaattccggtctaactactctcaaacgccagtttgaccgacttgttcttgtggaaccaaagacgtatatcctgttcgactccttcagggaatctcttgaaacacgaactggatctaaagtgacggtgcctgttatgcatgacatcccttcgcctgctgttctccacgcattcgtccgagctctcgggttagcggaagactcggatgggctgctaaaccttcttcggtggatgagccagcatgcgctgacccttaagaaaaggtctgatgagtatacgaatggggatatgttaatgcggcgcactattgtcgcagtccgcacgtttcttgaggggtattgggggaaaaggcgatcagcccccgcggcatatgagcctgcagttgcggatcatattacacagagtgatagtgatggtatgccgaagttctcagatccagcactgcaagaggcatatgacattgtcaccgcaacagaagtctggggtccttggcccagggacgaggaagtctgggaatatttcgagcatgcgcaggggtaaagcgcaatcggcccacctagcatattctcttcgaaatttgtatatatagttagatcttgatagaggctaccagaagaaataatgatacccatattagactacagacgtgaattaaatgcccatcgcgaatactcatcgcttattgtcggatgctggcagccaaaacgttccccgcatgaacggctcggtttccccacagcacccaacgtcacgagccggctccgagagctccatctggtttcatctgtctttcttccatgcatgcggcccaggaacaatccgatttctggaaacaagaagctcaagtgaacaaagttagcagtaccttacagctgggttagtctcgcatttgccactcgtcatgcctcctcgtcttacgcgtctggcgcttccaattcgagcttcgccgaccgtctcgctgcgtgtgaaggtcgcgagatacagcaccagtcccgacgatgccgtgattcagactcaatacgtccctgcgcctggatctggaaatattcgcgtccttctcctgaacagaccgaatgctcgaaatgcactgtccaaaaaccttctgacctcgttagctcagcatgtcaattcgatctctgccgagggtggtaacgggccgactagagctttggtcatcggtagcaatgctgactccgccttttgcgcgggagctgatcttaaggagcgactgcatatgacaaaggatgagtgcgtaattcttccaaatctctctcaaacgatgaagggccaactgactct

SEQ ID NO: 3721 - DNA, 1607 bp, Emericella nidulans
gtacgtgccgtcaatttttccctcgagcgaaacttttattgaccaaggtgcttgacttcagatacaccatcctttcgcgaaagaatatcagccttgccccggcacatctgcacccttgctgcgattcgccatcgccgagcaagtcgtcgcgccgtcctccttcaacgccaacgtcaacaccgcaggtacccggcagcagacaggggagcagctacgatccttacgactacggctcgctctcatccacgccccagctctcggcaaccgactacctgcctgcgacgcctgaagcccccgccgtgaacttcgacatggccatgggtgcctttggtgattcttgcgggtacatgccacaataccagccctcaccgtcgttctatgcaaactcaccagacggctcggagttgatgatgcccgagacgatggggatgagaatgagatacgatttccgcgatggattggagcaggagggcgttcggtatcctgggcaggagacgtttgggtattgagattactgtgattattggcagctttgacagcttcgtacaatctccattcgttcattgatagaaacggctaggtagactgaaggcgttcctgacaagtttgctctcaacaacactgatccacgtagaggggtatgtaggagataccacgacaccgacgcgctgcagccttaaccaggccagggaagcaccggcgtgctagatatgcacccgttgatcttggtactaagaggcatacagcagccgacactctgaccattcagtgcagacagtcgtcgctggggtatagtaccacactattctattctggagaaaggaaggaaaagggcgcggtcggttcgcggtgccgagttttatagcaacaggctgtgggccagtctagcctgttgtagttagtcttctttagccgagaagaggctttgagttgtctaggctaatgtttatcacgccctcctgccctgttgaccgggctgtttaagccattgtctggtttgcttttcctagtgttacaacgacctctggataaatattctagttgtctgattgtttggtatttgtcagctgacgacacggaaacactatctatacgtgcttacaaccagaatgggttgcagcaacgcttctttctactgttgttcctaccgaggccagtacacagtcaacgcgcgagatgatagccatatgtatcgctttgtggttgattaaacaagcgggcttgctaattagtctgtgacagctacgtcagttatccctattcctggtccaatcaaccaggactgcagcgagaacaaaatattgccttcaggcagccttcaccagccttacgcgagagtccagatatgccggtgggcggctactagagagtgggagcctgaacttgtgggctcagatcttgctctagacaggatattgtgaatgcagcaaaaacctgacgcgctttcttacttcttcagcgagtgcccttttgaacaagagctatccttttactagacataggtactagtaggcacttcatatcccaagtccttgcaatttaactattggcagaattcctgaagtataaaacaaaatatgtgggtctatcaaaagatatgtcgcggg

SEQ ID NO: 3722 - DNA, 1610 bp, Emericella nidulans
gtcttctttgatcacgaccctgttcgcctcctcaaggacaagtcggcgcttctccgcctcctccttttcacgaatggccaactgttgttcctttgcggccttcttcttccgctgttcaagcaggttcgttgccttcttgatcgctgacttggtcgctggcttccactccagcttcgactctgggtcagctccttcaccggtgggctcagtcaaggacttgcgagtcaggtattgagtgccctcagaaggatcatgctgcagaaaggcgtgaaggagagtcttgtaaggggcggactcggaaccgttagcagtctggtcgtccctaccagcgtcttcatcaatgtagatggacgccattacgagtgagttgacaatgtttgttctcgagtgaggaactcctgtcaatctgttcgacgggttgtgtaggattcgtgcaagattggggagattagattgtgagtcaatctagggtctgagtcacacgaattagcatttctgagaacagcaatgggttggcctgcaaagcggacaactgtaaatagtcaatggctttgcggtgataacttacctagtgcctaagcagtcgaccgatggaaaatggcaagcccacagaagaagaggtgaaaaaagattccttttggttatcaattgccggaggggtaattttacagtttctgcctcaggcacttttgataaggcctatcttcagattgatgcgggctacagagtatttcgcatggagtacttgttttgcaccgaaggacaccaaggacaaaagtatagctcttgtttttcttcagctaatctatgtatacttaaccattttctggagctacgacgtttatattaatgcaaactggagagccccccagtccctcactattgaagcgtacgttgatttcctaacagatcaaagagtgatatgaacaccttttttttaggtccgccaggtatagttacaactcaggtctgcaatatgttctcggtgacagttaatagcgaggcacaagctagagtatgcctatactacactaccattcttgagccccaatggatataagttgagcctaactcaacctcctcggccccattgccataatcgacgggattcttcagctctaaagaccccaccacagctctctcgcattactcttggttttctgcattgatatctctgtgctataatggaagaaccaatgctacaaccttctttttgagttcgttttcttgatactataagtcagcaaaggtcgcattttttttttccagtcgagatatcatgaatcatgactatacgacatgatgtcctcggaccacttctggggcgttcccccgctttctcttcacagccgagccttgtcagaatgggttattattagccaccaagcgagaaacagcgatagagcaacttcatgggttgagcacggagctgacgggagatgggccgtgctaccaagatttagatcggcctcgcgatatcagatcatttcgtggcggtgacgatctgcttcggatgagagttccccagcttaagccatgtgatgtttggactcggaaccagggaacgccacaaaatcaattcaaggtaacaggcacttttatttaccgta

SEQ ID NO: 3723 - DNA, 1207 bp, Emericella nidulans
atacagcttctttctgccctttccctattgagcgtccacaacactacttctatataaagatcatttataatattttctttttaagcaaagtataatgttactagattatagcaggagttaatttacggtgtagtatagtttatataacaaagctaagtaattttgcaatacggcttattctaagtattatctgtaaaataagctctatagcctacactggctcatgacagcagcttatattgagcccggtgcttacgataatcacgacatatagatgcccagaatgcgggggttgacggcacatgcaataccgacttaggatcatggtctgcccttaggacctctcgataccctgagcctaagaagaactctcttagcattatctgactatcagccccctgtaattttaattctgccaggtactttctatatggaaaacctaccaacatacaagagtctcttaaagaggagctgtactataaagactttttaaaacaacatattgaaaattaagcaggacatggttaaagtaagctgtttaatagtaatcataacttagccatagggtacaataccttattagctttgtttgacaaacttcaatcgagcacttcccccctacatcatagttgtgccttcatggttgaccccatcgcatattgtgggctacagcttgaagcagaaaggtggaaattatttttagctttccccaagatttcaaagcgcatcttctagctgcccacaagcttgcttgaagtaccccgcttgttttcaggaaacccgccgttgggttctcttgcttgcttcatatctctcaaaatgtcagactttctggcgtacctgacttctgcgccctctcgcccccacgggtccgccaatatcaccgacaaatgctacgaccaccaactccgtgatctgattgcatacctaaagcaacctggcgtacgccgagcactgcggacatcaacgggtacctagaagtaagagggcgctgcattttcaacgccaaaatgccgcacaagatactaatggtacgacttcacaggccatcagccctgccgtacacagtctgtcatatctctacttactgcgcatccgaatacaacaactccaggagaaaacagctgttggtgtgccaaacgatttacagcctggaggtaccctatggaatcaaactgttaagttcttgcgatcgtttgatccaatt

SEQ ID NO: 3724 - DNA, 3206 bp, Emericella nidulans
tcttgattgtggtggatgctgcactaaaactgacccaaagtgagtcctccctttatataagcgcgcggtggagatggccatgacaggacgaaagagatcggttgaaactagcagatactcgcgatgtacccgtatcattaagcgatgagctatagattattaccacggttaggaacttgtcttcccggccgactttaatcaatatggtacccagtaagccagtggaatccttcgaatctttattttacaagactgccgataagaacaattggcggctattgacaagaggcagcttccactgtggaaacctttcgcgagtgtcaggtctatcgcatcatgatgaatacaatatgtagatgttccacattcgtccttggagctatgaatctggccttcaatcttccccaggaacttcgcccagcttttcgacaaagagtatttggcgacgtactttcttcctggaatctaggcgatacacttgccgtgctagatcgcctgatgtctctggcagcaaaacacaaccaagaaccgcagtttatcgtctctcccagcctgcactcatcggccctccatatcgtcgccggtcaattatcagctatgacccaggaagaagttgcccgaatctaccccttactcctcgcaaaatttccatccaaagatcaactcgaggcaagagactacagaggatggaccgcactgcacctggcggtttcagtacgaaatgttgttgcggtgcgcgcattacttgacgccggtgcagacatcaacagcatggctctcgtcgaggggtaccctgctggaccatctcccaaggacatggcattcggacagttcttcagtcgagctagcttcctcgatttcgaacccaactcaagggacagagcggaccgggctttggaacagctaatcaagctcttcacttctgagcgttattcaaagcttgcgaacgaacgtgtcactctccgtgctgagcagcggccctctgtgactgcccaaccccgccaagtaatggattacgtcgatgagctcgcgcaacgttcgcggccactacacccgcagcactcagtatcccttacagaccaagtcgtgcaagctgttgctggtggtgataatcagaaggctgttcaaatgtatcagaagactggtcatgagaacgttgggaagtcaatcgagtgggctggcatcgagtgtgtaaggtttttgcagcatgagggcgctgggttgctaagggatatgggacttttggacgattatctgagtgattgatatccaatatgcagagacgctttacgtgcttgcgcaggacgcctagtacaaagtatttattctgccgttctacagccggagttccgaatcctcctgcgttactgatgagaatcaatgctatagacgacatctagccgtcagctggaatctgcctactatcagctggatcattgcacagccatgctccgaggaggggagttgaatcatatcccttattgcaaaagcccggactggatagacgtgttatggagctgttagatcggcaatgatggtttcgcccccccctacaacatctccacgaagatatcgaaaaaccttaatgatttcatcagagacattgatagtaaccactcatctggagagatctagaaccatgtgtattacgagttctacaggcaacttgaaggcttagcatctcttgcgcctgaggcgcgcgagatagtcgactctaggtagtggagaaacagcccatcaacgagaacccagaaactgtggagttgctattttcaatgaactcaggagggtaggtaagaggcaaaacagtatttgtttagagataatcttggaaagagtgcagtgacagatatcaccacccttgctatctgttctgacagaaatcagctattaatcgggctagcgacggtgacaggcagtgaatctctttctcggtgcgactactatcaagggattagatatgcgctgaaccctactaggttaacagctgcgaggccctagaggaattaaccttttacacctcctaggatcttgaaacaaccggaacattggttatcaacttggccatgaaggtatgaaggcgtggttgaagaaaatctgagtatgatttcagagatatcagctgcgcgtaccacgaaagaacaatgaaaggataggatcctctcctacgtatatgtactcagtgacagattgttagttcggcattctagaatatcaccatcaccgcagcaattgcaagtttaccacagcgaagcaaaatggatcaactgaggattcaaatcattgtcatctacttcgccaatataaaaacgatagacaattcctctttctcacactgattgtttatgttttagaagatgggtttgaacctggttggatgggagtaaggacattctacaagcctttttcgtggcatctactctgtatactttgattgcaagatccaataaggatggattcatcttgatagtgtctattttcccgtttgttagctgaacatatatatgcacatttacgcttcgttaccgattgcgtccttcgttcttactggtaagttaacgaattagagaatacgtaatagtgggcaagaccgtaatatttgcaaatcatgtactttagtgttgacatgctgtagtcacaacgtgggtagttgtctatagaaactctcgcaatattaagcagagggcatttgtacctctgggtttgtcagattatctcctatagggagttcttatttaatgcttgctcaagagtaccaggagaaatctgttcatagtattagacagcggggcccataataatgacatttattctatgcaccaggtaccgcattattgcttcaagacttcttccacagtagatgttgcctttctagaattaaccatggattagtggcatacccatgtccaccccccggcagtaccatgaaactttgggtatttattgatatagttcatgagtctgtctatatttcaataaatccagctttctagtcactattggaattcttgtatatcaagcaatgctaatagactagagcattgccttctctagtcttgctgtaaccacaacaaggttttaataactaacttacccggtttttgcttttacgtaagcgcctgactagctattttctgtacataaataaagccttctaaaaggtaacataatccttggtgatgggaattggcccataccatgtccac

SEQ ID NO: 3725 - DNA, 1604 bp, Emericella nidulans
ttatgggaacctccggccactccgactgacccatgaatgcctcgctgatattgaccgccggaggacaccacaggtagaggcgcctacgtgaggcctaacaaggcggaatggttaatcctccggttaacgaggcgaccatactttttgagacatcatcgtcgatcaaatcagatgggaaggacacttcgttatttgatttatgagcatatcttgatgatctgtgtagccggcgtgaagaaggtcacaattgttcttctttcctcttcagaactaagtgactttattggtgcagagaggagaacgctagatggactcatatcgttcgaaccagcggatggatcaatcgtgttcccaggaggaatttttctgtcaaagatggtctcgattcgaggtgattggaagcaaaacctgtcggtggtaaaatgagtacgtattgagtcgaaagcagtatcgctcataaagtcagtttcgtcttcctcaccagaagtgaagacccgagtatcatcggaacctatgacggttgatgctgggtctgaagcagcgatagaatggcgcttagagcgtggacgaatcgacctgtacagtgaagatagggctgacccgtctggccgaggcgctctgtccgatatcccggtattctttgcggtacgacgagagaatccgcgagctgcggccccataatccctgacgtgtacaaagatgaaagcccaccgtttgcgggattggttgacggtcgcctgaaaacatttgggtcggtaatgttacgcctttcgggtgcccgtggtgagacccagatagctccttccacatttgattgttcaggtaaaggggtcgatgctgcccttcttttcgggcccgtaaatgagccattgcgtaacaccctgatatctaatggccctgcagattctccaggtgactttggacgcacctcctcagagggcgattgacaagcatttgtttcagctaggtgtgtctttagatcaaatggcgcttgttcgaacggattgcgaaactcaacaggttgagttgcaggcccttccggtacagctttcaccgcaccatccttttttatgatcgatgttgctaggataagggccggagcagcatcagattgtggaaggattcgtcgcactgctattctgaggctttgttgatgttgaaaacctacaatccagtcgctcggacgatgtgtcaggtttcggtaccaagtacggttgccaggggtcgttttccgacgtagcattgtggcaaggtggctctgcaagaggacctaccgccaaactgggttcgaaactcaagctatgggtcgccttgagactgaaggtctcagatcgatgataacttgttacaggtctgcgtacagcgctagatgttggtgaagagatggtgtgcgcgaagaaagggctcgcattggaatgctgggattttggtcgttcgacaagtttattgggttccctgcgttgactggacggacgtgggatagctggactggctggctccggaaacgatcgtgtgttcggactctagagcgagaacctttaatctggttgtaacgacagtcgccgtagccattaagaggactgtcgtcggacatgcgaaagact

SEQ ID NO: 3726 - DNA, 1153 bp, Emericella nidulans
ctatcttcgcctcttcggcgtttcgttcggcttcccaatctgtagccttcttaggttcactagcctcggtcagctcctgggactcaaacagctctttctctttctgtagttgctcaatcgaagcctgagttcttgggtccgctgcaggtgcgtatactgctaaggcgggagttttcaagcgaaccatacgcaacagcttcgccagattttgaatctccaactgtgtgggactgagtgtgtggctgattccgacatgttttgtccggtcagcttgtattgagggtatctctacccaactcttgtaatcctcggcttctgctgggtcaacatcccaaggctgtacctccaaaaattttcttgtttggccgtcttcgtcatattctatgacagcaataacatagtcatttttcgtgttttccggtgaagggattatacttgtttcgtcccccttgtcaatgacaatcgatttgggatatttatgaaaggtaatcgtgccacgaacaacatcaccatctacgttgacaaacataccaacgcctggttccgattcatcagagcctctgactaataggaactcggacggggtcggcgagaggatatgaggtctgagttgggttgaaggctgcttaggcagaggtggtagaggtttctgttcatctgcaacagcctgttgcggttgtgcctcgcgcgagggcatttcggaagatacccttggcgatcccatcggagaagcgtacctgccacgctcccttgacactgatcttctgggcgtctcggactccgattgctccggcgtcagggaccttgatcgatctttcgacgcggaccgtggaggtgccgaaggctgcaacatccccgccagcgtattcaaactggagctccgtccatgaccgggactctcgtccggtggcgaactcgcttttgatagcggtgatttgggagcagacggaactggcatatcctctatttgaccggggttttgcatctcgtcggcaaaggatatcgggaatagaggaatcttctgctggtgttccacatctagtaaagaatagtttcggctgtccgcgacacatgatatgatgcccctccgcgacatcgtcaagcagtttggatactcaatgttcctgacgagacgagctccatcaccaatttt

SEQ ID NO: 3727 - DNA, 5244 bp, Emericella nidulans
ctaaaccccaaatccccggttccttggacacaaaaagtctaaacatctcctcggataacgttcaagtcagaggcaaagccgctcaaaatcatggggctgtactacattgctgtggtaacttaagttagtaagggttgttaggggcccctgtctcagcctataaaaaccctgtgaggattcttccgggtcacaacaaaacaattcaaactgtaagtcaaaaaaatgttcccggtaaaaatattatccaaacaccgggccagctggcagagcaaaaccgtaaaggtctctgaaaaaggagaagtaagtgggagaaagacgagaaggatgcagtagttatatacgcgtccttggacgcgtcaacgttgacagggcctatgctctgcattaccagagcacagtcgcattaaatgataggccatcaggcctttcaagttacgcgaggtagggctcatttcagctcatgcatggaaatgttccaatgagatggagccctcaagggcgcgatcccgcccgctgatctacggcgtttctatggctttcctgtcatgagatatgactagagcacgtacgtaataataaagcagtattaaaaggtctcatagcagctgccaggcccacacgatcacatcaaggaggttctgaataaatggcctagttcgcggcactgtttcttcgtgggccaaagagtgcaagacagtaatgaactgggcactactactcgcagtaggatcgataaagcagacatgctgactgagaaggaagaattttcaacaaagtcgtctatagcaaagcgcacagccctgctacgtatgattggctagttggtgagaattcacatttctgactagagagctcaacgtcaagatccattccaaattctatatgtaaaggtgttcccaaaacgcgatacttgtccaagacgcggattcatacatgagttgtggaatgcaaaggactgatattcatttgctgctgatcatacccttgagagtaggattctagagttgggtctagggctgactccaacaacctagaagactaacaactctgatcaacgcggtatttataagatgtacagcaatcgaagtatgatgatgaggcaaggggctttgagtcttgcttactcgtagattggataatggcttcttggtcgtaagttgtctactctcactactatctcaaggtaaagaagaacagagtacgcagtaagtgatccattacatgtaatcgatggttcattgacgccagttcattgagctaacagaagaagttagtgaatagcgtgcattgagtgagggatgccgtggctcccacctaactgaaagttggaggctacgcagatctaaacgatgcatcctgtccagaaccaccaataatcttgacagatcgaactcgtaccaataacgtccggtcagaaagcaatgatagccgttcctagcctagggcaaggggaacgtcgacgtctccacgcgattaacattaggtgtggtatcgaacaccagctccaaaccaggagagatcttgcgctggttgtacgagaatagtttgtagtctgcagcagattagtatcaacttgaccgaacaaagaacgaaagggcgagtgcgaaacgtactctgcggtccctgcactccaaccgtcccctcagccccctcatcctggacatcaaagtaccggaacgtcgcgatgttgggcctcgcctcttccaagatcatcaagaaatggaagtactggtcctccatgttatacctcgtcacatagaactcaattgttagggtgcggttgggtgcgtttccttcgatgtcgtagtagataccgtgcggcttgccctgtacgatcttcagatctttccagagggggaatagcgagtatggtgctagaccgtcgcggaatggaagttgctgccctgttcgcacactcgccggacttgcagtaggagcttcgtccagacagatcatcccgttgtcgacgacccacaatgtcgagctggagtggccgtagagagagacggcgaacgggagatcgagctggaagaccttgtcgtcgacgtcttcaggggcaccagagaggccgccgacgatgactttggggttgcggagggtctgtcagaggagggtgcaggttagcctttgccatgcggatcgcccgatatgtggcaggatgtgtgggcttaccacagcattaggcaactcgtccgggtttgcctgttggggttcaggctggggttcgggctctggcgctggtggaggcgtcgcggccgcctggagttgttcgacaatctttctatgggctgcgacaagatcgtcgagatggatccggacagcgatgtcgtgggacttggtctctgcatcgagaagttgcgcttcaacgtcacggatggtcgttagggctgtgcctagctcggcaagtaatgcggctgcgtcggcgatctcgccgtgtcgcgcgagcaggttcgctttgtcgcctaggtacttgacctgctcgagggcttgaagggcctttgggaggttggtgctcgaggttgtgactagggcagccacttctttggcggcaggggtgatggcgtcgatgttttctgtaagaaggggtccgatgccgggtgtgggtctgtacacgtcaagattgtatcggcccgtgtcgttgacgagcacggcgacgagacgcaagatggacttctcgtatgcggtgacagacgaagcatagagacggccactgtcgacactggctctggcctgagacgctatttcgtcgacggccgcggcgatgcggcggatctcattgtggtaagagacgacaatgtactgccatgcaacgatgacgacgcccgtgagagatgcaacagggaagggcgagatgaagctgatcaagaggccgacggtgacggcgcttccgccgaggactctctcaaaggtcgatgcgagcgaggtccactgcaggtgggcgaaccgggcctgccacgagaaatatctgttctgatggacggcgatgacccccaagactgcagcaagcactaggtcatatggtccccagtatgggggggaagcagtcggtgtcgtactccatctcccgatagatggatagaagatcgcgagaaggataaggcttgcgactaaggacgaacatggagccgtcagtggaacggcgtcatgaccggttggataaaaccaccccgagagataacctacccttgtgctggtcgacgtaggtaactacttggtgcaacgtctggacgggttctcgcgcagatgaggcagtcagtggctcaggctggttcataggaacttgagtactttgagaagcttcgggagctgggggtgctggaggatctggagtagcctgagtagctggattgtctgtggacatgccgggcaggtcaggtaacgaaagagagagagcaagtaatccagtgaactgttctacgcacttgaggcgtactaatcccaggcaaaacgttcatatatatacgcgggctgcttgacactcgtctttgcttttactgtggcacaaacaatgccagcaagccagccagcccatgccggccgcatcaacagcattgatggctggctggagtacatctccgctgtgctgaactacaagagggcttggtggtcgtattcacgatgcacatacaagggttcaaaagaagggaaattatagccgattgactcgggctcgtatggcgcaaagcaaacaggggcgttagccgcctcagagaccaggacgacagccattggccatggcacaacgaaaccctaagatatcataggcggacattcctagtttctgcaagctaggttagcgccgcggactctcgagggggcaagagagaaggtgggagagagaaggaggggttcataaacattgccataagcgaacagctccaacggcaacggaaatctgcatgttcatgcatgttgaaggaactgcctgcatggtgtatggttcgagcctgacaagcagctagttagcatccttgacttcaagcatgacttccaattgctgcgaataagaagatcgcaggaacctgcactgccagtccgagcgagctgggccgcggtggctggctggctctgatctgtcagcgcagcccagtaaattttccatttgacaggtaggattgacgaaggcaaaaagcacagcgtcgcagcgactagctgtcggtcaccccggactgcggacagtcaatgcacgaggcctatattggccgtatttgtgcaatgcgttgactgaaccctcccgctctacctgtagtctgcccgtagtcttcctggtaggtgggcagtcccgctctagagtctctcgaaattaactctcagcaaaatgattgaagtctcactattatttgtagtcgtctctgccttattgatatctctgtgaaccaggaaagcgcaggcgtatcaaaagctcgatcaaggtcaagggctcttcgactctatcaattagcctaagttccttcagtgcgaaaaaaaaaatatgaagtgtcataataaaacggtaaaacaaaacaaaaaaaagaaataaagaaaaggaaaagaaaaggaaaaaaaagaaaatgccaactgagagttacccccagtgtcaaccatgtcgttagcctcgtcgcagacaacctcaagcagccagttccagccttcagggatggcgttcaatagagatcttgagaaagcctgatgacggtgcaggtgaactcataatgaactctgcgattgaaccgtttttcaactaaacgtgtaatgccataagttgcagcacaagctttgcgtgagcagctaacataccgtgcttaatcatctgacgcccatccccacgtgacgcccgatttttgtatacaccgactttttaagtaacgatttcaaatgcctgtatctaactcaatatagcttcaatggagctagcgctggcagaaatagaatccctggagcctggagaacagtttagctatgctcagaatgcgaaaaagtttggtgtaagccgctcaacgttgtccagaaggcatcgaggtgtccaaggctcaaaaaagcagcaatacgaaaacatgcagtttctcaacccccaacagacaaaggagcttataaactacatcaataagcaggcgaagaaaggattattctcttctaatgagatggtcaaaaactttgccgaggaaattgctggaaaaaaggcaggaaagaactgggtttaacaatggctaaagaagcatgatgacaagcttgtgagtgcctacacaaggggcattgatcaatacg

SEQ ID NO: 3728 - DNA, 7697 bp, Emericella nidulans
ctcggagattggtcatgtctgtgcacctggactagttctagcggaggcaagtatttttatctcttgggaaagaagcagggcatccagtttctggtgcgagagaaggggtcaaaagtcgaggttctggaggttggtcctgtgattgagatgcacatacatgtacgtctgctcatttccctggcaggtccaaactttcccgctcccagtcgaaccaagttcttgtgctgtctcgccggaagataacgttgtatactttgctgccgaggacaaaacgatttattcctttgcagctgcggaatctactacagctccggatatccaaacactggggcaggtcagcgacgagatttcagggctcgccgtttacgtgtctgccgcgacccagtacctgtttgtgactcagtcagacaaggttgaggtctataccccagagctagagcaagtgggctccttggctgtgacaggtgtggaagacctcgaaatcgctggaacttcaatctaccaatctaactcgtcccaatatccgtacggactgttgggcttcgctattgagagtgattctggcaacgccttcggtgtcgcctcgctcgagccggcttttacttccctaaaactgcagccaaatacgtcatatacgcccaggaggagctctgggcagtctggcccaaagcaaaacggcttcccgagcgcaaacaacactctctcctgttttgccggttggacgggctctgattgtacagagataacatgccacaacaactgttccagacacgggacctgtttaggtcccaacgaatgtaaatgccgtagccattgggcaggaccagagtgttcctggattggggttgaggccaagtacgagaccgatgcaaacggcggcgacggcgacgaccctgctatctggatttctccagcgaaccttaaccgatcaacaattatcacgaccacaaaatcggagatcggggccggactggcggtatttgacctgaagggaaatctgcttcagacggtggccgctggtgaaccgaataacgtcgatattatatatggcttccaggccgggcggcggacgatcgatcttgcatatgccgcttgtcgggaggacgatacactctggtaagtggccaccgtaggcctctatgaaggtcatcgcttataaacttatacagcctgttcgaaattacaccggacggccttcttacttctatcccgggtggaagacagccaacaccggaagactacacggtttacggctcgtgcagttaccgctcgccttccaacggaaaacaatacctctttgtcaacgaaaagtctggtctctatctccaatacgaactgacttcctcgcctaacggaactctcgccacaacccttgtccgcaagttcaccggcggttcaggcggccaaccggagggatgcgttgctgacgaagaaaacggctacatcttccttggagaggagccattgggactatggaggtacgaggcagagccaacggggtctccaaacggaacccttatcgccaaggtgggtgatgggactatctacgcggacgtagagggcgtcacgctactgccggggcaaacccctgaacagggtcttatcatcgtctcgtgtcagggggtgagtgcgtactccgtctatagacgggcggaaccgcatgaccatgtgttaacttttacgattggggaatctggcgatgggagcgttgatggggtcaccaatacagatggagttactggggtgtcgacaggattgaacgacgactttccgagggggttgcttgttgttcacgatgatgcgaatcagctatctacaggtgaaacggcggagctggctagctttaagcttgtgagtctcgaagatgtactggcggctgcaggcaagagaacgtggttgttcgaggaagtcgacgagacgtgggacccgagggcgtaaccttaccacaccagaaggttcaacacataattacattgaaagataattcataaagccattgctataatattgcaccattcgtggggtttggttgagtagcccggttccggctaccagggaattagccggatagaatgctcaactctagttcctgattgccaggtggactcaacaagagaacaaaacagacctgtcgagcccatacacttaggcgacgagccaataagcaatattactaccagtaccgacaagccagtctttcttcacgtaggggcaccgggtcaatccggtcccggcctcgcaacgctgtggaacataaaatggcagctttaaccaatgctcggatagtacagcttcccgatccctgagcacagtgcccagtaccttccgagcactccagagtgtccgatagggatacggccgggcttttgtcggcgatcgctgctccgagggtggactttggcgaatggtgatccggggagatccgggcttaatggaaagattaggatgtcgttgcaggaagtgcctaccagatattgaatagtaccctggatcagcaatagtacctctgtacctaggaatctacttaccagtctctgtagggtgggccaatgtttacaatatctagtagaaagtaatattcggatgccgcatttaccttaaagggttggacagcagaagtctcatgagcaaaggacacctcaactgaaagaaatcttgcaattcttgcatagaagctagatgtgagtgattcgcgatgctggagaagagctgcactcttctcaaagcccagagcatctaagacaatcggggagttttgctgggtaactatcgcaatctttggaagtgagagagcaggtatacatctggaaagctctagcattctgagtatatcatatcgatattcaaaagcgccgataatttgtctctcgatgtggtaggagtgctggatacaacagacctgacatgtacatcacggtagacccggcagactcactgacctataatcatccgctcccggtttattttcctcgtggtggtgcaggtgctgcagagtcgtcggagagcatcgggcaatttagcgcgaccttatgtgaaatctctggcctctgtgcttttatatattccctaggactgctgagttgttcactggattttgccgaaccctgtctaagaacgccagagagctatatcggacgcacccaaaaacacgtctgtactccatggctgctaagtactcattcaccgacggcctccaggctacggccatcatcacaggctcaatgctctccggtacgtggctaaatgctccgacagacgtctgccagattgaatctcgatcactaaccctcgaacctaggctcaatgatgaccataaccctgctctccatccccgtgtggctcgacacgataacgcagcctacttacctcctcagccaatggatccggatgtttcactacggccaccgcggtcatccatcaatggccgtgctcacgttaaccttttataccctatgtgcatggcagcgacggtcagaagggaaacgctggggaacgttgctcacggcagggattgtgacgattttgatgtccgcctttacactgctgtttatgattcccacgaatacaatactctttgaatacgcgtccgcaagtggaggatccagaggtggtggaactgaaggaggtgagacaacttgtcctcaagtgggggtggatgcacttgacccggagcttttttccactcattggagcagtgattggtatgagtgacttgatggggaaatgggtaaatcgggatagctgatatcgttaaggattagaatttgaagctatctagattgctttgtcccctgttacatggctataatgcgggactatacgacagtctgcgcagtggcggctcccttgttcttatagcttgctctctatttagcggttaatcatcacagaatcagacttctgtgacgttatatgtctgccgcgctattctggcatgaactgcctgattcgcagtaaaagtttcaggataagtggtctcagtaaaccggaaggacgaacatccggtgaaggattaggaatgccgcgccggtgtaggcatgtcgtacatgtacaacaattggaactgccggattaggtatcagcatactgatattccatatagagcattgtagggaacaattcatccacacaagagctgagttcatgcttgacaagcttcgcgtgcaacaagcaggcaagcgtcgacaaataggcaccgttcccctaccgtaccaaagtccaggaaatctagacggccggttcctctctagctgcgttccgctgcgcccttcgctcatcccgccatataaacaggcggatggcaataacactgattattgccgcactaaccaacccgaatgtagccggaaagccgtagtctgtgtacattagaacatatatggatgctataaatgactagacactcacgtaaggacggcgcgatggtctacggaaagatgacaataggcagccatgcagcgactgcataatggaacccattcatactgcggatcactaccgctcgctgctcattgttgtcggcgcagacttcgttggcccaagaatagctgcgcatgttaaagacaattcactgaaagcggttggataccttacaatactgctgtcatgagctggactccaattatcaggaaggcgaactccttcagtgcaagacttgctggccagaaggcaagataccatttggcagcagcccgtatacctaagccaatcatcagcaacaccccttgagcccatggcaataggaatgagtactgaccacatatccaagcacaaacgcataccacttccaacttccgagaatcctcttgattgtgcctaacgtaaccctcaccggcggcgcctttcccgctctcgttaccctctccttagcaagatccctctccttttcgttcaaaaacaaactcgggtgttatacggcgtgtcaggaagaatgaacaacgttgctattccaaccggaacagtcatgcaaccacaaacaatataaagccatatccacccttcaatcccatgactgcatccagattctcgtagacggcggcctgtagatacccgccaaaagccgcccccagggcgccgtcagatgaaacagcgcaacgcgttttgcaagctcagtctttgtataccaactccccaataagtaaagcaatgaggaaaaaaacgaactttcgaaggaccaaccaggaatcggaacgcataaagctcagataccgacttcagaccggcctgcgcaaacgtgaacgcgccccagcagatttccatggccgcgagccagatactccgccgcacacgctggatgatcagtgtacttgggatctgcattatagcaaatgcgattgtgtacattgtttgtgcataggtatattcgttgccgaacatggagagggcttcttgcatgcctgagacgtacgcgttcgagaggtttccatggtcgaggtatttcatgaagaagcccaggcatccaatgctgagcattgcaatatccagttttaggagaaggtgccgctctttgggggtcttaaagtgcgtgtctgtgtcccagatgatggagcggaatgaccggcgaggcgggacatcctggctgaaagaaggggggaagactgctgtcgctttgctctacggctccttgagagctgatttttcattcaccatcttgctaaggacgtattagtccggcagttggaactccccgttcttcctacatggtttggtggtggaaatgcggtataaatgtacttttttatccctagtgcatcacgacatactcgcgtgatattggcgcgataagcatcattgttggagatagaactgcccaatcactcagctgatgctcggccactagcaagttttctcgtatatacttgggactttgcagcaagggtctttgcatatgattgcaaaaacctggtctagcttctgtcatctctccacggacatgctacctagtgggttctgcccctctacgcatattgggtacttgatatagtcctgctatctcgttcaggcatgtatgaatttatatattaacaatgcacggacgcagaggcaatgtttgccgtaaagttccattgatgggtctgttcatataagcagctcacgtaccgggcaagacaacggtcaatgatagtcaaggccaaccgactactaaaggcggatgaaaatcaagcacctagtggtaaattcacagattctggtgctctggaggtgaccagggtcaatagcgagaaattgtctatcaacaagactcctctgcacctacaccacacagctgcgtttgttttggcctacgggtatttgtttaagcatttctgtttcctatgttggccaattcattcaaacttatgcagtgctaatcttccggactgcgcagatctgccgttggcatttaccaatatctgttgagcagtcgatggactatcctattgtccagatgactacaagggctaaggctcaggggggggtagaaaatagatctctcagctttaggacttagtatggattttcttgcagttaatccggtttgctttctactgttccaggcatgcgatctatccattgcagcacattccctattaggtttactggatttccgccacagtaggagcactatcgagcaggatccatataccgtatccctcattgcttacctgcctgcgcgttctcgtgctgtcctttcttaaccggcctctgcctctacctcatcatcttgtcttgaaactcatctacacaaatcagagagcccagctcgattaggttggcttgcctatttgatatttaccgagcttcttgcaaagttacgttaagtggactcgggctccatccaaaagattttcacgctgtttcttccgtaactctctatctgttgataatactcaatctcgatctggctatactctacctgagtagcatcctgctgtccatcaataaacactctcaaatcaaatatatcttacaggggccatattagcactaatgaagctgcaaagtatacctatagcagcagatactacttgaggaatttgcagttgcttcattttcagtcattgtaagcagcggagatcccggttacaagacagaatggcggaggtattgaacaaggacgttgtaattcaacgtcaagcaaggaggctagtaagactaagctgggaaatatagttcaaaattttaccagcctcaaaaatgccttgctaaaagaacagctggtgcaggccgtcatagagtgctgggtttatatgcagctccagattgccgtctacacggacagagatgtgctcacttacagctatggagaagccttgatgatcgagttggctctgtgtatccaaatgagtaaaatgccggattgcgctccgattggggtacttacttgtctgagaagagcccatgtccaagctccctgaacattgatagtaggataaaggtagagtagtgtgtattgagcagcaatgatgtttcaggcttggtacaatactttgaatgatgcacaaaggacgcacggatgggaaccggctcatctttcacctaatatagtaatgtcttgatcatgccaaccacccggaaatcaggtagcctcgaccactgagaacattaaatctaaaatagaattaaaaaaccaccattaagacaagtccaagatatcgagttttgctgcagctgagagataataatgctggtgttggtgggaagaatgagcagtggct

SEQ ID NO: 3729 - DNA, 2981 bp, Emericella nidulans
acctccacctctgtccatcggctgagaggctctcatcgacccgtattcgatgccaccacagggagccatgcgacgtgccactgccaggtcaatttctgggcgagatgatgaattcggactttattgccctcatccaacatggaccgatgtgatggccccatgcgagtcatgagtgagattaggaggcgttggacgggatgacggcgcgtcttaaaggagtctggctttgcttctaaaagcgcatcgccgggtttctcacatccgcatttctacagcttattcggaccattcacgtccagctcattgtgagccatgcgttccaacatcgtgattctttctgccttgccattgctggcttcggctgcatcgacgtctggcagttggggcggaggcgtgaattactcgaagatctttggtggcggactgtctacgaatgcgagcatccactatccaggccagtctgactataataccaccacagtccagcgctggtcgacttgggcagagccgattttcgcggtgaccatcaagcctgccaccgacgaagacgtgcagtacatcgtaagcttacgaccttgtccattgccaggcatcttctaattgggatcagatcagaactgccaacaaatgaacctgaccttccttgctactagtggtggtcatggcggcgaaacgggctttgttactgtgaagcacgccgtcaacattgacctgtcaaacttcaaagagaacgtccttgacctggaggctaatgcactgaccgtcggccctggaaactccttttctgcctttgagaccaacccatataacgcgggaaagatggttcgtaagactagtcttcggtatagatttgtgtggcacatcttacttacattttctccagctgtcggcaatgtggattggcgccaccatcggcgcaggcataggcccttatcagggtctccacggcctggtcattgatgccctgcgctccgtccgcctagtcactgcgagtggtgatattgtcacggcgtccgacgaggagaatcccgacctcttttgggcggtgcgaggcgccggtgccaactttggtattatcacctcagcaacgtacgagatttttgatgcccctaataatggcaatgtggtcctggctgagtttgcataacctggctccgtcaatggctcgctctggcagctgctggaatcattgggggagacctatcccaaggaaatgggccttactatgtcggcctcccatagccagacagccggaacggtgcgtgtatctatcttgaagcgaacaacttcatattctgacacaactctcggaactacagacctcttcatctgcctccttgacctcttcaggacccaagaagccgcgcagccatggatcaatcaactgcttgctttaaaccacacgcagtggcgcaacgccacccttccgtggagcgaggtcagccaaaactccggctttggcacaggcgccagcgtttgtgccaccggaaagtataacaacaatccctctgtcggcgccaagcagacctctgcttccgcctacatcgagtgttcaaccagtacgtggagataatgaaggccaggccgtggctcaccagagcccttatcgtccagcggtttaacacgagggcgactctcgcggttccagagagcaagcggggtgtcatttctggacgtgacttcagctcccttatgtacgtttcgatcctctcgtgataccttttagacatgccccgagtaatcgtcatatcgctttcgtgcctgctgacacccagccacagcatcctcgaaaactactaagatggcctgcgtcacgacgccgacgtctacaggttcagcaagaagctgcgtagtcagctagtcgccactagtggatttgacagtttgcaaacctacatcaactacgcgcacggtgatgaaggcccggaggtgtggtatggcaaggataaccttccgaagctggtacagttgaagagacagtgggatccagagggcaagtttgggccgggcaaccccatccccctggcttagaggagggcaatgagaggggtttaacagtgtttggacatgaggccacctcacctgtaacctggtcggccatccaataacgacaatagtccgtccttttccacaagctctgcaaacaacgtgacctgatgcccatcactcttagcactatggtgaacaacttcagctgccttttagaagttgtgaattttgttaaggtttctatcccctccatgaaacatgacgcctaacatcaacacactacctcctgagattatcatactaattgtagagagactgacaaccagtatattagtcagaacttagctctccaaggagggttagccctttttggctgagtgggaagttcgatagaatctctatttaccaacaagaaggcagatgtcgtccttaaccataattttctttgaccttcacttgtcacaggctatggcctggatcttggttgtcggccatgctctcaacctggttctaaataaggtttctgcaacatcagtgtacagcttcggaaattgcggcctcgaagcttaggaaaggagatccgtcctcataaatttggaaaagggatccgtcggcatacaggtccgcgaagtcagataggttgataaaggaaggagagatatctgcgcttctatctcttgttcctttctctaagttgtgatactcgtttatacaggacagccagttgaaaataatactgcctacgcccgttacagttcaaggcattgcgcgtagatcaatatgagagcaaacccccttctgggtcggtcagggccttcgacccaaacctaacccagctggattcttgggttttctagcatgctttaattaatctgataaagtggaccatgtgagcaagcgggccatcacacgtgtttgactgcaagcgaaaagctcacttaattcaaccactcaccatgcttcaaaagcgcgttggcaagtaatatgctagt

SEQ ID NO: 3730 - DNA, 4748 bp, Emericella nidulans
ttgatcctttcaagcagaacttgatacatttccaatattaccacttcctctgatattatgccttcggagtcaatatcacagacagtagccagcgcaatgcccactgaaacccgctttcattactctcagaaacgaccacggtcagcaccagttactggctgggtttgggatcacttccagattactaaagtgaatcgggaatggacagtatggaaaactaggaaaaggatgttatcagacagagatatctgatgtgcttattttgacgataaaactggaacttaatatctttggagtacatcagactcattaagacagacctctgctgccaatatgcaacaacatctggagaaacattcaatctttgcaccttattcccaagccaaagcctctgttagatcagggcagcctagtattatgagctttatcaccaagcaagagagtctctcacatcaagaacaccttgaaaaaaacattctttgttggatcattcgagacaaacaagcatttataactatcaagttaccagagtttcagcagatatttcaagatactccaggaattatacttccattttcttctcaagcaacacttcgccggcggcttatagataactttgagatacaacgtttgcaattaaaagaagagcttaaaataacatgcaagtctattgctttgtctcttgatatttggacaagccagaaccaccttccaattcttggtattattggccactggctcatggaggactttatataccaggaaaaggtgctagagtttacagaactccatggagtctatagtagagaaaaccttgctgctgctgttcaactaactctatctgagttggaccttgaagagaagttaatcataattactggagataatgccagtaacaacaagacaatggcttcagagctatactatactttaaagggaaatataggtgaaagcagtatacttcagtttcaaggacttgatagttatatccgctgcctagcttatatcttgaacttggttgtgaaggacattcttcgagcactgaaatctggcagtagtgaggaggcatatgctgcctgtattagtctctgcaatggacagcctatatctacacagtcagcattggcaaagctctgaattctcagtctttggattgatcgcagccctcaacaaaggcaaaaatggaaggatatttgccgattcatggacctctctgataaatacattgaatatgatgttgaaactcgatggaattctacatattgaatgcttgatgatgggttataagcaaaagcccagattaatcattttctggctctccaggctgagatctctccatttacagataatgaatggttacagcttactcaaatacaccaagttcttgccaaatttaatgaacttatattattcttatctgagaagagaccacagatcagtcttgctgtaccactttactatgagctacatgatttactatacaaagcatctgaatctcaaggagccttgcagggttggatcatgatattgcatatgcaataaaggaaggcttaacaaagtacaaaaagtactacacattcatagataattgtgatgtgtactacacagctctgatcctggatcctcaggtcaaaggagacctaattctgagtgagattgaagataaagaagcaggtaaacttattttaaaggctatccgtgataatctttaccagagatattctcttcctgagagagagctacaaggaattggcttaccccaactgtttataccaacttcccagtctagcaatgtggaatcgcgaatgctccaacgactgcaaccaaaagccttgccttatcattctgatattgatcaatattttgacaatcctcgagttactatagttgatacaactgatacaaattggctttgcaattggtagcgtgtacataaggatgaactgcctcaaatggctgcagctgcaagggacttccttgcaatcccagcctcagaagtcgcggttgagaggctattcaacaaggggagagacttgctagggattcggcggcactctatgaaggctgagatgatgagaatgttgatgttgatagatgatgcctactctacttaaacgttagttgcaaagtatcaaggatatatattataaacaagctgaagcaaaataatcatagctagtactaattaagtaactttgacaatttgccgatatcgtcaaatagttgccgatgtagtatcgtcaaaggcatggcctgccgatcatgatcgtcaaatagtatcgtcaagcttaatgatagactatatagtatcgtcaacgatatagtatcgtcaaaataggcagataggcaaatcgtgaacagccctaacgccgcggagggtactctggacacatactgttgaagccaagagaaagttcaacggattagaccgtctttaaataatacaatatagatctctggagaggctcgtcagattctgggtgttccagaattacaattgaatgattcagtacaccgggacagtgcgttgaacaataatttcgttcgatagctgatctgaaggccaagttcctcaaccaagaactcgggttcaacgatcgaacagcgcgatccgtatggagatagaacataataaagcagacggtctcaggatacgagcagtatcataattttgtggcgtccaggtttaagacttgaccaggtacactcttcatggtggctttccgcgcttccaaacactcttgtttctggtctcgagcataaagcgcccacgctcgcgcctcgttattactattgagtccagggagtgaagaaatagttattttagcagtagctataccaatggcgcgcggttatggtaatttgagagtcattatagcaaagtgcttccagaaggctggggagaaattgtaagccctgcctcccggtgggccttacctaccgaatgcgcaagtgcaggagtgcactaactacgtgtcataaagaacgatgacgcattgaatggcaggtataactggagttattttgcctcgcagcttgtgagcgcgacatgcataactgtgccgttgcaatggcggcaagctcgaacagcatagacccacagtttagaacccctattaacgtatctgtccgactattccgaatactggatccctgtggaatctagcgggaactagttcgtggaaacaatgttgaaacggggctgtgtcaactaggtttgaacatgcaagtttggggcgatgcccccacgaacgcgcaggccaaggggagccctaccccaaactatatcaaagttttatataaggcgttaaagaacatacatgtcggtggggggagaaactctgcgatcatgagactgatgtcgcagcagccagctccgcggtatcctattcctgcaaggcaggggtggagagtcggcggatagaagtccacgggccaatattataagaacagtaattgcatgtgaatccgttatcggatttagcgatgggtacctgtatcagatactgtatgagactatgttgtccgatggtgtctggggcgcagctagcggtgatggatatgcataggttagtatgtctccttcccttctaccaggcttcaccacatccgtattgagttcgtcccaaatcggtttgctgattgttaaaatgtggaaactcatcgccacgagaccgagcatctagatgcgccggcgaatgtcactcggtatactgagcaccgcaacagggtgagtggacaaacctgcgagcgcttgccaagcgagcattcaatctctcattttgctgggctgcatccttctgggcgtatccacagcattatcggcgacgagcttgtgagtgtcgtgacgggcaatagcagttacgccaaatactggtaaccattgtcggccagtctaggacttgcagataatccatacgctcggagatgaagtgacagtgaatcctggagtaatgaagtaatggtgtagcattgctcgtcggagctcctgcgatcagttcccgccgtgatgttcccctggccgttttgggggcgaaaagagcaacgccccaattaagaagctgccgaaatccgcagccagtataaggcagattgcgaggcagactctggctgggaactcagtgcaactccaccatcttcaatgaaaccctactcactatgacattcttaaataggtcaaaccttcgaagcctatcatgcaggcaatgcagccgttgccaacaattccagaagatcatgtatggcgttctccgaacaacctccagcaagaccacgatggccgatcgcactccgacctgagacgatagcaagggccgaaatcgaaacaataataatggtccggaatagccccgagccatggcattcgctcgactacatcgtcactcaccacgacggggcggtcctcttcaccgtgcacggccacccgtggactctttcacagcgccaggattttcgcgacgcgtccggactctccgctcttcgagctacgttgtcggtggtatgactcatccgtgatggagttgaagttacctggttccacggcaatcagtgagcccctccttacagcgaaatgtcgagtggcggtccagaagcctagggccgtgatgcggtttcgcaatgcttgtgcgctgatggatgcgaggaccacgcagagttatagttatatgggatcaccagaacagcgaaggatggggggagccactgttgatgatgagaccgttatggagattttcgcgatggatgtggat

SEQ ID NO: 3731 - DNA, 1310 bp, Emericella nidulans
gaattgtagtctctacgagcagcaagagctgacagcaaaggtcacggaaacgcctactcgctcgacatcgatagcgcctggagcagcatgagcacgattgaaggcgacggtgttgagttgaagaacgtgacaattcgcaactggaagggaaccgaagcagacggatcccagcgaggcccgatcaaggtgaagtgtgcatccggagcaccttgcactgacgttacggttgaggactttgcaatgtggaccgagtcaggagatgaacagacgtatgtctgtgagaacgcgttcggcgacggattctgtctcgcagacggtgacggcacctcgaccttcaccacgactctgaccgcctcggcgcgccctgctggttactccgcacccagcatggacgccgacctcgagaccgcctttggtactgatagcgagatcccatccccaccattccaacctccttctacccaggtgccgcccctacagcgcgcatgcaggagcttcagtctcttcaagtcaagtacccactgcatcttccagtgctgaggccaaattcgtcgccagtcccgcgacaagctctcccaccgcgacttccacggccatctcttccgtcgatcccgtttcaacggccacaacgacagcgacttcccacgggcatgggaaatctcaccacaaacattcagtgtcgtgcccaccgccactgagcgattgcatggcttgaagggaaagatacaggcagaccctgacctatttgtactatacgcaacaatactacatcgtttagcaacacttgaatcctgtctagaactctcttccacatggccagtcaagctaatagtgaattcgttccaaggagattatctaaacagatcgcgtcggccatgttccctccatgattagcatcagatcaccaagtattgtatttgcgtcaaaatgtcagcccacgacgaatttgagccttcgagccccgatttcgtgcctgtccatgagactgttcctctgaaccgcagtacagacctcgacgcatcaggcgcgtacaaactcaatgtgaatgtgttgaacagggcgattcaagaaattggaatgggtcgataccaatggcagctgtttggagtggtcgggttcggatgggcttgcgacaatctgtggcctattgttacctcccttatacttcttccagtcacttatgaattcgatgtctcacagccacctattctgctgttggcacagaacatcggtctattgctaggcgcgttattttgggggttcggctgcgacattttcgggcggcgggtggctttaacatgacaataggg

SEQ ID NO: 3732 - DNA, 7649 bp, Emericella nidulans
tatcatatccagaaagagacacgatactcgagagactctgcacaagctctaaacagactattaacttgcgttataccgacgccaaagccgatgactatggtgctcttgactgcgcttcgactacatcctgtgctatagagattcagaacaggtacaggccaattcattacatataatcaatccttcaactcgcacgccgagggcctggtctcaatgtaatgctcggtgggtttaggcaagaaaatcgtgccgccatggcgcaagctacattgtggcggattagtgagattccaggtaagaacgaagccaaagctaagttcagcgccgggcacctttcggcagtttcagacgaagctcatctccactgagaaagtcatcgacgggggtcatgtgttgtttcatgcgctagataagatgcttgctcgggtgcaggatgtacggcgatagtttaacaacatcatgacgagaactatattgctgatactcgccgcgcaagttgatgcttatacgagtcgatttcgaggaacgcagggggcgctggacctgggatttgcccaatgctgatgctcttgcagattcaccatgccactgaggacgagcgtcgacctgctgccgcacagcaggatgaccattatgatgtgcggaattcgctggcggagaatgtcgaagacgacaaggagctgcacgcaaatacccaggtgctcgaatctcagacgatcctgtggctacagaacaaggcggattcggcatattttcttttcacaaaacgccttggtaagaatctgcttcccagcagatctcgtgatccgcatggccatatcacttattgtgcggcttgaaagcctggtgggaagtgcggtgtcaaacctggcggtggcatttgggtacagaatggctcgcttggtgtcgccaagtgacaacacttgaacacgaatacggtcagagatagcctcgacctgaatataagagtcaaccgacatcagtacgccacaaaagccgctatctggaacatacgcagccgccactctcatctgttttagggggataaagtgcatactcaggccctaatgcattggtatacgagaagccccaatgacaactcatgcattgaggccttgcgtacggtccgacgctacttaacagcaagtgtggaaattcggcaatgaggtcaacccctgccctggtaccgaacaaacagagcaacattcaaggactcgtctggtgttctttgcgttcgcagaagacgaaataccacattggcaggattctatggagtgcacagattgaactacaatgtacactagtcggcgacttgtgcttttctggtagaggatggatagagtagaggaggcaggtaggtggcctggcccaatctacttcgtagaatagtagctgaggcttgagtcccgtgagacgaataaatggtcatcgcttgaggccataccttagcgtgccaagaggagcaactaagggcaatacctcccccatgcaggagttgaagccttcaggctcccatgatctgcttgcgtagtggtctcggtctcgatattattgggcccagcaggagacacatcacaaaagatatcacatccgattctccgagtcacatcaccaacatttatgatttcatgcaggcgactctgacgcagaacgacaaacgaggaatcttggccgcaatagcgcgcactataattgaagatgaaggagggatattgtggcggtgtcaataatcggctttgttccgcctgaaattttccggtcacttttcgcctcaaataggcttattcggtacctagggatatggaaagagatccggactttcttttgactccggcgaacagggcgtgccgggcagagccattgagtccctcgtcaggtggtgcggttgatgcggtagcattagcccatgccttgagactcgcgaatttgaccgaatatcgaataaatcagccgatcaagcctcaagagtgagaactccgacctggcacgcacagcagcaggataaattaggttgcataagtcgaggatcaaccgagtactttttgcttttcgtgacccactgtggcccatttgactagactatcactcgaaagagatggagaacgggagaaagaaaggacagacttcctggaaaacaataattcagtcacctgcaaggcgaggacagatctattatccaagatactgaaggggtgctgtggagaccagcttgggtattaaccgtcgacaccggacgggctttgttgacttaattcggcggacgcttaccggagtcactaggcaagtcacttctggtccacatttggccgttgcaaaggcatttgttggtaggttatggaccgtcatgcgtgttgttactgcacatgttttaggcaattatcgaaccatgttcacttgtgagaactggtagaaagtagactatttacggtccgagccggatccgacgcggctgtatttcgataataggagaaagacggtaaactatcgcccattaagtgaacgttgcagtatctagagtctgaagaatcttgaaaggtagccgcagaatctggtactggtcacatactcaccgacttcttcaaagtttgcaacttatgtcaatcacgcaaggtatggcctgctgggctccatctcggggcaaaaaccagatccgttgaacagacgttctatttttgaacttcctgccgagtgtcacaaccggattgggcaagtaccgtcgagatcttgcaagggctcaatgtatcccagtatggtggatcttattgatggccttattccctttcagtaatcaccgatgtataggaactatgagtgaagccgccatcgcttcctgcataaaatcttacgcaactgaccaaatatggagcggtcccaccgtctgccatggaagcagtcgccaatgtacgtcaaccgtctgttgttaccataagacgttatcaggagcatgatgtgagagtggtatggttgcacagcgcggcggaaaccacgttatgagacgacatcctctgttgcatctccgccataccaccagtgtaggtaggctatagccgttgtgggatgatgccagtcttcgtgcaaggtcctgaaagtgtgcctagcgagcgattgggtatgctcgctgaagagatggacgttatacagtgtaggctcagcggaaaggagagcaataattgaatcccttctttgccgtccacagtgtgagatcatagaaaaaaagccctctgcatattgagcggtccacttttggtccctaccagccagcacttcatcctgtacaggaggctgtctgcaagtatacttgttttggggagacgcagcgcaatcattagagagcttggaggagccctgtttggactgaattcaatgaggcgatagacgatgcccgtttaggagtcaagtcatgaatctgccctagtttactatccctgctgtactccgtgaaatttcggggtgacgttgtatttgcaaaacaaggcagcatcgcccacggtctccagatggccgaaccttcaagagcttcgtagggttccctggtgttagactgacagaccacgaaccattgcaggtcgtacaaaaacggcgagcccggcgtacgctaagacttggaaaacacgaataggtgtcggctattgctattctgagagatgagatctcacagcactgcaacggtggcccgccagtgccggggccatgattccctggctaggacacagaggaatatgttacagagctgtctgtggtctgctggacaagaccctttcggaagatttcgtcctggcgatggaaccggaagatttggatgggtgctaccgggttgtcggcccccgccagtcaatgaagatagatgccaggaacggtgaatttcgtcgtctttgtgagaaaaccgactgcccggatggcgttcagaggagctagcgaggatggccaagcggctgacggtgtgacgagcaagcagcgacggacgaaccgcagaaaaagaaagaagatcgacgaaattgtccggtacaatggagatggtgtggtccaagactgtcagttgtcagttgttagttgtcattcagttgtcactgtgcagatgaggaaactcaagatgagctggggaatcgtggatagagcgctattagaagctagtcccggtttggacactgcacgggatccgctaaaccgcttgtgggaaaagcgacttcgtcctgggccatccttggtcgccaactcctcgccaaaagtccttccagctttatcgcaccatctctttcggaattgcaactaatcatgatcaatgacaatatttacaacaattgtacgatgataccagctgtggagcttctgcctctctagctaaacgcgcctgaagtgatatcctgctccagttgtctgggtgacacagcagctgtgttgatcgagttaccgggctaggctgactctgggcatttggatggtctcgcaggaacctcgaatatgtagagctcactccggtcacatcttcctgcgcctctcgctgcatcaccgtcactgtcactcgcctcttccatgtcatcttcagcttcaaccctaacatcatccactgtcatccgccatccacccgcccctttacctgttcaggttacgacgagcttagcgtgcgacgctattgacccttttgaggcctatactgcagatcatcgtgttggcgttggccccatctccaaattgcatgaaccgcgccgttctctaggcccctctcgatgagcacctagactcgccgtagggtcaatgcccgccgtcatgccgcccactcgagtggccaccgatcgcatagcgctgacaaggagagccatcccgagccccttactgtggtcaccgcgtgagggatgtcgcacaagactcaagttcccattgctcacatttgggtacactgttttctcgctgctgcgtctaatgataggctggctggctgcctagtgctggtgcttcgatcattggacagcagcaattggtttcctagatagtttctgagaatcaaggcttccccccctttttcgttgctttttctttctttttctcttcctttttctagcttgccatcacctgcgattggcccggttcgccaggcaatggccaatagtagagctcacatgccctataggaaattcccgaggtcagatgttgacgcgccagagctttcatcgctcactggtcaggatgggcccactggggtccagcggttgatttacatgcaatcatgatcgtcaacgctctgcgaacgatcgcggataagaaaacctggtatgaacgactttcctccgcggacgccgcgtcgattttagactcatatttccgctttcccctttgacactatacttgagccgttgccttggctgaaccgagcgacggagaattctcgtcaatgctggcagacagtccaaagctcaggtgatcaagctcgaagactcgttccaccttgccgcagactgcagtagctgcagccacactggagtaacgagatgtcactttgatactcaggttcttcagtttacctcgctagctccatttctcaacaatcgttgctgcgggacaatatcacaataagcgccgaggttagggttcgtcttgacctcgccgccacgcttcggaatcggactccgtctggagctgtgctggtcaaaccgaccggccatagcgaaggtgatattcaaggttggctttaaacattgaaagtctaaaggtatcattttctagcatgaatgcccatgcgggctgcctctgatgccaccaagcgaaggaccagtaactgcaacatctgcacggtcgaggtgtgaatctcatgggtggggtcggtctgcaatgcatgggaaccagggctgctgcggagaatgcggcgtgccacaggcattccagacgatcgattgcttggcccgctgagctggcgtcagttgtcgacccgacttttgaccgttcaagcgtgcactgaactttgctcgagtcagcgagagttcagatgcacgagtgtccagccggaaggtgatcccgttttctctatgacattttgagaacccacggtgaaaccatcgctctggtagcttcctggcctcccgagttaacgaatacccaacgtactgcaatgtaccggtacgccgacgtcacggggtaggcgacatcaccagtgatgaccagttgcctttccttcttccgaactccctgctgtttctttgcaaattctcgctgttcgttcatatttccttcaaggatggggtagcccgcgatgcgggaacgccagatgtaggccgtagcgctcattgccgggcgtaccgtgcgcaccagaatagcagaacaagatttaccacagaacgggagagctagagagtggaagctatcggggccagtcagttctcaatatttaggcacagaccgactccatggatgggcgtcgcccatccgagcttccacgttccgctccactaatgattcaggtgcgaaattctcctaaagtcctaagtctcctagttcagaagatgggcaatcgctagtttgtcttggggccctggaaccgtctgtcttggtaaatccccgacgcgtacagaaagccgagtcgcgtggacatgcgccgcgcccgtcccgtagggggggatggatcatggatgtgcatcttattcaggaagatgtacggaatattaattcattatcgcaattagcctattagctgacggtactatagatgtagacaagctcaactgggaaggacgttatgcctcgaagtgatggactattggcgctacagtgtcgatcgtgggcagtgtcgaataagacgatccgccctcattccgttttggcggcctagtgccttggccccttggggcctcttcaaggagtctgacagctgtgggcgctctagtcgtagatcttagggaataatcactggtacagtttctgtaatatctagcataaccacttcaaagtaatgagtcctgagttgataggcccgcccgggaaccattcggtgagggaactggaaggttgatgtggtccccattgagctctggacgttggaggatgcactattcttctccttacccacactcctactcctttcaacctcccacccactactcaaagtacgcaccccctccctcccacctggttatcgccagcaggatcgacgcaatggagatctcctctatcgggtgatagtccaggcgtgagcactggccatcccgttctccattgtctctacttcagtctgcaaaaggaactataaccttgcccgaacctgcagcagacgctgccttgtctgccagtacgaccgcaggagaatatctctcgcatccggcatcgagaatttattatttttttttttttcttctttcgattctcctgctcgtctctctcaagaacccgacgctagagcaaattctcctattccttgttcttggacgctttcctatttctccggccttcctgggtgttacggccccgaccctgtctgttgacgtacggactattactggcgcctcactttgtatagcccgcccttaccgtcaccggagaaatacctgcaagccccaagaaaggaaagggaagaaaaataagaagggacaaaaaagggaaaaaaggaaaaaaggaagggaaaaatacgggttcgcaggtaagatacgggtgttattgctttttgt

SEQ ID NO: 3733 - DNA, 2623 bp, Emericella nidulans
aaggtgttttattcaccgtactcgtgggcaaagaaacaggagaagaagaaacagaaacgcatcaaggagacacacgccaagcttcgtgatttacaaattcttatggacttcccctgggaaagtgagagggctggcatggttgaaaagaggatctttgagtcgctgcccaagagtgtgaagctcatcaagttggagcatattagcgcccaccatactttgcaccgtctggagttgtgggctaggacacatctaattcaccatcacgctactgaaacttcgtggggatgcggcgagtaatctaggtttagagagtgtgaaccgaatggccactactagagtcgaccgtccgagtatttctccagaaagccagggcaagccagagctccattttagggtgacctatctctctcgtcgcgccttcgaatcttcttgcggactaccatcccgacggacgacggattcatttttatattactttcgctattcgtggattgttcgtctttcggatgttaggttgactggttgattagtgacgtgatattaatgaacacgcaaggaatgtttccgggttaatccacacattatactctaagatgaatctagtaagcatgactaaagatgtagctcgaagaatgttttcgctgtacctacagtcacctagcaacctgcggaatttgcagaatctgtttagggggtacggttcgtagaccactatcactaccagggtatattaggctctgaatatgaaaaccgccgaacgacatctttagctaccatccgacatataaaatgataggaatggtttgagtctattcacagcctcttcagatatacaaagttaacggtctcctgttccaaaaaatcttcaaattcccatacattccacatcatttatactcccccccttgctgatcatagatataccgtgtagcgtggacgttagctcctatgtggcccccaaggtttaaatactggggaagaataccgggctaggataaaatgtttcgtttatctttggctttgtcttataccttacttgctcactggccgttgtctgattaaggctcaatcccaaggatggcatatgacacctagagagatttgagaactagccacatcgctatgtgcatctgattctctgtctgtctcttcagtgtggtgaaaaccagagggcaatctgtgaacagagcaattctgaggacggtgatgagtcaatcaaacaaagcctagtcttactgcacaaagcaagagcacttcaattaatgcctgaacagcgttatatggcttcgaggttactccttagggcagtgcaagtctttgtccgatcctgcttatatagcctgccagcaggtctagaatcgtctatcacctgcggttactactctttccaactaccagcttccacatgaactcattcagatcttcaaaaataagaatgccctgcactactccatcaacaatgtgcccctcctgcgtggctacactgctctccattcatcacaaatacccggagtctataatcagacccatgacagcgtccatttacccagtctcatttcgagcagttttcctagagtccgaggtaccgtttgacttctcactcagaatatcagacaccatcgaagatacagtcttcgaagcctttgccgtgcgtgttccagtccttgcttacagcaattttgagtctcgaccccgggctggtagcaagatatgggtctctatcttacttgagcttcccggctgggatgagaggctgactgagacaatcattcaagctgttgctaagggtttggagggttggcagtgtctttcacctcgggctgatgagtgtcacgggacattctggttaaggtggcatgagaatcctatggggatgtagtgctataatgatgtataatctgcttgctctagagctagttgataaatatagttaggaatcactctgctactttcttattttaaatcggtatacggagatgacaccactaggtggagcaacttttagtttccgttattagctaagttattgagcatcagattatatatggccttacttaggctaggcagctttggttcgtattgtcccaggctcgtatagggtatagacttgaggaagaggtgtcgctcccgtgggtggagcggcaaatgtcccaccatgggtttatagcgggatattaaaagtcagcactttaattgttggatggcttgctttccccgacacatcaatggactaaagaacagtttaccgtattatttttgagtcccatgtttacttctcggatgcccaagagctcatcgctggttccacaatagtcttgtgagacgctttcatcaaaaaaccggaagggccgtatgtttcagggcctaggagtcgaggacatcgaagacatggaggttgtcgagcacactttggcactgtattttgggcatggcgcatccaggcattttggccctgacttcgagctcggttccttcctgcttaggtatgggcctaatccatctataagcccttttcactatcagccgcttctaatcacggtttccagttgagacgcaggaggtacttgcgtcttgaagatggcaatcaccgatgtaatactaaatactggctactatgtttgct

SEQ ID NO: 3734 - DNA, 8603 bp, Emericella nidulans
gatgggagtatcttttatgaggacatcgctgggtttcaatgcttttgatgccaccttcctccagctattgagcttcttctggctacagcggtctgtctacagatgagctgagtacgctgtgtggatgccgccagtgacaattgtcttaatgttcaaatagtcgtcaatgccgtacttgcttccttcgcggcccataccagaatgcttgactccaccaaacctgctaggcgttagtttcatactgtgagaacgggaactgggacatacggggcagcagagtcggaaataaccccggtgttgatggctaccatgccgaactccagcttttctgagacccgatgcgctttacccaggtcactggtgattaagtacgatgccagaccaacctcgacgccgttcgcacgacgaacaacctcatcctctgccttgaacttggacagcgctgcgaggggcccgaatgtctcttcgctagcaaccttcatggaatcgtcgacgtcgccgaggatggtaagttcgtggaagttcttgccaagggacggcaggcggctgccaccaagtaacacagtagcccccttgttaagagcgtcttgaatgtgttcctgcgtcttcgcgatgccgttggtcaagggtccgtgtgtcactccaggatctagtccatggccaacctggcactttttcacctcctcgacgaagcgcttactgaaggcctcgtagatgccctcctgtacataaaacctgttcgcgcacacgcaagtctgcccagtcaccttgaacttacaagcaacggcacttgttacggcagtctcgaggtcagcgtcatcgaacacgataaacggcgcattccctccaagctccaagctcaacttcttcagcgtatgacttgactgcttcatcagcaacttgccgactcgtgttgacccagtaaacgaaatcttcttcacattatccgactcgcacagcgccacgcctaacgccggcgtattctcaagggcagtcaccacattgaacacaccacccggcacacctgccctctctgcaagcagcgccaaaacattcgacgagtacggcgtcagtccatccgacttcaagaccactgtacacccggccgccaaagcagcagcaacctttctcgcccccatcgccataggaaaattccacggcgtaatcaatccacacacaccaaccggctccttgaggacctgcacccgactgctcgggttactatgcggaacgacatcgccataaatcctcgctgcctcttcagagaaccactcaaagaaccccgcagaaaacagtgcctcgccctccgcatcgcccttcgctttcccattctccgcggtaatgattttcccaatatcctctttgttctcgacaatcagatcgaaccatcggcgaaggatcctgccgcgctgtctgcccgagagagcgcgccattttgggaatgccgttgcggcggcgcgaatggctgagttgatatcgtcgatattagactcgggacaggtcccgatgaattcttcagtagcagggtcgtagacgttgaaggttctggacgaggacgaagttacccatttcccatcaatgtaggaactttcgatgaatagggtggggtctttcagggtgtttgcgagggagggcattttgagaaggtggttggtaggtctatggcgtgtcgtggtagggcagcctatgtctcgataatctgtagaagctgaaaacccattatgaatgcacgacctttctgtacagaagcttatcttttaaactgtttccaagcatctgtgccacttttcccgacccagtagctcgtcaaccttccgagatagctcgcatcgtaactggttgctgtagcgcgtatctcgggattcatagccttctcggatctgaaccgatctacccgggtctaagcgcccaaccaccctacacatattaagtgatggagcagtagggcttactgtgtagactagggaagttggaacaatgacattgaaatgcttgttgagttgtacagtaatgattagcggggctgtaggcgtaagtagcgattgtgggcaaagcatagttatcaagctatgttcatgttcagtatgcgacagtccctttcatatctatctcggttgtgtacagagaacatggcttcaaatgtccactcgatcattctaaacctcagaatcgcctttctgctttttttccccctccaccaccctccgcagctaactcattcataaaccgactcctagcacgcacctccctcccccaaacaaacatcaacgttggaacaagggcaagcaccagcgacacgaacgccagcagagtactagcccactgaaacccaagattattatacatactcatagtcgcgagcggcaagaacgcagagaagatattctcgccggtggcgacggctccaatcgcgctgcccgcgtactggctgtaggcgtctacaacgtagtcagatacacccgttacgacgagtacgctaccggcgccgaccatggccaagctgattgccggtgcaatccatgggatgaaggggtacgatgtccaagcgtatgtgaacattcccccagagatgccgaagaggccgcctagaacagccatgtagagtcttgcttctgggatgaggctattgggaacctccgtattgcgggaagcagatgcaaagtagagttcacgggagaggaaggagaagaagaagcctattccttcgccgatgacgacggcggcttggacgtagcctgttttggagatggtccagtcgtaagtgccaatgaagacttgttcgacggattgggtgaagaggaagatggttcctacagtgaaggcagaccagagggttgagacgaagaggacgggctcggtacagaaaaggatgactggtcttgttgagctgacggcgagattctgaaggtttagcttggaatgtgcggggtgtccgggtaggatgtctttgccgtttttgcccatttttcggtctcgttgtgccaggataatgtcgccgcgggactcgtagaagaagaagtagtagatcgggaacagagctccaaaccaaatgagctgcatgtagcctatccaccgccatgacaaggactggagaacggcggctccaataaccggacccatactgctaccggccatgtagccgaagatatacaggctgactgggattgatctcgaccactcagtatcccatacattcccaataaccccagcagccgtattagccaagatggcgacacaagcaccggcaaagaaacgggtggcaaccaatgtggcgaaattctgagcgactgcttgcgggatgaggaagcagacaaacgcgaagtatgtgacgaggaagacaggccgagtcccaaagtcctctgccagaggaaggaggaacagagcagagaatgcaccgccgacggccatgttgtaactggccagtatgtatgaggaaatgccgtctcgtcaatattgaaaagttctgcgatctcaaagtgcgcaaccgtgatgatagtcccgttcatcatagtcagaaagctgatcagcgcggcgagatatgtcacggcccattttcgcgaaatcgaccagttgaaagggtttgcaggatcgtggtcgccgtcccaagacagtgtatggatgtctctgccagttccagacgaggctgagtgtcgtggctgacattccgaacctgtcatttcaagcagtcaatacggaatgctcttgcttggcgaagcgtaccgtacgtagtgtagacacaagggaaagaatggatgccatcgaatttatccttgccttctgggtctccaggccgatcgaagatcatctgaggctgatgagcctcatctctccagatattgccttctttgggagcagaggatcaacacctgggcaatggaaggtggaactgcgtttctattatgtcaatttatttgcgaacaccaacgccagccttggaacacttcagcaagtcttggccacctgggaaactgtatactcggtagtgtgccaagtatttagactaatatcaagcttcagttctcaagagcttgacgcctgccttatactctgatcatcgccacaattttggattgggtgcaactttgcaacagccaagactcacgtcaagctcgagggcctgatccatttctaaacccaactcaatggacggtggaagtacctgcgatattgaaccataccaggtgcaacttctaagggataatagagggaatgggcgaggtttggtttggttttgttatttaacgtcactcggcggatcacggggcccacgtgatctgcggcctcccagggggcatctggacgtgttgcctaaacagaactccctaaaaaactagctaggtacaggtttgaagcagcaactatggacaatatatgttggaaatgagcggaagaagcatccggcgctaccctggccaggtcttctgggggcagatgcccgttttgactacctatagacgggggaaggggccgtaccctgtatccaggtagatgtgtggactgttgcgctatcaagcgccagggggggaatgggcgaggttcacagccggcccgcttgcgctcgcatattaggtcacgtgtgtgtgtcgtcaattttttcccagtgtagagttcccacattcaaggcctcgcgatctcattgttaaggattaatggaaggattaaattatatgcgacgcttactagctgggactgggagtgtaccctgacaaggtcgcttcctgcgtattctgctgtgggacttttttttttagtcctccagtgttggagaggtaacaggtagttttgttggccctgagattcaggcatttggacggggatgaagagcctaatgcatatactgagaaccagcctcgccaaggtaccgctcattccacctccaaaatctcctgcctcatcgactccaaaaccttcaactgcctccccaagagccccccttgtcctccatgatcaaagatcctctccgcaatgcgctgctcggttccttcttcagttgatggcgtatcactcccccgattatttggagcatatacatcgtatcctgcctatacaattcaaccaggtcactgaatccgcgcacaccgactagctttctcgtctttgatcagcgctgtttcccgccgccatgtcggtgcagatggaaagcatggccacgcaaacgaacgtgaagctgtcgtagtgctaggtgatggtggggtgtcctctgacgcatggttggttggtttggcttgttctgtgcttgagttcacgtactggttctggttgagacgctgatgttggcatttcaaagacaataaacaggacaagatcgatgcctgcaacttttaggtcctagctttctgggcgagcgggaatggttcagtgactgcgtgagcggaacgccacgcccatttagcccggtttggcccattgtatatggattgtttttggaaattagatattggaagttcaggtgcatgcagggattgaaggcttcccgctgtgcagcctttgcaccgtggattaagtgttggggagctccccaaaaggcctcgagactttcttggttgctggtccggtgatgattgggtgttttacattagtaaagcttgctgaaggggccatcttgccttggtgtttaatgggatgaaaatccttgaggtcaggaagtgttggctgttgatttcagtctacggatttctatataacttgaaggtgagtattgaacgacaaagctgaatattacgactcaataggtgccactttccaagggcccctctgcaatggctgtgactgatttctctgaggttgccatggaagggatattatgaggccagaagcgatctgcctaaaacggcggtgatcccgattgatagttctctaggatcaacatgagcctttcggttagggatgctcggggatttgttctcgggttgaccaagcgtattctgcttgggctcgggtcctccatccgaagccgacgtacatcggccacatcgagcgagcgctcggaaacccgtgctcttactcccaagcaaacctgatcttaccaaccagtgggctataagtctgacttgacttgcccaccgccaactagcaatggtatcctttcatatctggcctatctcttacatcaagccatccagatgacaactttcgacttgaacgacgtcgcgacggctctccgcacagcccgtgctgaagtgaggcctatcgacgcacctacgaagacctggcctagtcttaacgcggacatggcattcaaagttcagcaaatcaactccgggcaggccatacagaacggtgaccgactcgtgggatacaagcttggcaacatcgcaaaggtcatgcaggcggcgtttggcctagaccaccccgactatggctttttgcacgcaagcaccttcatgtacgagggcacgacgatctccctaaacagattcatcaaaccgtttgtcgaactcgagcccgcatttgtgctgcggagttctctgaagggccctaacgtcacagttgcggacgttattagtgccattgactatgccattcctgcaattgagatcatcgactcgcgcgtcaaaggttgggagattgatcttccggatacattagccgataatgggtcaacgggtgcggtcatcataggcggaacgcctcgaaagctcacggatctcacactcagcaatacacggggtttcttgaagttcaacggcgaggaggtgatgtcaggaaacacgaagaatatcctgggcaatcccctgtcggctgtcgcgtggttggtaaacaaactggcggagtatgatatcgagttcaaggccgggcaactcatcatgccggggagctgcttggaggccgttcagatggacaagcctggaaaatggacatgcacctatgaaaactggggtacgattgagtttgatgtattataatatcctgctctgaacagtcagtacaaataatatctcagtttctgtggtatcgaattcggcatatgctccgagtcatggtgaaatatggatgtcgatcctatgtcgagacaagtcccgtgccaaatggcgtctacagcctgtctagcgaaatggaatccatcattcacagcgtgatccttgttggcagcgctgaatcggagagtcaaaagcaaagcaattgccggaagatctcgaggatcgtggattgatgataaataaccatgaagtaaaggagcgactccaatctgactcgcgccgttgctcgcgcagttgtgggacgaattctgggctgggaaatgagagctcgtgcaaatgaagccttgttatccatacaaaagccatgacagcgtctccactgctaagatccgtacctggctagcccatcgggcccaccatcctggagagccaccagcctccaggggccgtcattaatttataagccgttggcgagatggagaacggagtaataagatgtctttgttcttggatttgcaggtcgctttgttgccaacttgccttaacttggcagctgagcgctgctaacggggacttggactagactgactcgtttctgggcgagtgtgggtttgttgtggccgggcctcggaagaaatcgagccagcaaacttaaagtagctctcatggacaacttgtgcttcagctgggctcttagaaatcgcttcccccttaaggctggatgaccgccggtctcctgagttctgaacgagatgcactgttggcgggttacaaatctccgggacgtcatctgcagaattgattatttatccttcaggcttgtcgaaataaggcaaggcccatctgagacgggggggcgaccgtagtctgagtaataatgccgaaccaagtttaatgcggccaaatagtgtctacattagcttctccatcttgccgcgctccatccatctcctggtccctttccctacttagccgtcggattaacgctcgttaatccgggctcaaacagtcaattggcccccaggatatgattatgctgtggcaaagctgggtaatatccattgtatgacagtaatagtactaagctcctgcaagttgtgccccgtcaacattgtacgaggccaggaggctcagtagagagcactcgggtccggaatagacggtgacgaatattcaaaacctgtcctaaaaagactactccaaactccgtagtgaaggtacagtagttttgaactctacatgataattataggtaccgctgcgataattgtcctgtgagtggctaacgggaggattccctgctccctacactttcgacgactttcatccgcattttaactctccgcttgctgcaccgtctctcccgggcttcccctgagttctgtctaagcgtctctcctctcgtctctggcgctttttctttcttaaagaaaaccaccaacagtgcgtaccacgaaactctgatctgtttcgcagttcgctcgctcggtggcagccgctcgctcgctccacccgaccaatcaatccgcccccctcactccgagccccttccaacactctcttccccttcctctctgacttactctactctgctcccgacacgacagaccaacctcgccatcctctcttgaatccccctcctcccccctcgccgtctgctgcatcctacgacgcgcctcgttc

SEQ ID NO: 3735 - DNA, 1115 bp, Emericella nidulans
ctactaggatcatgctacctaaggtggtccagataaaccagatgtatttacgctgtagataaacatatgagagccgagcttgttggagtatatcagagcacatgtatacgggaaacaagcagcgggacggaacaatgagaccggaacgcaatactacagagacgatcgcatcattgctgcttcatttaatagaagggattttaacgtctcctctgtcatgcgcattgcgcagtgaagttgcccgattgacactgatgaggaacacatctatctgaccttagccattattagagataaccgaggggaggttcaggctgtcggttcgtcattctttcatctacgcaactccggtttccaagcagcagcctctctccctctcatctctctcttttacccgcttatgctcagccgctatcttcgttattgtcaactttcttttctcagaacgcctcaaacctcccgccctgcgatgtatcttcctacagcttgctcgctttattgactattgatcgcactatgactcgtgacacttaccttaagcgctctcttggaacgcaagccaaccgtatcagagaggtacttgattcccatagccagcgagctgttggcttcaatgtttcgaactctgtccttttgagattattggcaaagttttggcattttatgctttgcgacagttttgctaacactgagattcttatctagtcacgagtccttctcgtcggcgctggaggaattggctgcgagctcctcaagaacctcctgcttactgggttcggtgaaatacacgtcattgacctcgacaccattgacctgagcaacttgaaccgtcaatttctcttccgccacgaacacattaagaagccgaaagctatagtacgttgctgttcccgagcgcgtgtcgtcatccctcccttgccgagtatcgcgctcttgtcaaatactgcgtttacgaaactgtctgaccgatgggtatgctgttaggtcgcaaaggaagttgcgcaaaagtttcagcctagcgcgaggattgaggcttaccatgccaacatcaaggacagcaaattcgacgtggactggtttgcgactttcaatgtcgtcttcaatgcgcttgacaa

SEQ ID NO: 3736 - DNA, 1139 bp, Emericella nidulans
ccctttgaagggtatctcgccgaaaccttcttgggcttaaggtcttctccaaccaactttcttgttcagcaagttgctcggcaacagctcgcgaacgccgttggatgacagcatcatgtccctggtcccgtgatgaaaccttgctgtcggtcattgtgtaaatcgagtgaggaaatgaagatgatcgttgttttccttcatcgggccgggaacatggctctatttctaccccggaaccgtatcccacggggaaaccccggtcttctccaaagttcgggcaactgctacgagtgcgagactttccccaaaatcctccacaattcctgcccctctgatctcctgaagttttcatccagcgaagttcgccaattaccattgtgggctgtcaagcccataggaggactggccaatcggaacggcggaaagtgcttgtatggcccatgttgttccggttccgtgcccactcggttccggcgggtgtcttgcaggcacgcaatccgccggcacactccccacacggaaccgaaagccctaactataaacgtccggcaatttcacgattatatgcggtgttgcgaacatacatcctcacaacatgactatcccattatacgaccaggttcgtttgccagataagatgatttcattcttcagctgctaagtcatcaggctgtaaatgaggcctttgtcctctatcccggaggctccttcggctatgaaaaacgggatataccaactctacaggcagaacgcgatgtgctcgttcgcgtggtagcgactggactctgtggatcagatgtgagttgttgcttgcgtgattctcagcttggctaattcttggccaggtacactactggcaacatggacggatcggacgatatgtcgtcgaggaccccattgtccttggtcatgagtcttcaggcattgtagtgcaatgtggaagccaatcgggattgacggtgggcgatcgcgtcgtgctcgaaccaggtatcgcctgcaacacttgccatttttgccgcgccggtcgctacaacctctgccgggaaatgcgttcgcagcaactccgccatacaacggcactctggcgacgtattacagagtacccgcagaatgctgctacaagctgccgtcacatgtat

SEQ ID NO: 3737 - DNA, 3302 bp, Emericella nidulans
  unsure (1)..(3302): unsure at all n locations
ctatctcgctcgcgcgcgcgatccttgaagcgtcaaaagagcctctgacattacatcgcgtgcctccgaactttcttgtgggacccggtgctacggactatgcgtatgaactagggcttgtagtcctcccccacgatgggctgatatcaactccagcaagacagaggtggttgcaatggcaaagggagctcaaagaagctgatagccgacaaagggctcggtcacaaggctcgaacgaaatcgacaatgcctattaccgtcgtgcagttaggggtcatccgactcagttgcccgcgagcccttccagcacacaatcaacatcaacaagctccgttagccctcatgtggactcgaatcacgctagtgcaataaatacatcaagcggcatgcagttagcatcagacaaccaggccccaactggcataaaaaaggctaaaagtgacacctcaagcggtggcatgtctccaattcgatcgagcctcaattcgtttagaaatacaatcttgcagcctaatccgctgagggccggcatgcacgcagggcagatggatgtcgattcatcgtctcttccatcccatggccgcgatggatcacactccgactttttcggctgcacagaggatcgtgtcagtgataccgtgggcgctatagctgtggacagctttgggcacatcgcagcaggttcttcctctggtgggattggaatgaagcacaagggtagaatcggtcctgcggctcttaacggaattggcaccagtgtcatccccgtcgacccgaatgaccctgagaagacctgcgttgcgagtgtcacttcgggcactggggagcacatcgctaccaccttagccgcaagcacctgtgcttcgcgggtctattatagtcatcgaaaacgttccgacggtacctttgaagaagtactcgaggacgaagccatgggagcaatgatcgcagcagattttatgggtaatcagacttgtgtcctttatttttcgaatgctaaattttatgttttttaggccatccgggtgtaaaagccagccattgtgagggctctgttgggatcatgactgtcaagcggacggtagacgggatatatctatacttcgcacacaacaccgactctttcgtacgtctttgactttctatgttaccatggcccttcctgactgtagtgactcttangtccttgcaaatatgaccagctgagataagaaaccggcttctgtcatgtctcgaagtaatgggaacggaagcatcgcgcaaggtggaaaggccttccgggttaagaaacttgcatgaacccagggacaaaagtctttgacgcattcaggacatgtcatcgatcctagatcctagacaccgctagcctatcttacgtttgcctggaccttctcctaaacgacctattcttgtgaatacccatgtctttctgatagcggtttgcatctgtggtccctacaaatgcttgtactcatttgtacaatgctctgctgttgctgctatattataattcgtcgcttggcgcctttgcatatgtttcattgagacatgctagttgtgattcggttttgctgtgtatgctgagccaaattatttatattgttcatctgatccagatttcatcatacattattccatcagtggcacggctataaatgtagggtgactgaacatcggcgttatatttgcacttgatcagctgtccagaccaaaattctggtttcaagttctcatatattcaataactcgtagaccaatccttgatgcggtataccaggtcttgccgtcatcgtcataagccagtaatggtccgtcttatactgagctcccaacagattgggtgctatatgtgccaaccctccaggcgttggtttgtggaggtcacccagagtatagtatagtattcgtttgcaattgctgatctcgagtgagtcgtctccaattaggtatattaaaggattattccagtttgtgagtggaacctcgccccccgccccctcccttttttccttttccattcggaagcctttaagctgcaacttccatgatgataactcggagtatcactgggagcccaaaaaaatagtcaccttcgacgccaggatgaatcaaggccccggcgtcggtgtcggcgtaggcgtagcagagaccccatttggtctaatcttcttcttcttctttttccttaccacaaccgccggcttcgcgccgtagtcacccgtatccagatgcttgttgtaagcggagcccctggatctcttggattttatcagaagatacttaggcagatcgagcaaactatttctatttcacaaggtgtctttggcataacacccggcccgggattttacatttactcgtgtcggaaggattaggtgtttgcgagaccgttggtccgggaggaatgccatcattagatactgcagtaaaccgcggggttcggaaagggacatgtagattccctttgttgcatcggaggcttgttgtaggaagacggcgtcgccactgagtttgcagacatcgatggggatgtgcaggcgttggcaggcgaagatgccgttcatgattgggatgtattggtgcgcggagccggtcgcgctactgacggagatgatgaggatacgagactgtagaccctcggcggcaccgtcgtttgtcgccgttgtggttgtggagcgtcgggctatcatggacgttgtgcttgtatctgggtcaccagagcgcgagaaggaggaggcatcgccgcctccgtgagcttcagcccaggcaattgtgcgacggttgatgtggctaagagctaaagtaagtgcgccggccatcattgttgaggcgccactgtctaggtcatcacggttggtggagtctaccaggtgtcggagattggatgtcacttgctcctcgacgattcgaaacgggcggtatttgtttacttggctgggtttaccgctaccaccaccggtgctcatatggttattattgctcattgtaacgtcgccgtctgagtctgcggatgtcgttggtgagtttggggacggatagagccatgcggctttgtgagtgtgggaggcgacaacggcgacttcgtttgcgtagttacaggcgagatgggcgttgaggaagacgagaatgttggcgagcgcggttgagaagggaagctgattcttctcattttgctcaagtaacgcccaagcatgaggatttgtgtcaatgatgactgttagtaaggaaagtgcagggtctagagtcaattcgtcatcagagaacgttcgtgaggttgtaggttgcgggaaatggttctgccg

SEQ ID NO: 3738 - DNA, 9081 bp, Emericella nidulans
actttccttgtctcccaatactatctattcactctcaagagaacgttattgtcgtatcgtatatgaatcagtttgcacacgcttctgcgggccgaaatattagccttacccttactagccgccacgttgactatacttgaccacttcggattctggactgttcgcatgctccgtcttgggttctcgccgacatggggctgcgatggctaagctgccctcatatatggttgctatggatattgttcgcctcatgttcctacgcgttctacttgccgggttcgtcatctcgtcctatactacgtagtcacatactgatttgttccgttttgagcaggatactcagtcaagcgatacaacgacgatgaatcgattcccctcctcgtaaacaagatcttctcggaccacacacaacttcaatacgcttacttcgacctacccttcgtatgcccccccagcggacggacacatggcggatcaccatttggtgctggacaaagcgtctcgcagaacttgggtgagatcttgcgcggtgaccgaatcatgacctcggactttgagcttcatatgggcaaaaacgtggaatgccaggcattgtgcacggcggaggtcgggcgcaaggacgtgaaatggggccgacagcttatcagggaaggatatgtcgtagaatggatcgccgacaacttgcctggggcaacaagtttcgtgactgtggaccgacgccgaaaatattatgcatctgggtttaagctcggctaccaagagttctctcctattgatgggaagcagcgttactacataaacaaccatttcaccatcgttatccgctggcgctcggcaccagaaggtggtaaagtcgttgtggggttcgaagtatttccgaagagtattcgtgcccaggatcatggagcggatgggtgccctgaacacgtccacgaagagcacgaaggtctggagttatacataccgccaaacctggaacatctccgccagaagtacccgggctcgtcatacctcccggaagatgatgactatgatgacggagctactctgaagatcccaatcacatactcggtatatttcaaagaggacaactcaattgaatggtcaaaccggtgggatctttactttagcaaacaagatgacagttcaatgacgcactggctggctgttctcaactcgttgaccatttccggtgtcctcggtgttgcggtgtatgtcatctggacaagaaccatccagggagacataaaaggccgaggtgatggggcgatggatgatcgaaaggtgaggaaagcagggaaggcagagggtctgttagaccagacctcggacgtcgaaagagaggcagatattgattctgatgacgatggcatggatgatgtgagcggctggaagctcctacatgccgacgtgtttcgggtaccgaatttcagcggtcttcttgcgccgttggttggatcgggaatgcagcttttgttcatgacctccggattgctgcttctcagctgcttgggtatcctgaacccgagctaccggggtggctttgttagtgttggtactggactgtttgtcttcgccggcgtgttttctggttacttctctggaagcctgtacaagacattcggtgggaagagctggcgcaaaaatatgttgatagtgggtaccatagttcccccggtctctgttccctgcttacgtacgattagacagctcttctcttccctggacttatattctgcctcgtcttcatcctcaatcttttcgtctgggcacaggcatctagcacggcgatcccattcgttacacttattggcattgttctcctttggctgttgatccaggtgcctctagtgtacgccggtagttggtatggttttacacgcgccaagccatgggaacaccctaccaagacatccccaactccgcgccggattcctccacagccttggtacttgcataatgtccagcgagccattatcaccggcttagctcctttcgcagtcctctttattgagcttcttttcgtgtttaagaacctgtggcaggacaagagtggatactattacgtcttcggttttttgagcgccgtgacaacgatcttagtgatcactgttagcgaggtgacaatcatcgcgacgtacagtcagctctgcgccgaggtaggcattttagcctaggccataaacgagaggtcaaactgacgcactattttaggactaccagtggtggtggcagagtttcctgacgggcggaagcagcgccttctgggtgttcgcgtactgcatctggtactactatttccacctgcacatcacgggcttcgtgtccagtctgctcttcttcagctatagtttcctcgcctgcgctgtgtatggcctgctaacggggactgttgggttcctgacggcgtatgcattcatccgtcgcatttataggtaagttattctgttgaactgccaaccaccgaggagacccatgctgacagaagcagctcggtcaaggtggattaaccaggacccagcttgattcctgagtcacgcggcctcatccgagactgttgcggggctcccttcgacactgggaaaattcggggacgttatattcgggcttccatgagggatcttttattatagcaaaggatgtgaatgtggctggtagtcggcagatagtggagtatatactttgaaacttagcgggagtcaagcagcgatcgtttccgttactatatcttttttctctttggaatttatttggcaaatttttgactatccaccgaattccgcgcggatgctttaactaaaataataaactaaaactaaacttagttcccacgtgagatcgtagcatactttgcactccgcaaacgggaccagaggacgcatgcggtctggccatgatcactgttggtttgacgtcagacccttgttaaggaatgattatgcctctattttagcatgccgaataatcctatttcttaaacagataggagacgaagaggaggccgaatatgcatacgtcgcgtcgtacgtactaccattctgcgagaaaaagggaaagagaaaaaagtgattacgaaggcatggataataggggatagccacataagccccctctatctgaatcaagctatcaattaaagcagctcgagcttcggccgttatagttcacgggacggcagcagatcccttcgacccggagagttgaaaccgctgggggatggagtctagtacaggattccagaaaactgacataatctcatcaatgaaggtgagatcaacgatatgtcagagatggtgcaatcgtttatggagccagtcgaggccatggctatgcagtagccaaattccatatccactgtcatccgttaggtatccgtgcgttgacagacatcccgaaacccagatcgagtcataaaaaggtatcacacattcgtaagatctgacgtcgccacgggccagtagtagtgtgtctaaagtagcgactgcggtctgagtgtagtaccccttgcggcggaaattgtaaggcccacgcaaggtgcaaggtccagggagaatggcgcgattggtggctgattctatggcggtggtaggactgcgattgcgtgctcgggacgttgaattgtgccagattatgcactcgttgcttttctcggaacggagccgggaagttaattatgacgccggggcgtgagctgtatgtaactatatccagctagctgcagattagcttccaagtatactatgacccatctataagggtggttgagttgaacctgaacctggtggcgactgtagaagcacgagttctaagggtcgaaatgtcgagaacaaaatgtcggtgtactccgctaggcgatcaaggcaatcatgatcatccctattgcactgagcatagcactgctacagggtgaaacgagcgatcggtgatcctccacgatcttcaggagaccgggcgccggtccccggtccccgggatgaggtgaagaaagctggagatgtcgtgcttggtctgtagcgggcacggtgcaatgatgccatcgccccgcgatatcgacatttcaaggcggtgatggtcgagaccgaagaagatgagaatatatcaggatttgtttgaaaataatcataatgacctgttttcttgaggaaggatgggtttcagacaagaatcatcacgatggctcgcggtattccgacaggaggttcgggggatgagaacgccaagcttacgaacagagacggggccggctagcggcaatcttagtctggggtctttgcaaccacattcgcggctcttttgtgcgttatttttgttgctaaatagaacaggaagaagtagagaattgatgacaagacaccattggggtagggaatgggtgtattgaagtcgaaaagaggcctgttgcggccaacggctgtataccaagaaccataaccgctgtaaatacatgtatcaacggcccctgattgcctcttttgtctccacgctaatggctcgcttctccatcgtccccatcattccctccagaccagcttccgctatcgatggtttcgcattcaccgctcctcgagcaaacaagagtcatcaccatgtcaggaggcaagagactgctcaagggaccctgctctgttggcagtggatcagatttcaaagcattgcttacaatcacaccatcggcggagacgatggttccattgttgcggtgacatactcgccgaagatctgggtcggcaaatctttttcttttttcctttttttttgccttctttttctacttctttccattgcttatcatggatcctggatccatgatcttgtgacattggatgtgaatttctgctgcttctccacatacgctaacttacttatacctccgtcgcctccccttcccgcctttcctcttccttctcttcctttatactcgtttctctccatctcgtacctaatagcagccatcagttcatcacgagagagacaagcatcatggcggcccggaagcctaacatcctctatatcatggcagaccagatggctgcgccccttctggccttccacgacaaggactcgcccatcaagacaccgaacctgaacaaactggcagaagagggcgttgtcttcgactcggcgtactgcaactcgccactatgcgcgccttcccggttcgtcatggtgaccggtcagttaccgtccaagatcggtgcatacgataacgccgccgacctgcccgccgatattcccacgtacgctcattacttgcgccgcgaaggttaccacactgcacttgctggcaagatgcatttctgtggtcctgaccagcttcacggctatgagcagcgcctgacttcagatatctaccccggtgattatggctggtcagtcaactgggacgagccggtaagttatgccccgaaatggattagggaaagtctggaaaaattgactggattaggatgtgcgtctcgattactaccataacatgtcctcggtcatggatgccggccccgttgtgcgcaccaaccagctcgactttgacgaggaggtcatctataagtccaagcagtacctctacgaccatgtgcgccaacgcaccgaccagcccttctgcttgactgtctccatgacccaccctcatgatccttatgctatgactaaggagttctgggacctgtacgaggatgttgagatcccgctgcccaagcacgcagccatccctcatgaccagcaggaccctcactcccagcgcatcctcaagtgcatcgacctgtggggtaaggagctgccagaggagcgcatcaagagaacgcgccgcgcttactacgcggcctgcacgtacgttgacaccaatgtcggcaagctcctcaaggtgctcgacgagaccggtttgcgcgacgacaccatcatcgtcttcactggcgatcacggtgacatgcttggcgaacgcggtctttggtataagatggcctggttcgagaactcggctcgcgtgcctttcatcgtcaacgcccccaaccggtttgctccggcccgcatctcgcagaacgtctcgaccatggatatcctgccgacctttgccgaactagttggtgcgccgctagtcaaggaacttcccctggacggagtctccttggtaccgtacctgaccggtgaagacggcgtgaagaccgacaccgtgctgggcgagtacatgggtgagggcactcaatcccccgtcgtgatgatccgccgcggccgctggaagttcgtctactccctcatcgacccgcctatgctcttcgacgtccagaacgacccgctggaaaaggtcaatctcgttgccggcctccctgacccgtcaatggcagccgcagcggacgccaaagcagcagcagccactgctttcaacaaagctgcacccgcaacgctcccaacccctgctgaatctccgcgcgcaacaccccttgcccaccgcaatgcggctcaggactaccccttcccgagcccaacacccccgcgcacccctagcccaggcaagccatccaatgtcaccgtccccgagaccacggacccatccaagctcctcgcctacttcacggaggaggttcactctctctgggatttggagagcattcggcaggatgtcttgcgctcgcagcgccgccggcgcctcgtctactctgcgctaatcaagggcacccctcacttctgggactgggagtaccgcgttgaccctagcacccaatatgtccgcaaccagggcaagggcgtgctagatgatgtggaattcatctcgcgctggccgagagtcctgcaacaggctgctcaggctcagggcgtgaaggtttaagccgcctattctctgatcgttctattcatttcctatttgggaaaagtgccttttttttttttttctctcttatctaccatcggcgtttgagcgaggcgctatacccagcattaccatttattgacattgtcagccgtgcatagcttttatcctttgtttactgcactgccttgctgaagagaactgtttgacttttgagtccttttgctcgcgcttagcgattatgttgctgtcattctgtgaatgctttttgcattgagaatcttcgtcttgcgcattacctttttacttggctctccgtacatagaactgaactggatctgaatattgtcttctggatctgaatttagtcaagctggaaactgaaatgtacttaaaatgatctgcgcacgttttagctatctgtaaacgtttaaccagaatggaaataagttattgctttgattattcagtaattagaaagtacgtacgccatgctgtccatggacatcggcacacgccccatcgggttccaaggttgacgaagtaaagttgccgctgtcttcaggcgccaccgggagcatcttccttccatctacgctctctggccagcattacctacacatcaaagctaccatcaaacggcttcccattggagaagtcaccatggagattaacctaacacctaaactgatatctcaaacgtctccttgcaggcacgggacgtatacctgacagataccacgaatcgtttcaagaagtccgcaccgccaacgacgaacgtggatgcagcgaactatgtttcgcggtcgcggacaccgtaaatcttgcactatgatatcatcacatgccttttgaggtaaagcatgaagccatctttgtactcttagcctctcttgtattagatcttcgctattatgtggaagcccggcccgtgccggagtgggttgcaggaagccagcgaacgggcccgcggcgtcatgtatgcaagtagaaagcggatactacggccctatttacagcgaagtaggaataattagatataccttgagatgagagttactatatgcgaaaatgtatcctgcttcgtcggaagcgttacgctattgactgattgattgattgattgattgattcgggccatttctctccactgcaacatctcgggtttcctcattgccattgactctgcaatttctcttcctgtttctgaatatgatgtagggccaaggggattggacttgtggttgcgactgcagctgtggcggggtagctcagatggaggttcatagtttgaaaaatggggaaagctgacaggaagaagggttagaagaaggcgaaaggcttggtaaatcccgaagtgggagaatgcagtagatctgtggaaaagatttgatatatttcaggagtctacgatggtgtacttcaataggaaagacgtcccagtcaagggtttatatagtatatgtacttatgtccggtaggtaaagttcactcctctttagaagcgaagcaaagcaatactgaaaaaaataggaaatagatgaacacgaaagcggaatccctatcgtacctaggtgaatcatgaacaagaaatgggctaacatggtaaatcagtcaagacagtcatggtcacacaccgcgcctggctagcttaaatgaacaggctaaccaatttgcacagagttcaatcgtatcccagcccagagtaataaaaccgcgttgcgttggaacttcgcgtatatcactggtcggaagaccagtgagacataagaaatatttactgacaccgactagtccattggataagcaggtgctttgaccagaacgttcattggcccgcgcccgcgcacttcggccgtaacaaacgccgcaagtcggatgcgtcctgttcctgagccttgccctgatgctgctgaagccgccggcgtcaccgagccgcgacgggagccatcattgcccatagatgcaggtgtaggtcccggcccggagccagtttgtgggggtccctgtcccggtttccggcccataatgttgctgaacaccgagcgcatgcgctgttcgcgggctggaccactatcgtgagcgctgggattcgtagatgcaagctgtgaatcgcgatcgttgtcggcgttgccggggccgtcttcgtgggagctgcggttggagggtaactcggtggaggtttgagtgtcagaagggctggcggcgttggtgagggggggaagaacacggattctattttcatcgttgcatcgtggattggtgagcttggtggaatg

SEQ ID NO: 3739 - DNA, 7701 bp, Emericella nidulans
catgctgtactcaaccaggccttcgaaatagccagggtccaagtgaggcaaaatgaaacagctccaagcgagcaagaagctaaatacagagatcttctatatggactataaagacttcgtgcgctgtggctgggcgctggcttggactggctattaagaaatcaagttctagacctcatgacggattaacgtactaaacagtcaagtgatataaagccaacgctccttctgtcccttcttaggaaagaactaagtctcatccttgtcgtagcttgagcgaaatacataggtttggctctcagtcattgccttgctggcccctgagacggaattgtagcatcttctcaaggcattttatagacgaatcctacatgggctggaaggtcatatttctctattgagtgcggacgaaataaacagggaatatgtggggttactccgtagtctgggaaaatctggacataacctgtcaaatcagctgtggccttcctttattgcatttcatgaccacgctgtgcctaccacatacaagaggttacccattgtacaccctcgaatgcgttagtcacttctgaaaaggcaatgggctaatgtcccaagcccgtatgatcttctccgcgcgaacaaccaatagggcagcaaaagcgccgacagatgttgtgagacgcacgcacgaccggcagtcccgaatagaccatactggcttgcattgaatatatactccgtagtgactcggtgagacgaggatttggagcagggaatgaaatcgcattaggtggattccgctggaggcgcttttgccctgggattagctggagtgtcagactttgaccctgcattttccccggatttcgatctgcccaaattgggccatatcccgagcttctgttgatagacctgctactctgcttcatggcgcccaattaaccgagactcaatttctcgagttagcagtgcaaacgactgcaaaagctaaagctctttttaaccgcaaagacatgaagccggcggccagttggatccctagcatatgtcgcatatataacggaatcgacagactcaccccagcacgacatgacacccatctacgtattgacttcttgtgctaatactaccatcaccatgacagttcagcacgttgtactttctgatcgtgagattgaagagatccagagggcagagggccaaacgaatctcatccgccaagcccaagagagcgatgaagccgaccaaaagttgaccattaggcaggctgtgagcaggtacaaaaaggccgtcttctagaccatgtttctctcgaccagtttgatcatggaggggtataatgttgtgatttgagttattaacctgagtgtggtggtcttctacaattcatcctgactagcattagattacctcattctatgggcaaccccagttcaaggagcgatttgaggtgtataatcccgtcccagatcggaagttgattcctgccgaatgcagcctgggactctcgaactcaacgtccgtgggacaacttgcaggcctcgtcgtgaacgcaatctgccaggaggggtttggtggcactttcattcctgtcttcgcccgtcactctcagtacttacatttggagaagccatgtgcggtatcgcttggggcgccttcaggtacgtccccttgatggaatgttgactcttctaacgcttcatagacactttcgacgacctacgcttccgaggcagtgcccacgtgcttgaggtcacatgtcactgcatacgtctgcatgtgctgggagcagggattcctcctctggtgttgtgcgagtggtagctgtcatcaacggcgagatgggctggcggtatgaatctcacaaagagtgacgggaaccatatgtgtggacaccaataccgctgggcatgcaaacattggcagtaagcagtaagtactcatggcgaaatcacgaccatccagatactgattacccttacattataggctatctgtctgtgaaggggggactggatgtttaccgccgaagtatcgaatacaagtaaggtcagtagtctggacaacaaaatacaccgattcagaggggccatcttcctatcgcctactggaagcaaaaaaattggctgctgttattgcattctggtccttttatccaggatagttcatcctaaatacctctacgtacttgttagggcagatggcaaccctcgcaatctgaaacctccacgcaggaatcataacggcaatggcgggtatggacccaggagacttatgaggcaggcctctggagctcgagcaggctctgccttagtccatgagccatactcgtaagtcttgtccgccgtgcagcctcatgggcaggctccgatccgatacggagaagtgcttcatcatcaagcttagcgacagaggttggacagaaagctttgggcaaaggtgatatcagatggcgttctatgacttgtcgagccatgttgtcaataaacgtcttcaaggcaacctgctatggatcagtaagaaaatcttaaatattagggagttatacagatacttactttatagtaggcattaagctgggttaatgcttcgtcacacgcttgtttgtccatatcaattgtgatcctttgtccgagccctcgcaaaaacctgtcaaggtcgtaagaggtgttactgatgtgaagatttccattccaatcctcgttcgccacacgagtaactgcattcctaacctctttcctctgcgcatcaagcctagccttctggatattgtctgtataatagtggttgtatgtcaggggatcgcgctgttcatcttgaataagcttatcaagctcctccattgcaagccgctcggcgttgtcaagccattcctgtagaatgtttcgaacctctgtacgaagcttctcctcagaaattatggcgtgaagaacctggtctttccactgtgatgcaatgcctcggacatggcggacatgtgattgagcaatgttgaaccaccggcgggactgctcatggaatagctctgcaaggagggtcgagttatagttacccggcagctctttccctcgtgttcttgagtgcacctatgataatattagaaagacatattaaagaggaagttgtggcctctatacctgtcggacccaatccatcatttgctcattgtttacataaagtagtggagcatcaacatcatcatcatcatcatcatcatcaatgaggttgttgatgctatcagtgtcattttcgacgctgtgttggtcgttatccttggcgtcgtcttcattatcatcctcatcgcgcacaacccggcgttttcctctttcatgcatctgagtcgcgaaggcttgtattagcttcttgaataagagcccgcaacctggtatctccattccctacgaagatattgtgcctgctgctgtggtaatttccctctagggctgcctgaagtaactcataaaatgtcatgctgaggcttgtgaggaacatgcggatatcaccaacggttggccgagccttacccattgatttcagctccgcctcggcttcagcaaaacgcttttttatctcggctcgaactttcggaagctctctctcgatatgggcgtcaagaagtctttgcaggaaacggcgtaggttatctaccccaactcgatccatgtccagatgctggctggcccatacagggccagtaaagaagcatagctcaagagcggaccttgcagccatagtggtacattcatcaagttctgctgggcttggattcttcaggagaaagtatccgagcttgagcttgatagtatcctggttcttcgcgatgcgtgcaaccttagcctcagtgcccttgttgattaaatcaggcttggtgatgatgcccactgtccgctggccatcgtgatcatacttgcgtgccagtctgataatttcctggttggcaaaatcgttggttgcttgcacaactgcgagtataatggttcgagaactttgcaggtaggttgcgaccatgttatgaacagttgagatgtcttcttcagtctgcccctcgctagcaaccgatattaggcctggtagatccacgatgctcagttgcaagccgatggggccggttatctcaattcgaagagcatccggcgcaaaggagggtcgataattatcattatcatcatcagtatatccacgaatccccatgagtttcgatgcttctgctatgacaggaggtagctccgatatcgtttccagagtcctgctgtaagatgcaagcaacttttgttcaacttgaggacgagaagtgtggggtcgaatgctggccgttataatcgtttgagtagtttccttatggcgaaggatgatctctgtcgggaacctggtgcaaagtctatcttctctaggaaacgggattccactaatcccttccagaacagagctctttcctgcagactggtctccgcatacaactagctgaggcaaagcgactacctcaccaacgccgtttgcccttaccttttcaatctgactgagccggtggctggatatagaagtacgaaggtcactgaatgccgtactgggggtttcgaaactggtactagcagacatggttgcgattgtgtgtctgtgtgtagtctctagggggaacgggatagactggcagtagtaggagtatgtgaaaaaacctaaggaggttgtaagaaaaaagaggacagtgccagagctatgaggaattatatatttgtatcctgaaagcaagaatccagtgttctacagacttcttttcctttgtagtcaagagtgaggtggaaatcaaccgaaaaccctatatatcaccgttcaaagaataacaaaccatcaaccagcctccactacaccatggagtattagaatgttctttgacgcaggccgcgcatataatcggtcaaaggttatttcatgctggttttctagattgttccaccgcactccaaggggttgcgactaagtgtagggtgttagattttagacacccggtgttgccatatcccaaagcctggctcgccggatgatggcctgtgcgtcagcccgtgacccaggcggtcggtcgtcgggcagaataacaaatgatatcactagcgatagcttcaaaacaacataacaatcaatcaatcatacttcatacatcaattgaacttcgcagaattgcaacagcttctgttgactgccccttggagtagtcttgataattttagactgttgatcaggcatatctattaatcttggggatagcaaatgcctccttgggaagttgaacaggactgttcttattacacaagctaatagaaatttctttgctgtatggtacaggaatctagcggcttcccagtacctggccaccttgctaataatatttagcaaactttcccttgctgagggactcatgttctggttagggatcaggcgaattaggtcagagagtcctctaatttgcagtgattggtagatgccttctacaaccctgaccgaacttgcgtcaacctgatatttagactataagctaagaagtttctcaacttcctttgctcttaaattaaagctttcaatattttctaagagagccttgtctttcagcttctttctaataatcaccaaggctagcaaagcttcttggagtgcctttaaaggggcatttcaattttgttctttttgaagagcccacctgtaaccaagaaagtatgcatgccaagtacatagaaacctcagcaataagaatttggtgctctatatccctgtagcaagttgactctgacattgtcagcatatattacaagcaaagccgtgctactcaccagaaacagtcgcgagaatcacaaatatgtattcaaacccctgttgatacggcgaatcacatcctcactattattataactagctttattcacagtatatatcaccttcaagttaccaggctcaggatcctctactagacataaagcagggatatgaacaacatcatctctgctgtgcgcaatgaatgctagcatgctagctagtttatgctctgtgttaaaaggtaatgtagagggtcttttaaggctggtaggtagacttgttaaacccaacccgcgaaacccgctccgacccgccaagaaatgggttgggttagaccttctaattatccattgggttttggatatttttggctgccccaaagcccggcggagcaacccgctgggttgccaagatatctgaataggtatattactgtatttagattacattttcttacttagatgttttatatgtgcactgtggctggagacacaatcaagctcagtgagatgacgggtcatttgacggagaggagatccgagatggctctcaagcgaatggtgtcaaataacgacattccatctactattggttgaaatagacgcgcaagaatattcacgacagtctctgctgaaaccttcccacagcaacatatgaagtcgtattttggtcatttgcccagccagcgaatgtaaaatgcaatgtgactattgctttaagtacatatcgcaacgtgttccgttgtgaaagtgtgacggttatgtccgtattaaatacgccacagacggtgcaagcgacatctgcttcttatttcttggttagggccataagttgccaggggtcacggtatagtttaggctcttctttacatcctctacttcatcacgtatcttacgagcataatctttcttattattctttggttatttacttttacgaaatatataacggacgcactaaagactgcaaagactagagcttcgtaaattgggtaacatgtttgaattgctactacgatccttcccttctccttattttgatatcgtgaatttgacatgcttttgggggcatggtcggtggtccagccagaggaggtaatttgacgcgattggaaatgtgatgaggatatgccaagtagtttacaagctccgcgagtatcgaataagtagactcagagggtaccctagtattacaagaagccgacgtcttccacgttccaacgtacttcataaccaagtctcggtcaatggggcccaaattcttgaaaatccgcctcgctgctgtactctcagaaactgccaagctaggaggggatgacgaactctacgaatcagtggactctttttgatctcttcgaataccccgttttacattatacaaaggtcgagtctgtctgatgggcaacgctgcgcaggcgtcaagcccgcatcacgggactggcgcatcctttggcgtagatgatgcgctgtgtctttttgtcaccatgcctgagctgacaatggagctccgccaatatagtctgcataaggccaaggctctgcgggcggcatttgggacctacgataaagtgcgtggacgcagtcacagtggatagtgaacgatatgagcgtgtctgtgatctgttccaggagcctgagtgagccgatttgtttagcgggccaatgccgaattgtgatttgaggtcaaagactgtttatttaagatttggcattttgattccaaggtgatggtggataagacgattaggaatacagggccaggttagagcggcgaatcaaagctgcaaatggcgtcgataaactaaacagtgatgagtggtgtgagaagagcgatcggaatcaacggcctagcaatgtcattgaacgtacctagctagggccgagaatagaaattttagtgtgcataatcctacgg

SEQ ID NO: 3740 - DNA, 4473 bp, Emericella nidulans
ggcgtcaacgtacaacaacctcggatgtgaattggcactaggagcgacatcagaagacgccactatcggtcgttctcaatgcgagtatccgacccattccccaagcgtctctacctattctctcctccatttcgagactactaatctactccgtagataacagtagaatccatgagatttcgaaccttgatactcatcagaatcttgagtcttaagcaacagtctaaatcaaggcacaaagcgaacgccgagaaagatccttacccgcatcccgctcggcgtcgtcgtcctgataacgccctacaaccacccgctgcttatcgcaatgaagaagatcgctgccgcgctcgcgaggcaacgtagtaattgtcaagccgtctgagctcgcaccgctctccgtcttgaagcttggtgctctattcaaggaggctggcttacccgacggcgtgctgcagattgtatccgggtacggacgagaaaccggaaagtacctctgcgagcaccctaagatctcgaaaattgaccttaccggcggaatcgcacatacagagccattgcccccgtcgcagcaatgaacatgatccccatcaccgccgagctgggcggcaaggccccagtgtgtatattcccgagtacggacgtcgaaacagcagtcaaggccgctttattcgcggggttcatcgccagtggccagacctgcgtcactggaagccggatcctcgtgcacaaagacatctacgactctttcaggtcactacttgagaagcgggttcgcgccctccgagtcggtgaccccaccgacgagaagacccagatcggctccgtcatttccgcagccgccatcgagcgctgcgaggccttcgtctcgcgcgccacagctgaaggggggactatactctgtggcgggacaagacttacgccaacgccagagaagaaaggctatttcttcgccccaacagtcatcgaaacggcctccacctccgacctagccaacaatgaggtctttgggcccgtcctcgcgctcataaaatgctcagatgaggatgagatcgtccgaatcgcaaacgggacatcgtatgcgcttggggcgtcggtgtggagcaacgactttacgcaagcgcatagtgtcgcggataagatcgaggctggaattgtctggatcaatgggcatcatctgaatgacccttcttcgccgtggggtgggtttaaggagagtggtgttggcaaggagaatggcgtcgaggcatacgagagctatacgaaggtcaagagcacggttatgaactacggagtcaagccggtttggtttgatgatgaggtcgcagatgcgcgatatgggtaggacgatattggtctgtggtttgagtagagcgaaaaggtattcagactatatgttgaaagaagtagcgagattgcttcgtcgcatatgttagctattctacatcattatagcatccatcattagcaaattcttgccgagtaactcagaagaacaatctattcacacccatctagctcagtactctgtaggcttcgcaaacatcaaacgaagcatatagcctgaacgggacccagagatccagctaaggcggctagtccaggctttggatgaattcaacccaacccagtccaactcgataaacttgacgccttcaagtttctgtgtctcaggatatctatcctagacatcacctggacttacaccttacaatgacgttgtcgcatattagattgtcggacaaataatgtagattccaagctgcatttcgtatgactgcaatcagcggaccatttgcgcggcagtgaagttctggtgcagaatgagaaacgatttcaaaagctaacaagctggctagctcttcgatgctcgaccaagcccgctttccatcgagctcttccaagatgtagttatgttcggagcagattttggggtgagttgagatcctcgcccatatcgtctatcaaattctgaagcggattcactcgaggccgtatcgtccgcagttgcaggtgtattcttgggcgaggatgagtcggtattcgtagtatggtggatatttatagtcgtaaaatctctggacaactgctgtagagaggtgtcgttaaggtgccctccaacctgtcttgacctccacccaagtccgtgatttctcccgtggatgacctgcccatcagttgagaccatgaactgtacggcatcgcccgtggcgtaattgtccactgttgtgatggtttctttgaaatggttatctgctttggagcagatatcaatacactggcgagtcatttcccattcatctcgcagcctggcaagatccgtcaaatcctcctgtgacgtcgttcccgatgccgatttcactattaatcgatcaattagactgtgtatgtgcttgtgtaactttgcggatgtatgctcgaggctacttttgcattcctgcaaagccgcactggtgagcctttcgggaaatgcgccggggtcataaggactagtagagtcattgctagcgggtgagatctgaatctgactgatatgatcagacagttggtcgcatatttgaaggcatttctccgcgctcagccgctcttcttttattcgttgaagttccaacgagtcttcatcagatcctgttacggcctttcttagcataaactctaacttctcgtcaatagctgcaagatgatcctcgagatcttcctttgcggtcttgatgagactttcataattcttaagggtttccgccggtaaccgtggatttttgactgtctagtttagcaaaggaaaatggacttatcaacacttatcatagcgacttacaggtttgcgtccgttagagcaatggtaatggtcgacttatatgctgctaatactctcctgaaaccatctacgtcatcacccatgtacttcaactttgcccaatcgcgaaagctggttcgagtagcactagaccgtccagcacatttcataatttctttttgaaagagcttgcatgccttgccgcaacttagtagaggaagattgagcgcagagagatctgtatcattagtggcctggaccctatcgacaagcggtcccagaaccccacttaaggcttcaagctcttctatcagctgacgcacgcgtgttggatgcgaatgaaagcttttgaccgtgtcgtagaggctaacgctcgactggaaggcgaaagtggcgagagctaataacccagacgcaagacttataggttctgccatttttatagcgctctgaggaggggagagaagtacaaaattagaaagaggcagatgtttgcatcctggcctcagagctgagcggtctttttaatcgctgaggggtcgggcttactaatgttggcgggcgcgaatcacaacatgggtcacaataactcgctgttctaacagacttggtgtccaattattttgcgttcagaagcgcctggaaggaagtcgtaggcacacggcggctacttaacagcgctgaatcctggacaggcaaccgagttctgcggggagatatggaaattcgcaggtttgatctcccagctacagtatagccatccagggcttctatctcaatcttgcccgacctggctgccttgataggccgggcattgcgaatggaggggtgagtcacctagctgacctcagcagctggcggataagcctcttcctcgacgatattggggcttggttccgctataaatgccgtatgtatgagtgaaaatacatgatcgttttgagtagggtataaaacaagtgggacaggagatccagcatggtgcagcctaacctttacttacagctttcaaagcgtgaaaaatatgggatatactcgaagaactgctgaggaacattcccaaaagagttttgcagctgtttgctaagtaagttctagtataattggcatgcaacacttgtaatacttagagtagatggaaatttggaattttaacatgtcaaggttcgaccagctagagctatattttgccgatatcaggtaggtaattcttatctgctgccatggcttaaggatagatacacctggagtagccagcatgggtagagtattatgattagcgtagatgtagtcaaggctgtgaataattactagagctgcttttaggcgcgcattccggaaactatcttctatggctagtattaagacggcaagccaaccagaacattcaaacaaccattctggcgctcatattcagaatacttagcatggagaagaggaatatgtacatggagaaatcattttgtgggctgtctttaccaggcgaagcctaaccttatcgagtaggcagtcaaggattgcagaagtcagttcattgtgcataccagtatatatgataaagcaagataactgcttgttattcttcgtagtcccatgctagggtgctgctctgtaactccagagctggcatcgatgcatcagtagtattatagatgtgtcactaaatctggagtgtgtat

SEQ ID NO: 3741 - DNA, 2513 bp, Emericella nidulans
ttactataagcttggacaccctgctaacggctttagaacaccgtgccaaacaaggtcaaccacctgtggatggcccagctcttccacgaccgaaaacagcgcgaggagcgcatgactacccccaaggaccagcgtcacaaggtcgccaacgttgactaccttcgtcccatcatcgccgacgctgataccggccatggtggtcttactgctgtgatgaagctgaccaagctcttcgtcgagcgtggtgctgctggtatccacattgaggaccaggcccccggtaccaagaagtgcggtcacatggctggtaaggtgcttgtgcccatcagcgaacacatcaaccgcctggtggctatccgtgcccaggctgacatcatgggcaccgacctgcttgccattgcccgtaccgactccgaggctgctaccctcatcacatccaccattgaccaccgtgaccaccccttcatcatcggctccaccaaccccgatatccagcccctcaatgacctaatggtcatggccgaacaggccggcaagaacggcgccgagctccaggccatcgaagacgagtggcttgctaaggccggcctgaagctcttcaacgacgctgtcgttgatgccatcaacaacagcccgctccccaacaagaaggccgctattgagaagtacctcacccaatccaagggcaagtccaacctcgaggcccgcgctattgccaaggaaattgccggcacagacatctacttcgactgggaagcccctcgcactcgtgagggttactaccgttaccagggcggcacccagtgcgccatcaaccgcgctgtcgcctacgcccccttcgctgacctcatctggatggaaagcaagctccccgactacaagcaggccaaggagtttgccgacggagtccacgccgtttggcccgagcagaagctcgcttacaacctctccccatccttcaactggaagaaggccatgccccgtgacgagcaggagacctacatcaagcgtctcggcgccctcggttacgcctggcagttcatcactctcgccggtctgcacaccaccgcgctcatctccgataccttcgccaaggcctacgcgaaacagggcatgcgtgcgtacggtgagctcgtgcaggagcctgagatggctaatggagttgatgtcgtcacgcaccagaagtggtctggtgccaactatgttgataacatgcttaagatgatcactggtggtgtgagcagtacggcagcgatgggcaagggtgtgacagaggatcagttcaagtcatgatttgttagcttgttcatttattatgggtttgggtttggctaaagtaaatgcatcatcattttttgtacattgaatggaaaatttagtttttatatataccatattatttcattttttaaattgaatatagtaaattacagcgcgacctactccatcagcttaactaaagaaactcgcttctctaaccccttcaggagcctctatttcgagagaagattgggtccatggcggtattgtattacagcgatcaagggagtctatacgtaggcaagtcgtcatcataataccattggccacgctttcacgtgtccaatagtatgtccactgtgtctgaccacggcgctaggacatgatcatattttcacctctccctgggcgtcctggttagaaaaagcaggaacagcactcagtagttgatcacttgatgagcattaccgtatcattgctcaaaggcaaaaaagcttttattcgtggatgcgctatgtgtgaaaaggtagctaacagggattgattggtttcttaattctacctacctaatttcagagatttttatataaagaaataggtaatagaaggttagtttgttagttaagccttgcccatccctacaaggacaagcaaggccacattcatgaccgcgataatgacccagaccaagacggctatagcagaaacaagaagtccattgcccattttgacgccgtcggtagcactgccaccgttgtcgtcaccttctgcggcgttctgaggctgggtctgctcgtctgtatctatatctgcatctgcatcatgtacccgctccatgggcacagtcatgtaccggttgcggcaagtaaaataaacaagcggcgcgctgacaaagggtagtataacgctgagcacgacctggctagctgtaagcgtcttattaaggccttccttccccaccgccccagcaatcacaatactggggatgatgctgatagaacgggtgatgagcctacggagccaagggcgaatactccagttgagcatcccctcggacaccatttgtccggccatggagcagacaatgccggcagagagaccggataggagaagggccaaagctaagaccgtccccgtcgctttggagatggcagacgatacaaggttgtatatactcgacaggtctgcgacgtctgttgcagaagggctgttgtagagggaatcaccacctgcatggagatggagctatccca

SEQ ID NO: 3742 - DNA, 1515 bp, Emericella nidulans
cctggctaatgttgctaagactctccaggaggaatagatggctcgctccttttctctctttctaaggtttattttgacgtgatggttcaggattcggtttggaaatggtagcaataagcaaatgaacggatttgcaatacccaattcgtcttttatttagtcctcacgtgtaatggataagtaatgattcaagagctggagtcccatagctgtatatctctagtgctcgagtaaaaatagaggagatgacgtctccctaagctacagaccacagtacatgactcataaaattagaccggcccagcttactgcataactctactctcaatgactgcaccagcattggtggcagcaggaattgtcggtagcgatatcgcagtcaagtcatttttaaaccagacagcgaagcgagcctttgaagtcgacctaactcgcaagagtatctctatttggcttagcctgaacgaactatattactagattcttatagtcgaatgtctcatatttcagccgatggcttcttactggacaattaggcccgggtgatgctataacaccctgtgatatactatattacttctctgtagcttatcttcaattctaacggccacttgtagcaactcgtacgacgattgatgcataaatctgcccggtaagatttttttcgacggtgcagggctcggaacttcgggagttacatccagattaaaaggccaagacagagccttgccggcaattagtgcaggtagtctacctcggagcgaatggagcagggactaatccctccggtggcgatatatgctggacgaaacctcccagacacttaagccagttgtttgctaatgtgctcgggatccggcctcaaggcccgcgacccttcagaacggctattttaaatactcgggccggctctatatacggagttgttcaagcaggctgatagccgggaaggcgtcaagcacaaggagcagaagggttgcagttggacagtaccgcatccttgattccatcagatacgccgagttaactcaaacatctgctcatcgagttcgacttacattggaaacaagcgccggtgtctggcatgagctcattgttgagccttcttcgccgagagcacaacctagctctcttgacttgaactgggggagtcgagatatggattaggtgtttctgtttctgcgccctgcccacgctattctataatattccgcttagcaggtctggacgggtgagagttgctctgcaacgccagatacacagaaatctagcttgtgaggttacgcagtgagggccgcttgcgggagctcccgccgtctctttttgatctctttaagacgtaagtgcaagtatcatacctcgcatgtcaggcaacgggttgcctgaaggttccagacttgcaaccgtctggggagcgggccctgcatccaaacgatcaatgtcgaggtgggccgcaacttaactcgcgaacagcgcttaggcgagtgaatagtgcgctggacggccccgaagcct

SEQ ID NO: 3743 - DNA, 3882 bp, Emericella nidulans
atggtcgcttgatccaactgccctcggtcgccccgagtgtccatatactttttcaaatccttgtccatatattcgaacacaagcatgagcttgttctccgtgtgaatcacatcgtagagtgatacgatactctcatgtttcaactctttcatcaatgagatttcgcgaatggcagttgatggcgttccctcttcggagtcgaggtggatttctttcagggcgacaagttcgcctgtctgccggtttcgtcctttgaagacctgtagggtctcgttagtatggatggttctagtcattaaagagacatatagtgagcttggaatgagatggacgtcaacgtacagtagcatatgtaccctctccgagctgataatcaaaaaccagttagttttattgttttataagcgcagatatgcgctggatctcaccttttccagctgctggaacgagctgggctgttgcgacttatccatcgttggtgcgcgttgagacggcagggaaggaggggggttggtgtgatgagcgttaaaaagcaaagactttggcgaagcgagatttgcgacaatttccagcagggaggaagaggatgatgttggccgctgcgaagtcatgtcagttttgcggtggtcaattcctcgccgcggcccctcgactccccaacgtacgtaagtagagcacgggtctggtccgcccggcgcctaacgttctacagtactataattatcccaacggcacgctcttcaagcacttattgaagccactttaaagtttgaatttgtgtattatactattgaaaatagttatctaggggacttatctatatctactctactgtttaaatgtataaatctagcgcgaaaggctaggaagttgagatgcaacagagggcagaattgcgtccgaatgaagactgcagcgagtgtaccgtgccaaaaaatcgctgcctttgtctgcttccttgaggagaacggattcgtttcgaacgcctccgatatttatgatgccaatgggcattcctctcttataggctctttccactaacctccatgcggagtatgtggctagagaggtgccgagtactagcaatctccccgcgtcgtcaatggcttcttctgcagccaacttcactggcggctcaatgttctctccgaacatgattaccgcaggtttcaggatacctgcctccgaggtcggcagccaggcgccgtctttctcaacctcaactctggctggagtaccatccgcaagtcgaggaggcttttctagacaagttgaacatgaagggtagcgaaatgtggagtacggtgcctctggaagctcaacgtctccgtccgggttgagtttcaatcctctgcgcctttgttcctctgggttgtccgtgtcaagagcccctatatcgaccatcctcgctaagaactctgcccaggacggattaagcctctcgagagacttttgaaactcggacctcggaaactggttacggcagctcaaacagacaacggatctcaaatacccgtgaagttcaatcgacggaatctcaggatgagcgattgaatgaaaggaatccacattctgcgtaattacagagctaacgtagcctttgacgcctagatctctaatcgcccagtgagtcgagttcggcttcgccttcagaagccccggccatccgatgaagctgcgagcccagtatctcttcctggattcatgtcgcgtcgcgaactcatggaagtaaatcggacggtatctcttattcgtcacataggtgccgttctctcctcggtaatcggacaatccagacgctactgaaatcccggctccagtcaaaaggacggtctgggaattccgtccgacatcaactccgcgcaggtagggagacggtggggcggtcaggaagttaaggaaggcatcaattgccccagacactgagctagcggacgctggaacgatgatcggtggaggcaacgggccggtaaagggtattcggatcgctggggctgtcatcgagcagtagtacacatgtttagcactaagtatgataacgggcaaagctccaaatacttcagaaatcatcggagttgtcgccgctggctcaggatccacctccacgtcaggctgactaaagaaagtcacatgatgctcatagctgtttcgagaacgctttgttgcagatgcgaactccagctgtactctaagaaaaagattaatctatcaaaatatatgggctgtatactgaactaaaccatagttagcattattaatatcagaagagcaatcgaagatgtggagttatagcatgagcacaaaccgcccatataaaaatgattgttacgtcacaaaccctaaaagaagagagtttttcaaccccggattttcctttgctttgcgattgtacgatcaatgatttatgagctataagcgcgatactgtcacgcaccccgtctgatatgtttcctcctcagactcccaatatcgacctcgaggccctaagtgggatatgtgggtgtgtaccgttaccgtgcctgcgcattgtcaccccagacactgaccattttatctagttctatctcaattgcctgctgggtcgtcgttttctccccccagatcattgagaacttcagccggggctccgcagacggactttccctcctttttctcgtcgtgtggctcgcaggcgatgtcttcaacatcctgggttcagtgctgcagggtgttctgccgacgatgataatcctggcggtctattacaccctcgccgatgtcgtgctactagcgcaatgcctctactatcgcggatttacgttcaaggacgacgcctctacagcatttacgccagaagagccagatgaaatcgagacgccgtccccggtcatcgcgagaaaaccgaccgagcgcacatctctcctacccactctcgaaacccaaaattatgacgctggaactagcgcagctccctctcaccaagatgacaacgccgcctcggctcccctcctcgcaccaagtcacgcccgacaccgcagacactctatcgacgggacgcacctctcccccgcaacccccttcgtcgagccctcagcatctggcaaaagaaaaaccacctcaaccctgcaaaccgtcctgttcaatctgtgcgccgtggcgcttgtctgcgtagccggaatactaggttggtacgtgagcctctctacgccagcaacgcctggtaaacacacaacgcaccgccaccgcaaaccggcagatgccaaccccatttcgttcgacacactcgggcacccctttggatatctctgcgcagttctatatataagctcgcgcctccctcaaatcatgctcaactacaagcggaaatccacggatggcgtttctttgctcttcttcctcttcgcctgtatcgggaatctaacatacgtgctctccattctcgcttactccccaatttgtgaacgaccacgccactgtgagcctggtgaagtagggaagctttacgggagatatattctcgtgaacttgtcctggttggttgggagttttggcacgttgttcttggatatgtgcatatttatccagttcttcatgtacaaggataacaatgcacggtccacaatggttgtttcttaacatacctttatttctctcccttggccacgtgaggcataaaaaaaattcggcgttatggagtatgaataatacaagtattcgttccttgaagatatactattgcgcgaagattgactacgaacagtacaaaacagtacagacgaaagacgaactcttacatttagtctcaccggagctattcagtacccagttttcataaatcataagtcgtaaaatagctttcaatcaagagagaggcaaaaaaaaagccctagtcccgatgaacgc

SEQ ID NO: 3744 - DNA, 3564 bp, Emericella nidulans
ttctttgtgttacagctagggaagaattttttttttgtgcggtctgtcatcatgagctccctgggcttgcggagcttggctcccgcctcgaaggttggttttctttcgacttcacctcaattcgtgatccgaggtcatgaatgatggctaataagactgtgaacgatagatctcccgtgctttgagagatcagagacgtttgttctcctcatcccgccctgcaggtacgcattgatgatgtttgaaagcgagataacatggttgcggttgctaacccgccctgcgcagcccgcattttcggcacgaaccctttgcgcgctaagcctgctgaaggctatatctcagagaaatatccggtcattgtaagcaattggattcgttgtgcatgatgttcaggcaattctgactcttgtgtaggaccacgagtacgatgcggtcgtcgtcggtgctggaggcgctggtctgcgtgccgcgttcggtttggcggaagctggattcaacactgcctgtgtctcgaagctcttccctactcgatctcacaccgttgctgctcagggtggtatcaacgctgctcttggaaagtaggttttggtcttaatttgtcctgtcgcatgcgcttatatgtggacagcatgcaccccgatgactggagatggcacatgtacgataccgtgaagggttccgattggcttggtgaccaggatgctattcactacatgacgagggaggcccccgctagtgtccgtgagctcgagggctacggatgccccttctcgcgtaccgaggaaggcctcatctaccagcgtgctttcggtggtcagtccaaggagttcggtaagggcggacaggcgtaccgttgctgcgccgtcgccgaccgtaccggccacgctcttctgcacaccctctacggacagtctctgcgccacaacaccaactacttcattgagtacttcgccatggatctgctgatggagaacggcgagtgccgcggtatcatcgcttacaaccaggaggatggaactctccaccgtttcaaggctcaccacacagttcttgctaccggtggatacggtcgtgcctacttcagttgtacctctgctcacacctgtaccggtgacggtatggccatggttgcccgtgccggtctccctaaccaggatctggagttcgtccagttccaccccactggtatctacggtgctggatgcttgatcacagagggtgcccgtggtgagggtggttacctgctcaactccgagggtgagcgtttcatggagcgttacgcccctaccgctaaggatctggcctcccgtgacgtcgtctcccgttccatgaccatggagatccgtgagggccgtggtgtcggtcccgaaaaggaccacatctaccttcagctcagccaccttcccgcctctctcctgcacgagcgtctccccggtatctctgagaccgcttccatctttgctggtgttgatgtgaccaagcagcccatccccgtcctgcccaccgtccactacaacatgggtggtatccccaccaagttcaccggtgaggtcctgacccaggatgagaacggcaacgacaaggttgttcccggtttgtacgcttgcggtgaagccgcctgtgtctctgtccacggtgccaaccgtctcggtgccaactccctcctggatctggtcgtcttcggtcgtgctgtttctcaccgtgtcaaggagatcgcctcccccggcaagccccacgccgagctggcctccgacgctggtgccgaatccatcaaggaccttgacactgtccgcactgctgagggccctaagtccaccttcgagatccgcaacgccatgcagaagaccatgcagaccgacgtctctgtcttccgtacccaggagagcttggatgagggtgttgagaagatcaccaaggtcgaccagttgttcgaccaggtcggtaccaaggaccgcagcatgatctggaactccgatcttgttgagactcttgagcttcgtaaccttttgacttgcgcgtaagtaccacaattcacagatacaacatggaaaccaactaatgacatcagcactcaaactgccgttgccgccgccaaccgcaaggagtcccgtggtgcccacgcccgtgaggactaccccgaccgtgacgacgagaactggatgaaacacactctcacatggcagaagaagcctcacggcaaggtcgagatcggctaccgcagcgtcgtgcacaacacccttgacgagaacgagtgcaagcctgttcctcccttcaagcgtgtctactaagcacatacaccgtcactgtgagctgggttggttatcagacccaacacggtatcactgcttataaaaggatttggcgtcgcgttgtctattaaaggcctgcagttggaatagccttgcgactcgaggcgaaagggaaagagtcatgaaaattcgaccatgttgatttcctatgtcttcatattgtgtatatccattgttgcttttcttcaaggcgatgagttgggagtcactcacgttctattgttttttatagccatctgttagcttatacaaccggagttttctttgcttgagtacttggtgcgtacactaattcgctggattctgttcaacggctaagctggcatgctttccattaaatagaaaaagctaaccctttcctaagccgctcgctgtgtttctgcatgaaacgtgtggaccacgcggttctttgtctgcatcgcaaacaaaggagtgctgctcttgcactctagatggagagtatcaaaagaagagctaagcccccgacatgtgccattgctgccctcggccacctcagaagaatattcgaggctggctgtctcaagtacattctagatttctgatcgagccctttgcgtcgcataaccagtaacgccactgacaaaggcgtcagccgcgatgagacaaaccagacccaaacctcttgcttaaaatactctcatgaaaggatgccatccagactcgtgattcacttccataacccagtagcgtcaggttaaccatgggactattgaatgaaacagaacagctagacttgcctgctatgcgataacgtacctaaatccaaatctcatatgtttcaatgccatctcactcttgctctcattctgttgagaaatggcagtatctgttctctgacttcctttcctctcactttctttttcttgcctgactctaacctcaatttgagctggcctcatgctgaacaatcgttgattcgtactgaacggcccctccgttaggttgtttccttccatctacaaatattaatataattagattgaaatggctgatataacgtgctcgaagcatacaacttggtatccctgcgccagcgggttcctgggctgctgctcggttaatccatgcggtctggaaatatgcccggatgatagtaatgggcagatgacagagtctgctttgacaacttggtcgccttgaaccgaacgaccggcatcagcctcaactttgacggctttgtccatgtcaccttcatcgacgacggaatctgagtcattacgaagacaatgcg

SEQ ID NO: 3745 - DNA, 6555 bp, Emericella nidulans
  unsure (1)..(6555): unsure at all n locations
cctttggacatatggttcttctgatgaatcaggacaagtgactgactcatcgtacgagatccgcctcgaccacctgtcaatctctgacctagcgtatctccagcagtcgcgacatcttatctcaccgtatctgactgacattgaggctggccagttttcgagacttttgaatcgctacgtatcagtcattcatgacaaccaatactgccaaccctttgatgctctcaagaagactgtcaatctaggtgatgctgttttcgctattcagggtcattcacagcctcttcatcctttggtcaatgaacctctagctcttgtgttggaacaggatcttcccctcgacttgcttattctactggcacatttacaggagtcgaagagagacctacatcgccttaaacaggccctattgcttgcagaggaatccagccactctcttaagccaagccaaatgactcggctgcagcggtctttagcctcaaaacgcatacctgccttgctgaaggattcaacgcagccagttggcagattcctttcgcattgtggacaggccttatacgactttgttcaaagtctggacctcgatttcctccgccaccacgatccgatgccccctcttcgggcagtcatcagattctgcacagatatgcttagaataacagcatctaacgaagtcgacgaaggcaaatttttgatctaccttcagattggcaaatcattgtgcgcatcaatattcgattcaggtgctgccttcaacgcattggctcattctatatctcaagcacttgagcggttccacgaaaattgggctcttactacaggactcggaatgcagaagctctgggaatcgtggagaccagcaacagcatcaactcccgctcagttggcatccatgttagacctggaaaaggtcgcgtcagagttcatgcatattgcaaaccgcacgcgtcttgatctgtctcaattaagccaagtgcgtagctcattggttgaaacacagagattactacttatggaaggcgctgatgaaggaaatcttgtgcaagtaagttcatgattccgagttttgatgttggacatgacctgccagacttccatactaaaaccagcagggacttcgacaaacagtcacgggtttggcaagtgtggtgcaagactccgaactggctccaaacccgtatttttcgaacgagtttgaaatactatgccagtatcacgacattgctgctctcaaggacggaagctcttcggctgctcaaaccgccattcaatctgtgttagctctactggctggtcgccctgcccagcctttgaactcgtcgaaactgcaaagtcgagttccggatattcttcatcggttgtccctcttctcaggatatcagcggtcgtccgggtctggaaccgctgtcagtggaactgtgtctctgtcgctgctcaacaaattagcttttgttgatcgggtcactcttggtcaaatggacgccctggaacttgaaaagctgacactttcaaaggcattgactctaaccagccgagaaattgcattagatcagctcaagcttctccgacaggcacttttggagcttaccgcggagtttgttgatgttcacaaagagttctttaacccgcagtcctttgagcaactggtgactctactacgtttggcaggaaagcgaggcttgccacccagtttgctctcattgaatattcgccttgcgcagaacctaccgaacaaccactacttcaaaactattgctgataaggcacttccaaagctagttacagccctcttgactaggtctacaggcgaagatgccgcgcaagatactgcaagcgccttggtacaactcgcggttattttgctctggctttttgttcctgataaaccattcgatccttcgctaagcttggtagtggagagggaacggcattatcagcgggttgctgaacttaccgcaaaagctgatgctatcacgctgttcgagcaagtcttctctggacagtcgacaaacatcaggaaggaaattgtgcaaggcgaattgagcaacctcggctcggctcctccgccttcctctgtcactcgaccagcgacttcagaaatcaacgtccttcatggtgaattttccagtatcatcaaatccgttctccgtcgcaatcccgaaaaattgatcaacgcaactaagaaggatgccgagaacgagcggatgagaaagctgcttcgtgacaacattcagcaattgagcaagcgtttgagtacgaactacagatccttcgatgatatcactattcttgttgttcgctttttgcagatacttgaccttggtctttccctcagctcaacttccaaccatgaaccgtgtgagacagctcttttgcggaccgtttctgggacgacccccttccttggagcttctgacctaccgatcatatcgtccgaaaatggttctcctagtcacgattcaaagcacgcaatggactcttggttccatgacttatcattcttcagggtcgctgaaactatggagcctggccttttgcggaccaaaactggccgagaatctcttcttcgtgttgttgacaaattctacattctgtggaaggcaaaactgaaagaagaccaggaggaatacgcccgcaagaatgagatgtatcactttaaaggctcttgggaggatagtgaagaggttgatgcaaatgagctataccagctcttcccgacatacgaagacggtgccgaacaggttatagatttgccagatgcagctgatccaaaagttgtttcggttcgacttgccgaccttcatgcgaaattgtttgagtatgcagatagccagacagtgctgttagactacgtcaaacactctgccatgctgctaggttcaatctggtctgacaacgactacttgccttattcaaaactggccccaaaggagcagatatccgccatcctgctgttgctggaagaggaccttgcgaagaggaccaccacctcggctaaaaactataatttctacaccgaccagaacccagctgaagccaagaagctccttattctgacacgttctatccaagcccgctttgttcagatacaacaggcctggcccgatcatgcagttcccggagacgtaatctcggtctgcaaggagatataccagttcagacataccgaacccgtcgcgaaatttctgacaaaggtcgagaagcttcattcgctggtccatgaatggcagctcgtagccagccgagagtattcagcagcatcgtactacgatgaacttacgaacctaataatatcctggcggcgattggagttgtcaacctgggcaaagctcctggatctcgagaaagacaaatgtgtccagggcgtgagttcatggtggttcatcatctttgaggcacttatccgagctccgattcagattgctgaatcagggacgacagacctgagtgaccatgtgcaagaggtggttggtaccttagagcagttcacccactcaacgacgctaggagagtatagtgagcgtctccggctcatcaaggatttccgagctctcctctctctctatgtccaggattatccgtcactgaagcagctcgtattcgcactagacaatttcctccaatattacgctcaatttgagcctgcggtgtctaagtttctgatcgacaagcggtcttctttggagaaggatatcaaggaacagatacagctcgctagctggaaggatactaatattgttgcgcttagagagagtgctaagcgatcgcatgtcaaactgttcaagctggtgcgtaaataccgagaggttctgggcctgccagttgagcagatcctgagccaagatatgcctgaaggtaatgaggaaactggcgttttcggtcgtgagcagatcttctcttctgcaagtctcccagaggcattgatcatttgtgagaaaggcaaagtgtggtccactcgacctcctcgattcatgaaccctgaaggcacagttaagagcatgctaaccatgtatacctcaattccggatgagttcgatgttggtaacgacttgagcggttttgttcgattcttccttgaaagcatcaaagaatttcggactcagacccctaaggtcctgacggaggaaaacaagccagatgttcaacacctgaaaggccagaaacgccggttctatgcggacactttgcggcagctcctcgagatgggtgtcaagcgtaatgccggcactgacttgatcgaatcgcaggctaccgttgctaaagtgcttgccactagtccctctctcccagcccatccagcggtaatacaactagttgaggcttgtgatcgttatttctacaggcttctagatctagttccacgtgctcgtcaagcttcgcgcagctactcagaggaactcagtaatgtggaagtgtcacggagtttggggtccatggagcatcttttgttcatgatcaggaaacagagagccgctgcttcctcggctctatcggatctggcaaatctccagtctattctcgccaaggtgtctaatctctggaaatcaggagcgtcatccatcattcggtccaactaccatgccgtgagcggaaagcaggaagtaacaacagcaattgcatggctagggcccacgcttggggttgcctcaacagtcgtggagctgcattccaaattttctggaattgattcatcagaaatctccaatggtctgcagacatggaaagacacgttttaccgcctcaggcaatccatcaaacaccttcctgagctgccgagtggagttacttctaaactccatcagcatactttcgacgacgctgcatcgtctctagaccaattgaagactgatatcaccaagtgggctcgagaccgacctgatctcaccttcgtcctagatcaattgctccgctggaccaaggtcaagatgggccccgctaagttcgttgaagatgtggatgcattaacgattgaggactttgactcaagccttactgcagccacggataagattcttgtcagcctccagaaacttaaggaagttccatcctcgatcacctccgccggtttcctctctcgaagtgatgagttcttcactagagctttgaaatcggcacatctggctgatattacaaaggctctcatcgaggtcctggaaacgctgcatcgtgttcaggaacactccgatgttggtattcctttggcagttgcactactggcaagcctgctgcccataatgaacaagtattacgatatcagtcaagatattgtgggtcgcttcttgaacgtgcaccgagagacttgcaagatgtcctatgtacttgccaagtccttcattcaggtttcatctgaaggcttctgtagcccacacgaagaatcaacagaggaaggccagtctggaaaattggaaagcgggacaggtcttggtgaaggagaaggagccgaagacatcagcaaagacgttggagatgacgaggacttgtcggagctcgcacaacaggagcaacaagaaggggctggagaagacattgataaatccaaagatgccgtgaacatggaccaagaagacctgaagggagaggagggtgagcatgaagaggaagaagacggggagaaggacgaaagtggcgatgagggtgaggaggatgatattgatgaagaggtgggcagtgtcaatgacttggacgtatctgccgtggacgagaagatgtgggacggcggtcatgacgagcaacagaaggagacggaaaatgaagaagggaaaggtgcttcggaggccgaccaacaagcggcagcaccggagcagaaagaaggcgagaaaggggaagagggtgacaaagaaggtgaagaagcggaggaagaagatgaggaagaggaagaagaagctccggatgacgagggcgaggctgttggtcgcgaggatatggacgttacggaccctcaggctccggaacaggaaaccctcgatctcccagatgagatgcagcttgatggtgatgagaaaggtatggatgacgaggatttcggtagcgatgatgggcttgatgatcttcctgatgctcctaatgatgagcaaatggacgaaaagccggatgagaacattgaggaagagggtcctggtgacctgcctggggaagaggaagaaatcaatccggacgaagaagctccaccagaagaagaaaatgccaatgctgccgaaggcgaagacgaggcacaggcacctgctgaggagcccgaggaaacccagcaagatgaattcctcgctcaaagggatgacaatgagactgccggagaagaagttgctcccagcgaagccgttaatggtggtcttggtgccgagcaagaccagaatcaagaaaaaggagcttccggcaacgcacagcaacaggatggctctacagatccctctgtcgagcctaagcaacaaaccggtgctgccaaggagggtgaagaaaatgagaggcatagggatgcgggaggtggggatgataacatccggaagaccctcagttacaggcgtttaagaagctaggcggtgtccttacaaagacnccgca

SEQ ID NO: 3746 - DNA, 1592 bp, Emericella nidulans
tgactgtgactggaaatgtcggatatctttcttcttgcgagaaagcaggtcgtagtggcactcagtgcctacctgtatacaggtactgcatggactatctccagagcactttcgcttcctggtttggcaatttttgcaggctaccctggatctctttctgccctggtcggccatggtcggtagccggttccttttattcacaggaggacagaatagagaaatatacaggattatggcttttcagcctccaaaacgcttccttcctagctaaggcgtcacgtgtcaggtacctccaatcatttaaggttttccactatcaaccgaggtttcttgacttctcaattctttagcactaaagctgtcttaaagatcatctttcacaatgttctgactagtcttacaccatatttactatgctaagctgtggctcagaagtcatcgtacttccgtccgtcggggtagtgcatgagcttcttcaactcgtccaagtctggcattcccgcaggtccaggcatataatgcagattgtctcgatacgaagttccattcgtccatagctcattcctgcgtagagcatcggtgaccgatccttgatcaatatatgttctagcctccactatctgtccctcatgccatcgcgtcacccaaacattgaccacgtcgaaggtatcccctgcctggattagcgaaagatatatgagcagccaagaggcgcttggtacctgtattgagcagccctttgaactgaatctcttggacagaccaccggctattacacccgccatgaatcgcctgtgggtgaacctcgaacttttctgcatgctccgaaaaacaaaccgagactctccgaagcgcattaacgtagaaatggagcagatcgtggtaatgacccgcaaccggatggtggcccataacgtggaagtcgacgtccttgtgaacgtacgtgaagagcttgcccatgtccttctcaagcaccttgaacacgtcgtaaatgtacatctggctcacgaatttgcagtcagtagagggattctcgaatcgaaatccttcccttctgggatctggagggctatcgacaactccatcgccgttgcatcgaccgtccgggtcgactactcccgacccatcgcagccagggccctcgagcggttcctgggattgcttggagagtaggtaactggtccatagaggtagaacggcgtagccgggggcgctgataaatacaatgcagaccaccgccgcctgcaatagatgcttccaaatcattgggtcaacctagaccaatttcgttattgtcggtctctgtgatcaatagccgcttggttctagcaacttggtttaatatatatggccattgatcaccccaatttgctcttcaaggaatatcccgagagcattgtactactgaaatctgagtttgaccaacgcaaacacaccgaggctgcagaaaagaaccgagaggtgagcgagactcgtcctgctagtatgtcatctcacacattcaactaatcgcttgaggaggatagcatgaaccgaaagtactccgagtaagtcgttcctgtgatgtcacagctaactaatatctttcttca

SEQ ID NO: 3747 - DNA, 3312 bp, Emericella nidulans
gtagtacacatgtaggcttgtgcttgggcgcgtgggtttgtcagtgttgtgtaagtgctgtgtaaaatgcctatgtatgcgagatacgtgctgacggaggggttggtaagacaaggaccttggatgcgtgagaggtggggggaacgggactacgaagagaggagggagatgcgctggtcaccatggtagatcacattgatgagacatgtttctgtctaattctatagatcccggtgaggtcagtatgccttcgcgggaagcgaattctatcatatcacattcagtcgtcaagctctatgagcaggtatacgtttccaggcttgtaacgcgcagttagcgcagcagcccctccccctcttcactattaggcgcatgtttcaccatggctattgcatcctggcgccctcgctctgcattcaccaaccacactagcggcatcggtagtaggatcaagacgccaatgaaaatgaatccggaccggacagacccggtcgcatcgatcagggcgccgactatagccggacccacgaatgagcttcctttgtcggtggccgcgtagagcgcgtaaaacgcagcctcgctgcctggcgggataagctcgccgaacaaagagcgacagtacgatgccaatcctccagagacaaccccatgaacaatgcccaaagggaaaatctcccatggcttctgtagccccaacacaccccagtttcgaataaaggggatgtaagccagcatcccgtacaaggggatgatctcaaacagtgctatgcataaaagaatagtatggttggacgccagcgcaaaccgacgggctacgatcggccacaggaacgcgcccgccattccagacattgtcgccgtgatagacaagagaccaacagagacggtactcagatgcagttctgtccgcgcaaaaagaatcgcagttccagacactgtcgctatggcgtcggaaatcagaaaccacgcggccaagaataccacaacttcacgcaatcgcagtgcaaccttaatggtattccatagagacttccacgcaaaaccaacaacgcgtagccagacacgccatttctgacgatacccagcgccaggggtgacaccctctaacggagggccaggacggcttcgtaaccaccggctgcagacgacagtgaaggcagcccaccatatacctactagaagcaaaacaaaccgcagcggcagagttgggtgggatttgcccatggacgtcttcgacagcgtgaacagcaacaatatgcttagaatctgcacaaggacagctgcacagtaacccaagcccacaccccgtgacgagatgcgagtagagagctgcagttcgggcgacgtagagctggacgccttttcgggctcaacagccttctttgagcccgccgggccggcatgatcaccggtatcttcttcgtccgtccaagaccgcagcgagaattcgtctccttccgtatggaggtcatgaaggtcgtccttattcttgttcgaggctctttgtaccgagggatcatttgcgacgaggataggcaggaatgagttcaggacaacaaaagaggagccgaggcaggtgaccccgatcacaaccaggagcgctccgagtacgaagactggcggaacgatgagcatgaagagcatggacgttgcggatccgataaagccgaatgccagtaatagggcctttcggttattttctgcaccatatcagtataatggcatgatcacgggatatttacggtctcaccataatccgcaagagcactaaaggacacgagggtcaaggcctggatgagcacggcaagcgagaaggtgtacatagcaaaactcgccgtgttgatctccaagcccatcaacggacaacacaggcctcgttggccggcgcggttccgttaccggcagcgggaggcgcatctggaccgacacatggcagatgactggaagacaagaacccctgctcgcgggccagttgctctagggtgagggggaggaacgagcctgaagagtcagcaccaaccggcgaagatctctctagagtacgtaccgacaccgcatacggcaaacacctcggcagcgactccgtaggcataccatccccaaatctcgcgacggcctgtgggggaggtatcctccccgcggtaccgcaggaatcgacgctcaaagtccggctcttctgggagaggaggcgagctgggagaacgacgccatggtgaatgaccaggaagtggcagaagtcaaaccttcacgagaacagcattgctggaaagccagggcccaaggccaacagctgcggtggagcttgcagccctgattccttcgtccaacgacctttcatctttggttgatgacgacgaaaatcgcggatggctcggatgtatttcaccgccttatagtccggcagtaatttgcttacagaaggcggtggatatggccttttccgctgtgttgtgattggtgttttagaactataccagggcattgaagcaggaaagacatcgagagcgtgcggagaaaatacgcagtacttcaaaagctcaacgtgaagttcgataaggtagcaattgtcagccggttcattaacagcaccatcaggcaggctggctggagacaatttttatgtgttccctcgaaaatgcccgacacccacgcaggaaagagcacccggtcccggcctgacctccttcctgtttggggtccggttacttctttgccagccagctactcatttttttctcatctcttctctccttttcagacatctacgctctattcatcgtatttttatccgccttgcctctaatcccgctctcatcgccgaccgtagttcgctcgttctcgctcgagatgtttcgtgccatcaagactgtcatgtttttcctcgtcaacttgatcacctttgcgctgagcaggatcctgtaccgcattcgaggccacgattctcgacagatcctcagacaccgcgcgttcaggcattacccagagcccagtatcatactcgaagccccagaatgtggccaatctggctctcacttactcccaaaccacacctgtttggatgacggcaaagtcggcaaaatgccagagtacgctggagaccaccatcccatctcaatgtcaagcagtatgttctggtttgtgaggatctcgatgcacctatacctgtctctatcatgacccacggtctggtcttcggcatcccaccaaccactaccgaagctttccccgacgatattgaacaggacagaaattgcgctggccgtcttaccctcgcaggctggggttatgttccgaacatgagggggacacctt

SEQ ID NO: 3748 - DNA, 3613 bp, Emericella nidulans
tctatgttagctttgcacgtccgtgacggcaatgtgtcagctgctcggtccttgtggctgatgttaagcactgtgggtcaggcaacgtcggatatggtgcagccgactgtgatgtatgcagtcgctcttctgaagagtggtcgcaccgaggaatctcttgttgaggcgcggaatatgtttagccgcatccgctcttccaacgatctctcttcgaactctcttcgtgaacagatcaacgagtgtattcacctcctcagtcgtgttcttgtccagagcgctgctatactttcaacccaagcgtcaatgtcacttctctggttgatggcggagaacggcgccttgatctcaccagttgctcaacacgccgttgcgtttctaggacctctggagatttcgcagctcaattcacgcgatctcgctctcgcccttcaggttcaagctggaattctggtcaacaacagcgctatgtcttttgatgccgcacaccctattcgattctctcatatgttggacattgctctagcaacaggactcgcgatggattccactaccgtcaatctcgttgaccaagcagttaataagcttttcactagccggcctgacatggtcagccgatggcacagttacttgggcctgacatctagcccgtctagctacatttctggtccgcacacccctgtctcggagatttcgagtatgagctcggttctgagtgaggactcgtttgacccttatgcatacgctaccgacttcaagggatcggcgctgatcgctgatggactcgagagcactaatggtcggcccgaggctcacctcaatgaagctcttaataggctccgcaacatgcgtcgcgctggtcgacaccctcgctacgtcacctatgccaaacttattggggctgcagccaagaacaaccgcgttgatcttgtgcacgaagtcttgagtatggctaggcgtgacgttcctcttctgccccagtataaggctgttaagtatggctggacttctatccttgatgccatggttgccgcttgcttaaccctaggtgaccgtggccttgccgccaagtatcaccacgagctgtccgaacttggctctgcccctctgccaacactttcggcctgtacatcaccacattgaaggaatccaccaagacattcgacgaagccaccgaagccttgaagatcttccaccgtgctgttgcagagggtgttgagcccacatcgttcttgtacaatgctcttattggcaagctgggcaaagcccgtcgtatcgatgattgcctccagtacttcgccgagatgcgtgccaacaatgtccgacctaccagtgtcacctatggaactattgtcaacgcactttgccgtgttagcgatgaacgttttgccgaggagatgtttgaagagatggaatccatgccaaattacaaaccccgtcccgcaccttacaactccatgattcaatatttcctcaacacaaaacgcgaccgcagcaaggttttggcctattacgagcgtatgctcagccgcaacatcaagccgaccatgcatacctacaagctccttatcgacgcgcatgcttctctagaacccgttgatatggaggccgctgaaaaggtactggagactgttagggcatctggacaagaaccggaagccgtgcattatgcgtcgctcattcatgctaagggctgtgtgatgcgggatatggaagctgcccacgacgtgttcaagtctgctgtttcaaaccccaaggttaacgtgcagccttgcctgtaccaggcccttctcgaatccatggttgctaaccgccaggtcgcgcagaccgaaactgttgttgaggacatggtcaaacgtagggtggagatgaccgcttacatcgccaacaccctcatccacggatgggccgccgaaggaaacatccaaaaggcccaggctatttataacagtgtcgggattgaaaaacgggaaccaagtacgtacgaggccatgactcgtgcgttcttggccgccgacgaccatgcgagcgcttctcgcacggtgcaggagatgctctcccgcgggtatcctacggccgtggctcacaagattgccgatcttgtgggcaatggtgcagtcacagccactctctaaagtggttgttcagttctttgacgataaaagttgcctcttttcttcatatccagacgcccaccactgggatcttatcgcatccacacagggctggacccggttttctctagctccccagcccgacattaactatggacattgggaggcacttgaatgccaggagctcttcgtatttatttggacatattgcattcagcgggtatggcgttcgtcgcatttttgtatctataccactgtttgggctatggttctgcttttttttcttttgttcatttctttccatttgtttgatagagactctcaactctcacgtcaatgatatacgacgttcgacgatcatatgattgatagatatcgtagctcatagtagtgtgctattcagaaccgcttcgtctgatgcgtcatgccgggatctccccgatcccccaccttgacattctagagtctccaacatcagcccaccttgtccaacactttcccatcattgacctcgggatatacacaagcattagctggtcttctattctccttctatgagtcataatcgactgtttaatccaatcagacctctacgctggtcattcccacctcgcgcaattatcacaccaatccgtcctacttttcggccatggactctacgaatccgcagcacaagagaccaaagaagctgatatgtgcgtcaattcagctgcatcgatataaaagccatgattagatattaatctgttcaatatagttgcccccggcgacatcgaagcgacccccgagacccaaacaccccgtgccggagaacccctcatcccagcgtcggctctccctccacgggtcgtcgcagaagccctcagatctgatacaatgaccccaaacaccgaactagataataaagttctgtcgcatcccgcccgtgctcaccagttcgtgcgcaatcctccattgaccatctcccaactgcacccaacgaaccccctctaccagtttcatgcgtggttccgcgacccccggctagagcgctcgtcagcgccggagacgtgcacgctagctaccgcctctctgccaacaggacgcgtgagtgctcgcgttgtgtacctcaaggagcttgatgagagaggctggacggtatacagcaattgggggagtcgggaggggaaaggcggacaggtttttggatcgagcattggccaaaacggcgatagtggtttccctgactctatgccttccggggtggatgagccgcttgtccaagacctggagttaaaggagcatgggaacaagtgggctgctctgacattctgctggtcggtgttggagcgccaggttcgtattgaaggcaaggttgagccgctaagtcgcgaagagagcgagatgtattggcggacacgggagcgcggaagccagatcggcgcctgggctagttggcaaagcaaggtgctttggtccgctgagtcgggtactcttgtgagcagacgacgtaagagcttcgg

SEQ ID NO: 3749 - DNA, 2954 bp, Emericella nidulans
cagaacaggccatggataagcttaagtgaatgactgtgctgcatgtgacaatactgacaagggatgactgtgataggaggatattagtatttataagtgaaaacgagttacatgtgaagctgctagcatattttttcaaggagtcgctgttcttctctatacagcttgctgcgtaaggtcagtaggggcataattatcaacatctagataccgccatgccttacataagttatctaaataggttttttagtaatgtgtcttgagctaggaatccatgcattaggaatattaactcttcagctggcaaaacggccccaggcactgcaaggctgaatataccaggttggctgaagcaacacgcttcatattgattatcgagggttagggctcgtagattcttagatacagaccgacagttaaatccatgaatgtcgcttactatgagcggtcactctacgggttgtatctccgtttcggctcgccgtgggttgaatagggctatcttgagcactagtcctagcgatatatgtccaagtgtttgtctgatttcaaagcttgcattgagttttcttttctcgacctgtccttgttactacagtaatcaggaagatgggatttggtgcgtcaatcaacgatccagatgcaggttatcacctggatcttacccactagtattctatatactacttagacggcagtacttaccttactgaactcttgatctatcttagtacattgaccttgtacagcttcctgctcttcagggatacctacctaaactacttacatgccgagaagaaccataaaccacagtcccttacctgcactccccttgatgagattatacaggatgcacgatttcattcttcaggttacagagagaccccccaataccacccatggcgttgagacatagttcagatagccacactcagttgccccgaaaatccttaagaaaattaaccgggaataactacaccgtctcccttcctcatatacgcccagcatccgtcaatctcacaccgctcccaccctccgccaggcacttgccacgagtactgatatgtcggcttcgtctgtgccatgccaatgcatttttcgcagacaatcatggtgagctcaggttgagtgcaggtggtatggatcggtcgatcactaagtggatctcatatgtaagccgccggccagcgaggacagtggacggctagacttcagctgatttggaaagctcacggtcaaattctttcctttccttgaattattcaacggtactgtctgtagcgaatgagcagaggctctctgagttagcgacgcaaaggtaagagctttttcgtccggccgggaagggcggtgcttaaatagctttttctacccttctctgtcctacttgccctcgaatcctagccaatgtatcaaactgatagacgcggccaagctatcttctaagtttgtcatacatgagcttattattctcgcgggtagtcttcaatatggtatagaagaggggatttctgatatagggaggggtggcttggctcagccgctcaatctctatctgactcggttggctgtctttaccagcagggtgatatccaatcgtggggtgacgctcacttgattggacaggaaaatgtatgggatcgcgcaaggattcacgataaccacaaggctgttgcgtgtgagggtatggactggaagcggcatatgatctcgttttcgagggaatactcagaccgctgccatcgtcaccgttcagagcctgttttgatcgatagtcgtgaattcactgcgagaagcagtctgtctctgttctctatccaaaccaccacgtttctgaacgtcgagtcatgtagtgcggccatgagcagaatgaatggagaacatgaactccactacaaattatcattcccacatggactggcccgtcacgaactagatcctaagtctacccagaaccctacgaaggactctggggtctgagaatcggcattagtcccaaaggtgtgcaactaggaccctgatacgcttggctctccagctttgcagagggctttatccaggaaatgagataataagcagcagcaatactcgaatatatttaatcaacaaatttatttttagattattttattcattattttatttttattattattattatttttgtctactctattttttttctattgtttctttattttttgtgctgcttctctttcagccctaacctaaccacccccaggcatgtaaggacaaatgtccctaacctggcacctcaaagcagaagttttacccttgggatggagaaaataaacaatacacgagtgcttctcaataatgtcaagctgctgatagaaaaatcctaggttcgtctttatatctatccagaccgagtttcgaccggtgactctatttgctggtctgcgagatcactataccccatctctattatcagtaggatcgcaaccgatgaaatatttcccattgaatgaaatatcccaaggcgcactctcacattggaggttagtcccaattcaatcacgatcgaagagtggagcagcattcatttcggcagagggccgaggacttggctcacactatgcgcgggcttatccggccgatggatgctctgttcctaaccataaaccggaaagacaaaggacaaaaaggctttgttcgtcggatgctgctgcagtccaccctaggttgtgcacaaagagcatttgcagctaagcaaacgagcacagtcgctgccgaaagcggatcgatgtcgatctcaagcccaacgcggccgtcgcacagatcagagatcgcaaacccgtcacaaatcggatacggcaaggtggtttggagatgcgattgcgaccagctgcatctctatctttcactctttgtctttcacaaacaacgtcctgggtatccgaggttccgcgacggttcgcacatgggtaagt

SEQ ID NO: 3750 - DNA, 2411 bp, Emericella nidulans
actgctggcgccaccgtgttgaaaatggtctttgactactgccgtgattcccacaagcctgatccgttggtcgtggtggtcttcagaatgatgacggagttctccctcgtcgcggttcccatggcatgggcggtagatattattcctgctctccaatatcttccggtgcaccattcaaaaagacggcgcggaagtggagaaagtctattcaagcagcagcatatatcccgtaccgatttgtccagtctcagatggcagccttgacttacaagccatcgtacgtctcaaagctcgtgcagctgctaaagggagagcagtccgagttggatcacgaagacgaacaggcaatcatttggtcagcagccagtctatacggtgctgcggcggataccacagttattactcttactacgttcaccctagccatgatcctgtttcccgatgtgcagcgcaaggctcaggaagagatcgaccgtgtagtcggaaaccgcctgccaggctttaaagaccgcgaaaagctgccatatatcaacgcgttagtcctagaggcgctgagatggtggccaattgcacccatgggcttccctcacacagctctgagggttttgaatacaacggcctttatatccccagggcgcatacctcctccggcagttgggtggttcctacatgaccatcagtgtatgacaacccggaaatattcgacccagaccgtttccttgagccacgaaacgaacccactcctatgactgaggcctttggttatggtcgaagaatctgccctggccggttcttcgcggactcaagcctcttcttgaatattgcgcaatcattggcagtctttaacttcaagaaggcagtgagcagtgacggcaaagagattgagatcgacgttaagccaaagccaggcctcctcacgtatccgactaagtttgatttccgaatcgagccgagaagcgagaggcacatacagatgatcagagagctggaacgacaagaccctctggcagcgggcgatgctgagcacctggagagtatcgacaatttccagcccttgtagaggcgctgctagggatggtcaagaggaccaatgagaactgctaaccagtgaagctgtttctttaaggagtttttgttggtaacagttggactatctagggcactgaagaagctcatcttatgtaaaataaattagttccttgatcttctggcttcagacaaattgaaacattcccaaatacttcggttataaccgctcgtagtgacccttctctacgcgataaacgaatcatgggaattctactgcagaagccagtctgctaacatcatgccgagcatatgaatacccctcaatgacgtgagaataagtatatatggtgtttcgggttcattaatcttgaatgaactgtttgactcgagcggttgctcagtggtttagtccctgcatatagggcctcgggtcccagatgctctggaccaacaacagagacacatgcgcactttaatacgctagtgaggattaagtgatcgagccctcgtgttaagatgtgtaaatccgaatcccgaggctcatgatataatatacgaaaacgagacaaccgtgaaaccacagtgcggccgcgttgagcttttaagttacctagtcacaaagccgtttacaaagcatgtgttcaaaaacagcgaaatcatgagtcctagagatgttctctattattgtattactgccatattcttatttaaaatcctacagtctcagtcttataaaggcctagatggatagctgaacgaggtgcggcttcagcgtccagaaaatgggataacaaatgcaattgtatcccaacgtggggaattgccccaaccaggtcccctgattgttggtatgatgcgtgaaccacacccccaaccactttcgcggcgggcgtgccgaaatggtatatatatcgaaaaatctacggaggtcgagcccgccccttcccatgcccttgcccttgttcaaggttgtaggttgacaaagacggtgctcctcgcagacgcattcagaggtcgccgtcactgctgccagggccatcccattcaggaagggataccggaagatgtcgttgacacctagcttgatattacctgcatgtgaaactgtagcctgcggcattaccgcaatgaaatcgcgctgagacggaagtaatggtccgcgccaatggttgcgctgcgagttagacgcagggtgcgagccagagactacgcaggcagacttccatctcagttgccgccccgtgtttcagggaggttgcgctgctgacgtcgagcccactcatacacatctcgaccagggactcgacccagcgcaaaatgcgcggtctcgaccttgccgggcagattgaggggcagaggcgcgatggcgagccaatggtggg

SEQ ID NO: 3751 - DNA, 671 bp, Emericella nidulans
atacacgcctgatgtgttgcgccttgagccatcataaatgttaaaccgtactcatcggaatattcaagaattcagtttattattggcatatgcccaagtcttgactcctaactatgctgctaagtgcacaggtctttgagggcgcaggtcactgatgttaatcatccatcagcatgtcctgacaagatagatgatgggtttcgcagacgggtatcgatgcccactaattgttgtacctctgcgatgctgcatctggggaacgtggccggaagccgctgccatagggtactgcaggagccgtgggatgaggctgcgaggctggcggggcaaaactgaaatacagccttgctggctggctgatgaacttaaaggaccaggcgcttagcatgttcaaggctcatctagtgaatttaccgcacgaagttgcaggccttcccttccaatgttgacacccccaatccgccagatcgagtccacatccacacttgggaatggagcagaacaggactatttgtccgggatagactggctaacgctattattctggatggtctgcttcgccgtgatttcgacggcccagcccactgggagggtgttgagattgtcgtcctgccaccaggctattcttcgaggctcgtctatatttgcgtctgtgacgtactcggggttta

SEQ ID NO: 3752 - DNA, 4088 bp, Emericella nidulans
acgcctctgttttattcgagcgatcattccaacgcacaccccaaccttaatccttcttactccaaacgccgacgcaagccatcctcattctttcccacacctcgcgctacctaagatcctttcccggtcgtatccaacagcatggaaatacttgtcgttccgcttgctatacccctccggcacgcagtcgcctctgcggattatcctcccgggggcgtccgaccccagaacaccacgccagtctcgcccgtatgctttggaccagctgctgatgaatgtggtggtgccgtttagcccgtgtctaaaaagcctggagctggataacacggcggtatctggacaaatactcattgcgaccgttttaaatccgcggcgggagacgctggaacacgtctctgtgcgcgggtgcaagaatgtctcgctgaaataccacatcatcccatacctgaccatgttcgggttgcagtacgatgtcagcatggagaacagcattggcagctctccggccacgcagcgtcttgcgctgaaaagcctctacacttatcgatgtcgccatcaccgaagacggccttatctctcttcgtctcttacgcgaaaagattccgactctgaaccgactcatgaattggtgaatctctgtcataagcttggaatctggacggatacggcgtggtgctcgaccccggctggaaggtgtttccggaggcgaggatatgtggcaatgcgtgctccgcagggctcaccggaagtgtgggtggtgtttgatcggctgtggaggtcaaagaattggatcggcccaattgagggatcaagcagtcggccaacacagagggacggtaagttgtgggagcacgatgagactgggtgcttcggtgaagctcttgggaccggggaaaagagagacataggagaggggaagatgttgccagcacacttgcgtcgtagtcaccgacggtttgtcgagaatatccgctgtgacaattgctgcgagttggtttcggagcgatgcgagcagtgcagtatcctgatgcattgcgtcgggtgtcggaaaactctctgcgccagctgtgcctacgaacggccataccttcacgctcaagcgtcgaagaatacaacgacaggttctttttggtgggctccaggcgctactacttcgccctgttcgatgcacgatcctgctgagaacgctgaggatccagcggcacagcccaacacccctctgtcgtatcccgcattaaaattccactggtgctgcaccgagccgatattctctggaggcggaggtatcagcattggcacgccaaatcgcgatgtcgatcaagtccgcgcagctcccttgccccgtggcgagggctgggaagaccttgagtactccgcgcaggaatggagcaaatcgttccccaagtatgcctacggtgaccctcacaaaccggattacagccttgaagctggacatattgcaatgatgaagtggctgcttggtccgccagatcgacagccttccgcttgtcctcgaaatctctgcaaggagtgctatgacacgccccagtggaaggttcactgcaagacatgttcaaaaccgttatgcatagaacatgatctgcgtgggctacgcctacggatatgtggatatcgtgatcttacactagaaaagctagctattcagaaccgaactgagacgacggcagtatctcaaacggatgagccggcgccacctctccaaaataccgcaactacaggtttcgaccttccatacagaacgcagcgaacagttgattccactacgagcagtttcactgaagaccaccctgccgacgtcaacccgcaacccagtacaacatccagctccgcagttccacccctccgccgctcccgcagcatatccgcctcaaattccaaccgatcccgatcatcttctccatccatctactctgactcgcctgtggaacaacaaaccccgaaatggcaaggctgccaatctttcttctgccctcaataccgccctattggcgaccagcgctcccgctgcgccagcgtcctgcgcgaatgcaccagttgctctgtctttgtttgtcaagactgcgtgtcccgccatccaccttgcaaatgctcctactgcgaaaccaactacttgtgtccgaactgcgcgaaacttcgagaccgtgacgggacttgccgtcgtgcagaagaggaaaaggctcgccgcgagcagaaactgcagcgcgatatgcagacgttagagcggattctggagacgaagcttgccaatgaagttgcggagtatgcgggacaattctttggctttgtcgattcctcgaactcaacgggtcttcctaactcggttttggccgctagcgatgaagaagtggaagttgaggtcgatgtcgaggcacctcatcatccttctgcttcgtctccccaccacgtcgatgtgcacgaaagcctgcagcttcttcttatccaaactctgctaggctctaacgaataggccgtcgcggtcgtatgcagtcacaatacatcatgtacctacatgtccttgatacgaaccttgcatcagcaagcgtgagccttagggtctgcgcttgctctttttcttcgagaaaatgataccatggcgtcgtcggttgcaaatactttttcttcattcctgtgattatcatgtttctctggtcttcggcgaggtgcttcggatggaatggggtgggatgggtcggccggggtcaggagtgatctggtataatctgattccatttgatttcagtatgatcgattcaatatttctagctcgtctttctgaggcatctaatggcgcattttcttctgtgttcgattctcatttctattcattgttcgagtcgtgagcatctagtcttctaagtaggtattgtttcagcatctcagtctctagtagaatgggcagatcaacaagactcatactctactttgcagcgatatgccaagttctagtatttataataaggtctacatgagcaagggtttttgttgtagtgtgtaggtggacggactatggaagcacccagaacaacaaacggagcctcaacatgccccacctccgctccgcgccgcagctcctcgaaatatcgcagctaattccaactttctccatttcccttcttcgtctctcgaacttacttactcaaggtcaatctataccgcaagatgtcggaacaagaaccgtcttctgccgacctcgccgcccgcgaggccgaagaaaagcaacgcaaagccgccgaagaagctgagcaggcgaccctcccctacaaatggacacagacgatccgcgacgtggacgtcacgatacccgtctctgcgaacctgaagggacgcgatctggacgtcgtgctcaaaaaggacagcattaaggttaaggtcaagggcgagaacggggaggtctttattgacgtactacaaccatctcccccaaatctccacgcagcgagggctaacaagggtttgataataaagggccaatttccgcaccccatcaaaccgtctgagtcttcctggacgcttgaaacaacgtctaaacctcccggcaaggaagtcagcatccaccttgacaaagtcaaccagatggagtggtgggcgcacgttgtcaccaccgcgccgaagatcgatgtcagcaagatcacgccggagaactcgagtctgagcgacctggacggtgagaccagggcgatggttgagaagatgatgtatgatcagcggcagaaggagatgggagcgccgaccagtgatgagcagaggaagatggatattttgaagaagttccagaaggaacatcctggtatgttgtatctatgcatctgcgcgttcttattgttctggagtgaaggtggaatgatgcgagcattgtgctaatgttactgagcttttgcagagatggacttttcgaatgcgaagattggttagtgacaggctaatgctaatgaagtttatgatttccctacctcgacttaatgtgctctatataagcatctatcgactttgaatggacaggctattaatccagtgtaaaatcaggctgaatgaggctgaaggatgcacgggacaacaatggatcggtg

SEQ ID NO: 3753 - DNA, 817 bp, Emericella nidulans
gtccgcgcgctcatagagctgaactattagatcgtcgaggccattgcgactggatgggcggagagtggctgatccaactggctgcgacgagaggaacgcccgtcgctggagcatccgcttggtctggacattctcgataggggtcggggtgggtgtcagactgcggagagcggcggctgcagccgcggatgagaggttactggacgagggttgcgactgaatgaaggcacgggtagcggccgattgcgcattctgcgtattggaagtcgaaagctggtgctgatgctgggtatgttcggtaagccgttgcaaacaattgtactggtctcaactgggaaagggaagatatcaaggaactgagccggacgacatacccgatgctgtgaggcgctcctccttctgcgaaacatggctcagcgagcgtccgcctgaaagcgacgcgaagatgcaaaagcagtctctgggattgtcgattcagtcgcccaggtcgggggttggcagaccgcgagatcgacctttaaatgaatggattagcgcaaaaaaaaggcggagggtcggaggcagcccgcaacgcgacaaggcagcgagcggaaggggggaggaatgaaggaggagcctggaacgaaaagaaaggtaatgatgatagagagaaccgaaaagatacaaagaagagagaaaaaataaactagagatacaggaccaagaagcgaaaaggacgagcccgatcgatgacgatgattgcatgtcgtggtgagttacagtaaagcagcgaggttgaggactgcatgttggagctattcccgatcagggcgttatg

SEQ ID NO: 3754 - DNA, 5205 bp, Emericella nidulans
  unsure (1)..(5205): unsure at all n locations
tttcaacactttcaacctttatgtctaagttgcaggagggtctacttgtgactattcctaaacctgtttatacttaacattctatttccccctccctcctctttcctccaacactttctctcacacgcctttccccgcttctgatcgagggaccatcctcgaatccttggcctcactctatcgctgccaaccatttacatacatgcatgtaacatcctcatcacacccgcccctctgtctggtcgctttcccttcaacctgcagcgctacttccacgctgtgggatgtgcccgtgtcatcgtcactttctggtgtaacagactgctcgtcgccagcgacttgacaggccaatctccccggaccgttcttgcgcggcagacttgctaatgtcctaatcatgcgtatgtacagatgaaaccgcgcgacgtgattggaaagcttgcacattgaccaatatgtcgtaagttccatcctcgttcttcactgggtccttgtggtgcccaaaccaaaagcctattctcttgtcaatctactctgttgggggtgtatatactttcgcggtatatatacatctgtatactactatctactcatatatatatatatatttatatatgcacgcacatattttttattctttctgcctgttccatcatcacttctcaacttctgagcgtcttcaaatcgcttgaacacaagcagaacttttttctatccctgggggcatttactgattgttaaccctgcctcctttctccttcatcaggtcagccccgagttctaaacgggtcaaaacctctgcccctgtcagctcacagcaactcctctctcaacagcaacaaattccccaagctcagccttctcaacgcgtagcacactacgagggcattcctatgcccccttctcagaatcccgggtcgaatccgcgtaaacgacgtttgtccccccctctaggatcgactgcaacaatgactagtacacctggcgatgatcctgtggctccagcgccggagaacatgcctaagaaaaaaggaagaacgaacactccttggactgccgaggaggagcaaaggctgaagacaatgcgcgatgctggtcgcagttggagcgagattgccaaggttcgttactagagcaacttatacctacccagtttcgctaactgatggtgctttagacatttcccaatcgaactgagggtagcgtgaagaagcattggtataaagtgcgctctacccaccgtgaaattgtggctagtccatttaacattgatctaggacatgcactacgcggaatttgcggaagatgaggtgggttacatttcgttggtatggctcgttgcggactattctaatgatgaccacagtctatagccctccgagaggcgatcaaagaatatgaggcaaataagtggaaagttatcggccaaaaagtcggaaagccggccaaggtgagctctcagaggccctagatacaattatggtctcagcctcgtaacgcatggaagttcaggcttgcgagcaatatgcaaaggagcattttaaagacacctagatatcgaacggctgtgacgacgtaacgacaatcgcaatgctcttctggattccccctgtcccttgattctatgccgctgcttcccacgaccagctttctagtctcagtttgcaattacgagcgacgtgttaccggtgtcattcgtcttatgcctattttctcgccgttctcacttggctttgatgatcgggtatactggggtcgggacgttctcaagatacattttgcagagaggcaacttgggttaacgacatgctttaagggcaggacaatgactcaagagatagacttttaatgcgaagtgattttaacctagcgcacaaattaaacttgtaactcggtgaacgagagacaagtagtgtaaatgatttaataggcagggcgcacaggttggatccgatgagcggagagattaacttgtaatttctcgaccttactggattcatctcttccccaccactcaacctagaatttgtcgtcctcaaaagctgctgcccgtgagctgcgcatcgcgagttttacaagtttatcctgttgaggtgaaatctagatctccagaatacccacgtccgacttagaatcactactgactttaaatggcctgaccccagattttgtctcttgtcttccagtgtactgcctcccgtctttccgatttgctatggccatcatgaagccgagtagcgtggatttgtctctcgatcaaggtatctaggtaatctgcctgcatgatgaccggtgttcgacgactgcgtgccaactgagcctgccattgcaccagcgggcgtgcagtcgccgttctgagatcatacggttgaacttgatctggataattccagcgaaagaactcatgcgcgcgaccccttacttattatcgcgaaccaaatgctaatcaatccatctagcatggcctccggcgccgcaacgtctacgataggggaagccacgaaggagattcgcttaacactctttgacgaaccccatcaccatgaagagggagtcgaatctcgcagggcaataggaggtacatcctcttctcaacggctcacctatcaccttaagaaagtcgagaaccggcttgttcagtacagtctggaggcccgcggcatagaacgagtgcaagaagacgaacgcatcccgcatatatcttgggtttcgtacttgcaggttttcctgctgtggatgtcggttaatctggcagcgaacaacatcactcttgggatgttgggccccgccgtatttggcctcagctacctggactctgccctttgcgcagtatttggggctctcttgggctccatatcttcctcgtggatggctacatggggacccatctccggtatacgtactatggtgcgtttcaccttcaagccctgatttggcttcactaaacgagtttaggcatttggacgctatactatgggatggtggcctagcaaactcgtcgtgatattaaacctcattcagatgatcggatattgtctgatcaactgtgtcgtctgcgggcagattctctctgcagtatcgccgaatggaagtctatctgtggctgtgggtaagaatgcctggaaacttctcatcttcggctccggcaactgaaccaaacaacaggtattgtgattattgcagtcatcagctggatgattgccacgttcggaataagggtcttccattattatgaacggtaagcgcaagtcttcaattagggagacaaaatgatctaatgtgtgtagttttgccttcctaccccagattatcgtcatcagtattctgttcggcgtttcgtcttcaaaggtcgacctatctacaccatctcagggagacactcgcacagtgataggaaatcggtacgctgcttcgtgccttgcattgcaagtgccctttctaacagagtcttcacactagcatctcattcttctcgctctgtgtcagcgccgcaattacctataccccattagcggccgatttcttcgtctactatccggtgcgcacatcgaaactcaaactcttctccctttccattctcggcctccttgtctcgttcaccctcgccttcctttgcggtatcggcctcgcttccagcataaacattcatcctgagtacgcagcggcctacaataatgggcagggcgcacttatagtccaaggcttcagctctctccacacttttggcaacttttgctccgtcatagtcgcccttggcctaattgccaacacgattgcaccgacctactctgcaggggtcgacttccagacgctcggccggtacgccgagaaggtgccgcgcgctatttggaacacctttggcgttgtgatttacaccgtctgtgcccttgctggccgaagccatctcgctgacatcttcaccaacttcctagctcttatgggctactttgttgctatctgggtcgccatcgtcctcgaagaatgtttcatcttccgtcgccgagataatgaaaatggctatggttactataattggctcgtttggaatgacccttccaagcatcctgttggcattgccgcgctgattgcattcttgacgggttgggctggcgctattctctgcatggcgcaggtctggtatatcgggccgctggcaaacttggttggagaatatggtgctgatgtaagttccccgttgtcctttgcgtcataaagttggatttagagatcgtctaacaaatattatccagatggggaactacgtgggtttttcgtgggctgctattgtctacccgcctcttcgctatctagaacgaaggcagtttggtcggtagatatatgtatctgcccgtctgtgctaaggagtcactttcaatacaccgattcagtatctagcccgcatggctgggcgctgtatattgatcggacagtatccctttaatataggacgaaagcacttggaggaaaggaacgggtacagcatttgaaggaagccactcaggtttcaaggttactagctgtcactgtccttttttattactacgcgtcaacagtcgtcctctcagtacctaaaaatatcacccgcgcagaaaattgcacatgatacaggatgtttagagcttgacctgagtaactcaatgctattatagcatggatcgaaagtctgatggacagccttctctggtgatgcatctgcgtaccgacttgaacctcactgccatcgtatatgttttggaggtcaggactgaaatctattgcggagcactgccactagtacgtaatgacttaaacacatctccattttgtaaacccgttatcgatttgcaaattgaaaaagctatggttgggtgtaagttgctactgctattttcttcttagatttctcactcaggaatcttagtataaggagtggctgatgacaatgcccgcgcttttaggtcgttcctgctacccttggtgtccgagctagggatatagtccataaaatcataaccaagtacttaagagccaattaatagctattatatcagtgaacgaattgataacttcgaaggaagcacccagctttatctcgaaaaatagtcatagaaacctgagcaaccttaaaaagaaataggaagtaaatataacaacagctttattcatcttcactaatctacagagaccaaatgccangattcagcaacangatagggatacaaccac

SEQ ID NO: 3755 - DNA, 4675 bp, Emericella nidulans
tatgccgggaaccaatatttctttgaatttttgaagaagtgatcgtgactatcgagtgtcgattatgtgctcacgagtcacaacccagggtttggggctgtgttgagcaacgcgggtgtctggcttgaggccggaaaaagctcgaagcgacttttctcgctgttggcccgtgcaccactccgcttggcgtccgccgaaaaataatttctcctcagcaacttttctcagttttctctctgcgttccgccaactttttttttactccccaccttttctccttacttccccttcaataggaggaatatacacaaaatgggtacagggaagaaggaagccacgcgccgtgtccgccagggcaaggttggcgatggcatggccaatgtgagggtcaagggtgaaaatttctacaggtaagcttcgttccacatatgattggcgcagcgactaatttgcgaagagatgcgaagaaggtgaagaggctgaatatgctcaaggatggcaagcctcaacgtgacgccgccggaaacatcactgttgctgcttcgtatcaatctcgagaggcaccggtcgctagaatagaaccaaaccggaaatggtttggcaatactcgggtcatctcacaagaggctttatcctcgtttcgtgaggccgtcgccgagcgtgcctctgacccgtatcaggttctcctcaagaccaacaagctcccaatgagcctgatcagagacaataagacggtcaatggactcaagcaacatgaggctaagatgacaattgaaacatcaccatttagcgacactttcgggcctaaggctcaaagaaagagagtcaagctgggtgtctcgtcgctcgaagacttggctggtgaaacgatgaagatgcacgatagttatgttgagaagtcggaacaaggtaggcatgaggacggtactccgatcgtcgctggcgatgatgtggcgacagatctctcagttggcaccttgccgacgtctcgagaggcagtcttcttgaaaggtcaaagcaaaagaatttggaacgagctgtataaggtcattgactcgtctgacgttgtcattcatgttatcgatgctcgcgaccccgagggcacacgctgcagaggtattgagaaatacattcgcgaggaggcaccacataagcacctgatatttgttctgaacaagtgtgatcttgtgcccactggcgttgcggtaagtcctattcatttcattagatctcttctctattcgcttaacccatccattggcctccgccatgccatcgctaagtcaagtctacttctgtgaccttgtgtcacgctttctcaatggaagtattgtctgttacagctttggcagattaacgctggtccgtgccgaatttcattctgaagctaggctgatcagctttcgttttgaaagctggtcgttaaggactgggcagtgttctgtttttgagttgagtactgcttcgccatcggcgtcttcatagcagagctcttagtaacatttcacacatcgctatttctttttgctttttttatgggggctttcggttttgcttcaatttaaattgtatgctataatggtgtgctaactggtacactaggctgcttgggtacgtcacttgtcaaaggactatcctactcttgcattccacgcttcgatcaacaactcttttggtaaaggatctcttatccaactcctgaggcaattttcatcactccactccgaccgaaaacagatctcggttggtttgatcggctatcctaacacaggaaagtcttcaataatcaatactctccgcaagaagaaggtgtgcacagttgctcctatcccgggcgagaccaaagtttggcagtacgtcactctgatgaagaggatttacctcatcgactgtcctggtgttgtcccgccgagtcagacggataccccagaggatattctcctccgaggtgttgtccgggttgacaacgttgaaaaccctgagcagtatattccggccatattgaagcgcgtgcaacccaagcatcttgagcgcactcccggtatcaaggaaacaagcgacgccatcgagttcatcagcattctagccaggaagggcggtaggctccttcgtggaggatgaatcaagatctcgatggcgttgctaagatggtgatcaacgatttcctccgaggcaagattccctggtttactccccctcctttcacacctggtgaggagggtgagaagattgaaggccgcgaaggcagactcggtgagatgggcagaaagcgcaagattgaggagacatctcaggatgcgagtgagggtcaagaaggccaagatcagtccgcttctgactccgaggaagagtttgggggattcgatgacgagcaggatgatagcgataatgattctattgcaaatcttgaagtcagcgatgaggaaagcggggaggagtgaatgtcattgtcgcgcggcaacctctaacaccttacaacccacacaagcagcgtcagtttccacaagtaaaatacttggccctgctatttgacgccaggacgtcgcagaacgtcctgcatacttagctgtcgctttctgcttggctgttcggctggcgggccatttgacagctgtacagccccgaggcgcaacgtggaatccgtggcgctgttcatctcaacctcgaataacgataggcagtacggagcacccacagcgtcgttccaatctgtctgggctgttgactgtcgtacatatgcccaaagatgcttccggtggaagaacgtatagtcgagtccatcgatgacatcattcatttagatacccatgtctctaccgaatctatagcaatattctggattcttatgataggtaaataaaatgtataggaggcaagcagtaagacgaattggctggacactagctcaccgccgtcacgtggggcagtcattttcataaatccccaccgagcggcgttaccagccattcgttcatatcatgggcaactgcctcactttgtggaggacggatcacctcccttcactttaaacgaccataaatctctcatggttacgggcttttaccctcttgccttattgggagatatgccgccttgattgataatggcggaggcggacggcgccattgttccttactcctcatctaacgatgttgttttgtaagcttcagcttctcaaccgctattcaagcgtaaatcctaattgaactcgttccagacgccatgatggatcggttgtcgtttatgatccggtttcgagacaactagtccttcaagatgcagccgaggctgagaagcacgacaatgatccgcagtgtccatactgccgcaggccgttgcgagacgaggcctctggtcaagacaactaccattccaggacgcagccagaatttgtcaatcccgaatatttccgcatgctccataacagtcttccacctgcctcagtagattcagctacagcccagccgcaatctcgacgtctagttcagcctgtactcgccgatagtccttcaagcggatcgggccagtccagggtacctaacggacatggtatctcatcggctgcatttactccagactacttcaaaaggttctttgtggaagaatcggtgctaggaaaaggcgggaaaggtgttgtgttgttggtgaagcatgtcctagacggcgtgtctttgggtcattatgcctgcaagcgcgtgcctgttggggatgatcacgagtggctcgaaaaggttttgattgaagtgcaaacactccagcacctctcacatcagaaccttgtctcctaccgacatgtttggctcgagaacgcgaaaattacgacatttgggccaagcgtcccatgcgcgtttatcctccagcagtactgcaatgcgggggatcttcataactacatttgtggctccatgcagacatctacgacgcctcaggaattgaaagagcgcattagacgaaggtctagaggaggccccgaggctcctcttggtctccatgaacctcgcaagctacattttgatgagatttactctttcttcaaggacattacttcgggtcttcgatatctccatgcaagcggctatattcaccgtgatcttaagcccaacaactgtctgctgcacaagactaacgatggcatacgagtcttggtcagcgatttcggcgaggttcagccccaggatgcaatacggaggtctacgggggcgacaggaactgtgtcgtactgtgctccagaggtgttacggcgggagtaccctaatggccccttcgccaatttcaccttcaaaagtgatatcttctctctcggaatgattctttattttctgtgcttagcgcagcttccgtatcgaaatgctgatctcatcaatgaggagaaggaggatcttgagaaactccgtgaagagataatggactggcctggttttgaccaaggaagaatgcgccctgatttacccgaacaactatatactttcctctggcgtttgctgtcagttgaccccgatttacggccatctgcgaacgaggtacttagtggcctcgaggtcggggccaatgctaatgagaacctacgcccaaaacgtggcagcagtacctctcccgcgcctgacgtgcacagcgcatctaagattaaccctcttgatgatacgaccgatacagtgtctcccagggggtttttttt

SEQ ID NO: 3756 - DNA, 1485 bp, Emericella nidulans
atgtagggcgctgttcattatcacggttctgtttttcccaccacacgttcctgttacggcagagaacatgtatgtgttttttttgtcctcccccttttcaatttctggtgccttcagggtgattgttttgctgacctaatggcgcaggaactatgcggtatttgttgggctcttcattgcaatttttgcgctggtgtggtggtggattgatgcgagggggtatgtccaaccttttactgcttattttgcatctatgctttcttcggaaagactaacattgtatagaaagtatactggtccccggacgaacgagtatttgcaggagattcccacggaggaatatgcggagaattacgggactatagcgtgatggctatgatagacagaattactattgattaggcacagatagactttagatgctggacactgttgaacattgcgtccattagtacctacaacgttcatagaagactgttccatcaatactacatcttatttccaatgctgagaggtatcgtatataaagtacaaggggatgaactgaaggagaggccctctccatatgatgaatagcttgggtaagattccgtaaaagtcacataatcagcctaaccgcccgccacaacagcaagcccttcgtagatcttctgtttcacagcaaggaagctgccagctccttgcgcaaagcccgcactaggcccagcctgatatgcagctgcctcgatctcaattttcccggttcctgacttccgaacggcaacgaaaccatcaatgaggagcgttccctcaccccggaattctgccttatgaccggcgttttgcatgatcttgcgcaggtccgccaggcgaagatcgccgacgtgcagtggtcgggtcattgatcttgtcccagaagccatatttggcgggaggatgtcgaggacgggatacctgtcaggtttgtctgttgtttgttgtggctcggtaggttggggttgaaatgttggtgtgggttgttcaggggtcgaggtttcttcgactagcttctgcttcttgttgggcgagtttattgcgtcttcgtcggtagatacaggctccggtgccttcagctgccctgtcaaagtaactacaccgagcgtgcgaacgtgctgccacttcagtcgccgcacgaggttgttgcttagcttgactgtccaagcgctggtgtcgacgctggcatcgattatttctccgttggtgggcgtgaatatgaccgcagccgttggagaaggggcatctgcaccagtttttacgcccagaagtttctggcattctgtcgcaagcgccattgtttcctctttcatgccaccgactaggatcaacttgcgtggttggatcaaggggatcaacatctccaagctccgcttgtcgtgtaggccagtaaagtccacaaatgcaaggcgagcattgatggtaagtgtggccttttcatagactgtttcgctgggccttcgaatgcctgat

SEQ ID NO: 3757 - DNA, 1616 bp, Emericella nidulans
tcgccgagtattgacgcagcgtatttgggccgttgtagtatctacgggatggtgacgagcgtcggcgatggggataatttcaggatctttcatacgcccggtggccggcttgctggatgggagttgttaccttggaagagaataccaaaggggaagaaggagctgagggataacacggtacgtttttgactacattttttggctatattctcgactgcgatcttgcctgcttgtaaagcatgtagaccccctcgtcaattgtcgggacatcgtgcaaaatcttgagagttactactagctaacctttgcaatcacgccctagatccacgtccgcttagcaggcattgacgcgcccgagctcgcgcactttggccgtcccgaacaaccgtacgctcgcgaagcgcacgaatggctaacgtcatatctgctgagtcgccgtgtgcgcgcttatctgcatcgaccagaccagtaccagcgtgtcgtggcaaccgtctatgtacgtcgcgttcttgatttcccaatcccgttccgccggcgggatgtatcgtacgagatgctgcggcggggacttgcgacagtgtatgaggccaagtctggcgctgagtttggaggtgatgctattgaagctaaatatcggaatgcggagtggtgggcgaagttgaaggggaatgggatgtggaaaggattccggcggaataaagagttcgaaagtccgagggaatacaagacccgggtaggcttggaggaaaaaaagtgaacgttaatgggaatatcggaagtgatggaggtatggaggttggagtacatgatttcctaccggtttccggctgttcatacttgatcaaaaatgtcttctcatgataacctggttgacacttgaacatatctctggaataagggactacgagctgcagagtatacgccaaagaagtgagagaatgatatagaaaatgcaacctcgaaagaaggaattcaattcatttcccaagcaacggcgggtatatgtgtcccagtatgggaccgctggtactggcgttacggcacagtataatatagtaaaagtacaagaacgcatctatggtatgacccaagccataatcagcctagcagaatttccgctcaaactccgctagaagcttcggagtgatctcgtcactggagttgccttccacgcgccaaagacagcccttttgttgatagtgttgaagtagagctttgcttgtttcttcgaatttatgtagtcgttgtttccatgtctctattgaatcgtcttccctctgagtcaatggttctcctgttacgtcgtcctttccggggacctttggagcattgaaatcggtattgtacacccttccagacggctcgtggacccagcgcgacgctatccgggagagaataatagagggtggagtgactaagtggacgacaaagttgatggggaccagggagtccaagctcgcggcctgggaggcggtgcgaggaaacccgtctaagatgaaggacgctgagggggaaacagacgagcctgatgattgtcccttggagagccaaaccctcccgttaaattcggaagagatgaggaaagaaaatgagcgggacaggtttccgcataatgg

SEQ ID NO: 3758 - DNA, 7884 bp, Emericella nidulans
ttccctgacattttaaagagggcgtgttaatagattggattcagaagaacagacacgagagagtgacatacattttccataatcacatcgtaggcttagatgcgatctgttgcgacgaagaggagggttttgtcgtcgacttggtacaggtcgcgaactttgccgcgagcgatgagaggcagcgaaccctggaggtcggttgttgtgagggtagtttccattgtgagaattggcgagcagagcgactcaatcaatgcctggaggaagtttggatgaaagatgcgtcactgggaattttttggcggggttgacttcggcggagaggggacgattgcggaatcggaagtactcaatgccttagccctcaggctttacgtccagataattcgaaattgcgctagaaaccttctgaatgaaagttagggtatttattcatatattcaaaaaaaagaaattttacaatatactcttgggcctgagataggggtagattagtctgccacaaccggatagcccgctcctgtgctggccggttgttttcatacttcgagtacatccacaggacgctccagacggtccgcgaattcggcaacgtcgcctgcacgaactgtgtcagcctgtcgaggctgacgttggtatcgccagaaccaaaaaggccgctccttacaggctcccagagcgtcgtcttccggtaaacgagccgagagaatcaaattcctcattgcaggagacgggcgaatagtgtaggcaacccaattgggtgcgatgaaggtgactgcagtatctgtcgttggtctccgaagccattggtcaaaatatcgcagttccatcacgtttccgtcgcttgcacctcatgagtgagacaaaagtcaccgcgttctttgttattctcattttcagccttccatttagcgaattttctccgaagggaccatcctttcagaaacggtgagctgaaccagcgacgaagacggttttcccataatgattcgaaaatctcccaagtagacagccaatgactttcctgatgaattgccgtgtatgcaggagtatttaaccccacccggacaaaagggtttaggtaaacgccccttcgcttagagatatagctgtctgcgtgtatcagacaggattcggaagccacaacatgtttatctgcgaggccatcaggtacccctcgaaactgatacacccgagtagaatagatttcttctgtacccatgaagactgaacatagggcattagcatccgcaacgagacttcgatatgtacagctgacatacccatatctccccaacaactcctaacaggaactggcagcataaactttatagcttccctcgacctggcagagcggaaaacgggccacttctgcatgacggtttcatgcccgtcggcgtctcgtagggccagtgcgtcagggccggtcggtaggttcagtatatcgaacgaacaagcggctgtatatgtaccataattggtatttaagagagagagtacgtcttctttctggagttccaaagatgtgagctagagaaaagagtactcggagatgcgccacccaccgtgaagtcgacatcactcagaaacaagattcggtcaaagaacgtgccagcatctcgaagatcatatagaggtttcagagacaggttacgtagtcgagcacgagtagcaatgtgcctccggtctgcaggcgggttcttcaatgcttcattgtctggagagggttcggcgatggtgattgttcgttgcacccctacttcatccaacgctttatcgagcttacgcaaagcatatcccgtgccatcattgcttccgcttgcatatacactgacaaatatgttgtccgctccgaaaacattggctagctcgatgactgcgtcgttccattgacttgaaatggtccgctcattatcccagagagcactcgcaatgaatattcgctgtcgctctggcggtctataatccaggtgaatttgctccttgtgaaagtttcgatgaacaaggaaaatatctgctgagctccagagaacgaacgtgagcaataaaagttggagaaggcgacgacggaggagcttgtggttgcgcgaagtatgccggaaggcggagacagctagaaaggaaagtccatttatcaaggactcgcatgcgtctaacacacgcatttgatttagcagtaacaatagccagctcgtgagcttatctggacgatcacattaggcctaggagtaagtgtcgtgtgagtttcttgcctcgtgcgtggtgtcgggattggagtcggactgccgacgacgcgaagccgccaagacccatcctctacggtaagtacacaagtcgagacctattgtattaattaggtagaacaggccctatcttgcccgcagaattatatagctagctctaggtaggagtttatgtcttagccctgccttgcttatactagcttgtcagctttctgcataaggctcggctggttgttgcgcgtaacttggagcccttccttactgggctgtattggcagattaagcatgtgtcccttggaattaagagagaaacgtggccggggattattataagtaaatcaaagatctcatatattgtaagggaagacaggattatagaagcgtggtttcttagcagtaagtggattaacttacgcaatgaactagaaatatagcttaacataaaagcggttttatcaaccgttgctgaatgctgcaaatagacctcgccacaagtagttggaaaatagtttcaactatagcttacaactagctaaaattgtccatcccaaaataatatcccaaaaaaatccgttgacggtatattaacaggagtggtgagtaatgcataactatccatcagccgctcgatcaactagttaatttggagaggctggaaaacgaaacaaagctcaaacccatcggagtccaatatcttcacagtactgatcgaaaatctgagaatcgcccgagggctctgcaacagcaacataggtatccggcctgatcaagtatgctgcatcggccattaatccgaccgcttcgtactggccatgccatggaaagacgtgcaaaggaatcttcctgctctggcaccactctgtcaattccgacttcgcgatcccgtatacatggacctgccaggtgatcgatttcagggtctcaaaattgtcgatgtcgccagcaactgcccatggcatccgactacctccgtgaacgtacccagcgctcccagtagataagctgctgtgtggataaccgagcatgatctgggacactctccgaaacacgtagtgcctgacgtactcgattttggcgagcaaaggagcaatataaggcacaacatgagtccgcacggttcgagccagaaagctctgtgagatggcagcattgaagcctttgtctgtcgtgctgaccaattgaagcgcaaaagcgcggcgctctgtctcatagctttgaagcaacgataaaccagcttgtttcttaacaaccgctgataacttccaggcaagattgattgcatctcctattccagtgttcatgccctgtcctccgactgggctatggatatgcgcagcgtccccaaccaggaatactctgcctttggcgaacgacgccgctacgcgatgatggctccgataagtggagaaccagttcatcttgtcgatctgcatcttgaatgaccgctttatctgtggagcgatgtcctcgaagctgatatcagtaccttttctctctgctgtttcgtcatcaatagcccccgaaatgcgggcccgatggtcatcatcatatgggaacagcaacataaactcggactcattgaagctaacgtgcgcttcgccgttgaaagttggcccggctccctcaatatcggcaacaaaaaatgtatgggagtacgttgcaccgtcataatcaattccggcggcatgacgaacggttgaatgcggtccgtcacagccgacaatgaaggccgcttcgcatgtttctatatcattttcgtggtcagtggatttcaaccgagctgttatggaggagtcgttttctgtgaatcctatgaattccagacctcgctcgacatggacgccaaacgacgctaggcggttctcgagcagcctctcgtgttgatcctgcgaaaagatatggatgaacgggtacggcgtaagccctgtgccaatatcgccgatgggaatatgtccccgatatgtgccctcccaccagatattcgttgctctgactttgtgcccattcgcaacaacctcttcagcgatatccagctggcggtatagttccagtgtccgtgcctgaatggctagtgcccgggaggtcgaaacatccgcctttgctttgtcgatgatgcgaatagagatcccgtgcgtggctagccacaatgctgtaacaagaccggacggaccggcgccaatgatcaagacgtcaggattgctcgtcatcggccgtaagaagtagatgtatcgtgggtgagaaatattcgaactattccggtagaactaaggtgaaataatacaacaagcagcttgctgagaatatacgatatatcattgagatacattttctgtaccttggtccaatccattctatttatacttcctcgattcaataaattgagaccctcaatcacttcgcagtttgaagctgaaggctgtgtatcggggctccgactgtccgacatttccgctcggctgccgttgtggctccgaggcaagctcatcctcccaattctttcccttcagtcatttgcccatgactttttaagaaatacagacaaaagcgtcttagctggttgaagcgtgtatgtggtgtcttgacattcgtcatttaccgctggcagctccttggctaggaaactaccaaacctggctgcgcaaacgttcgcttaaagacgaccaaaaatgctacattttgttcttgcgaagcggtcggaggtttagcggtcattccttcattatacatgtcttctaatttgtggtttcagcactcccaagctagctgtaactggcctttgatattcgaaaataatggaatcttgtttataatcaatcaaaacggcggatgagcttgtggcatacaaaggaaactcaaagaagcatagtaatagccgatgggtaactgcttcgccaacagagccttgtgactatatgttccggattcgccctccttcctgtataattgtacatgtctcgtatttcgggttggcgtagtcctaactcacgaaaaatcacttaggcggtcttgtccttgttgtggtagttgacattggagttccagctgcgaatagttagtacttgactaaaaataaccacggcccaagcgagggctcggatcggaagagcgtgaaattgacgcgaacggtaggcttacaagatggtctgcgacagcggtttggttagttacttggccggcaatgtctgtattaaatcgtagactgaccttgtcaccgtctccccaagggaagttcttggtgcggatgttctggtaggggtactcggtgcgttcctcaagaggaggcatgtgctcccagtgctcccagtgctcgttccactggacataggcgttgtagccaccgccaatcaagcagggaataacggcactgtagttatataagtccaattgagtcaggctagaggggttccagtgacgtacaagatggaaagcttgagccaaagacctagagcgtgccaatgggtcagtaacattctgggtccgcaaaattcaagtgtagataggccagtaaggctcggatggcataaacgtactgctggtggaagccgcatggtgcttgacagcagctcgctcgcggttgaactcgttgtcgactgcccaggagggcagcttgtcagtgctgttgaagcggcgctggatggcagagcgaaccggagtggaacgctgggcgaggcggaggacactgcgctgggcaatcatggttgctgaatgaagagcagagggctcgcagctgtatctcgatctgttcgaaggtgggaatatcagacgatgtcggctcgggtgggcagacaaaagccgcttagtgcttcccgtgattcgtcgtctccgaccacaaccgtcgctcgttatgtcagcagcctttgcgctccccgtgatgtcaacgtttgacccggatcacgtgctgtacatcaatgcagctgcagcctggagagctacgttcctgatctgtcgcttcgcgactttactgctctttttactggtataggctatttcgaggcatgtagaagccgggatggggtttcgcattacgacatggaacggtgagtttccccggctgcgactgaggtattaacactaattctgttgtttacctaagtaaatggcattaggtctgtaatcaatctcagattcgctattggtattgcactctaactctaataggaatccattctcatatgagccatggaggagtacacggacttttgaggtaccgtttgcattctttcatgccgacgcggctaacccgggtcgaaacagtccatgttcgacatattggaagccgatatagtcgtcgttcaagaaacaaagatccagcgaaaggaccttagagatgacatggtccttgtgcccggttgggattgttacttcagtttacccaaagtaaaaaaaggtttagtgtatcgaatctatacgtagctcgaagctaatcattgaccaggctattcgggtgtcgcgatatacactcgtaatgcaacatgtgcacctattcgcgctgaagagggattgacagggaccctttgcccgccaaattctttagtgtcatttagagacctacccgaagaccaacaaatcggcggctatccaacgatagagcagctgtcgaagctaaagctagatgcggagacgcttgactctgaaggaagatgcgttatactcgagttccctgcctttgttcttataggcctatattgtcccgccaatagggacgaaagccgagacgcttttcgtcaaaacttcttggacttgatggatgcccgcgtccggaatctagtcgccttgggcaaaagggtgtttgtcactggagatataaatatctcaagaggcgagatagatgcagcgcacgcggcggaaaacataaagaaaggggtaactacggaggatgacttcgtctctgctcctgctcgccgcctgttcaaccagttattaattgacggtaaagtcgtgggtgaccgagatgaaggaagagaacaacctgtcctttttgatatatgcaggtcatttcatccgaaacgtaaagggatgtatacttgctgggagcaaagaataaatgctcgtcccggtaactacggttcgaggatagactacgtcctttgcagcctggacatgaaggattggtttttcgactctaacatccaggaagggctcatggtatgtcctaggaaaacctgaagactgactccgctaattggcttattcaggggtcagaccactgcccagtatacgccgtctttaaggacctcataccactgaatgacggccaatcccacatactcgatatcatgaatcctccaggggtgttcaagaatggcgagcgtcaacagaattacacggcaaagttcctactaccgctatcagggcgattgataccggaattcgacaggcggagaagcattaaagatatgtttatgcgcaaaccgagccaaccatcgccgaaaacgtcttctccgcagaatttaacagcatgtctttctaacgaagaaagcagcatgactgcgaggacagcgacaaatacaccaaaaccttcagatgctgatgcgcccgcctctgtatccaatgatactctacagaaggggaccgtccgaaaacgacccgtcgggactgaagttcctccggttaaacgatcgaagtcagcgagtacccaaac

SEQ ID NO: 3759 - DNA, 3739 bp, Emericella nidulans
agctatgtctgccgttcagcaacccttcttctatccttccctctcagcaccttctccagtcgtctcagcagaatggcgttcgcgcagaaagcacgcctgctggagatccacccgcaatcctgaccctgattccgctcaatggcactttcgaaaagaaacagatcacactgccgtactttcctgaaaccctgcgaatcggccggcaaacgaatgcaaaaaccgtacctacgtcgaaaaacggcttcttcgattccaaggtgctatctcgccagcatgctgaaatttgggctgacagagcgacggggaaggtcctgattcgtgatgtcaagtcgtctaacggtaccttcctcaatggccaacggttgtctccagaaaaccgtgagtctgaagctcatgaaattcgggaaaatgatacgcttgagctggggatcgacattgtcagtgaagaccagaagaccatcgtacaccataaagtctcggccaaagtagagcatgccggggtttacgggactgtgcccaacatctttgatcttacgctcggtgatttagatccagcttctgggaatggacttcttccctcccctctaagtcagccattgtcccacctccgagggcgggctggcagcgcgtcaagtacccgcagtgcccaaagcaacgccagtagtcagtttaatgcactgcagcaacaacgccaaatgaactattggagctctcctctctccattgaacaggttgtcaaaagactgaccgtgggtaaaccaagccttccttttgaggaacgagctaacatgacttatagtccgagatgaaacaagctaagcagcagcagcaagaacttcggcaaaccgacgagttcttgactggcctcatgaagtcaggggccgcagagaaggagaaacaaaaacactcgtcaggtgacagcatttcctctcgtcaagtcaacggacgcccgaagatgccccgtgtggattcgttctcgcgcttctcagaacccccggcgcctcctcctcaacaacctttacctgaaaaacctgatgctctaccacggaatggggtggacgcgatttctcctcttaaacggaccgacacagaaaaacctaaaatgagcgctggtagctcacctgtgtctcgagagtctagccagattctttctctgattgaagccttgtcatctgccaaacgagaacttgacacccaaggcgctcgtgttaaagagcttgagcagttactccagcaggaacgtcttgctcgagagtcggcggagcagaaagccaaatcactcgaacttgtctctgcaaggggtctgaccggccgtcagccctgagacaggactcacaagcagatggcttcccacaaaaccctgaccatgaaatgaccgtcaataagcccgattctcagtcgattgatgaacctgctgtacaggaacaaggtcacacaccggctgaggatcagaccgaaaaactgcagcgtcggctggaaacaatgatggaagatatggaagcaatgaggaagcagctctcgtcgtacaaagaacgggcggagaaagctgaggctgagacgggtgaagcccgcaaatcgcttgttgagatgatcgagaccctgcggaaagagcgggctgctgttcgcgatagggaaccactgcttccggtacgtgatacgaaattcctcaacgacacgtctcatgtcgatgaggaaccgaccgccgctgtcaaccattccgatgttggctcgcaagacgctacatcgtcgccgcgctctaaaggcgcagacactggcacagaacttgcaacacagccccataaacgtcttgacgctgttgagcaagcgagtccacttgcatcaatgcttggggttgtgcttcttggtgttggattgatggcctatctaaacgggtggcagaaaatggataagtagctgatcattcatggctctgttatctgctccgcacagtccttggctcattgtctagccgtcattttcttttcttgctgtctcaaaacattttctggtttagcctactatattggcgggcgcctttgttatattgtctgtgtactctggtcagtttttccggcgttcatcatgaatcctggcgctattcttttaatcattccatgcccttgcactgatgaacttgcgtactacgcatgtctctccctttatatttcctctctatcttcctcttcattttctcagatgccatgctgttccagttacggttccctggcagcagtgactctccttcttgttaatgtctttcacattttggcggatacagggtttgtgcccagcctttgtgtattacttagtctaacatagcgactttctttgttcagcgacgaatgactatatttatgtgggtctctaccctttcatacagtcattgactctcctacttcctgtggttcaaattcacctgcggcaattagcgtgggtaaggttatggagaagatgatatcccactagaagagggttcttgcggtgtcggggccaacccgtatggattatttactcattccgtttcctagtcttagcatgttattctgtatataatgaagcagctaagcaggacatgagctcagaaatccatatttcatttcccttccattccggttgctggcctttgaaattgatggattctgtagtaatgctcccatgtgtgcagcaggtcgccactaagcccaaatgatatttcagcctctcgtacacagtatggttagactatgatcgccgtgaccccggtactgctaactacactttgacgccgcacaatcaagaagtgggtgctcgaaacccgatactgtctaattacaggcagcgttatgtgtatagggaaacgcttccgtccgtacctgcgcgaatcgggaagtgaaagcaagggaggcctcgtgagaaacgatcccgtagcactgatacaccagaattcggaaagatatcttaaagagacaacgtagacggaccgtaattcatagtgaatcattggcgcaaatttgcggctagactgccagaactctagccgctggagaacaaatcggaattgaattgacaagatattgtcttctgtttgcaaatgagtctcgccctcgaggtatgcgcgctcgcaggtagaggaggcaggtcgtttgccagcgagccgagcgaggaagtatcgcatatggccgagtgaatttgcgcagatatgtttattcaataatgtcataggaaccgagcgaggtcggatacctcaagaccaggtgagtgacacagtcgaatctctgtactgaccaccagcgccgcttacagaatgggaccgggtcggagcgctgtcggtgtgtagctagaaggcgatacagtggtaacccacccacctcacctcaaagacactgcaacctcgacagagttgacccatctggtcctagtctccggcaactccgtctccgcaagcaaggcgcccatgttcgcagcacgttttcgttttcgcagggctgatttagagaggggtttggattctgcctttggattcgttgcagcgtccgtaggctccaatgactttccagcatcggtttcagtcatgattgttgtatcgaccgcctcagttccggttgtcgtggtcaatagagtcgtgtcgtctcctttatgtgcactcgcggcaccctgggcttccatatccacatccccatctgcagccccggcttcagcctcaataaaatctcccttcgtattcttctcaccgctcctcaagaaaccccccgtgctcatc

SEQ ID NO: 3760 - DNA, 4423 bp, Emericella nidulans
aagctctcggattatctgaatagaagccggtgctaagttttctgcttgcgaaccaggtttcaaattcgccttttcatggacgggtgggtcattcttagagtcttgacttcgtactgaaggggccagtgatcgagtgctaggacttgagggtatcgatgtggtataatggggtgtagagaactgggaagagctcggtttcgagagcgtcgacttggaccgtctcatctggccatgtcggctactcaacggcggagtaggtggtcgcttgagctgggattgactgcgtcttaaactatcggccggtgacgcggagtggctcaagggtataccaaaatactctgtattctcctgcgacattcgaggagaaaccagagaccccggggaagagccatggaaagaaacccgatttgtagctctgctaggcgttgtttgcgacgcagctgatgcattgttcagaccggggctaatcagcttcccatggtgacttttcggcggaggaggtggcaccctatcgcgattgttagccgaacgagtagcaagagcatctgaatctgcgtttgttcctaacggaactggccgagccgagcttctagcgtgtacatatggccgacgctctttgccgctgttgtcgctgcttgatttctccagcgaaacggacgacaagctcgaggcgattgagctagatatatccgtggtctcccgtagtcctccaacttctgcgatattcacatgagaagcagcagttgtcgggaattgttccttataagcgccggctgtggttgtggaagcctgacttgaaacagaaagtcgactaacgccgactgtctcttgaggataaagcgctattaccgggttcactgggttgccggcctttcaacgtcatcatcactcacgtctgagtcttgtccaaagggatccgagtcggagtgatcatccgaagtctcggggtcgccgagaccccgcgcattggcaggttgggagaggggcgcccgcactcgggggaggaaagtccgcctgctctgtagcaactacatcatttgaggaacggctgagagacgtcgggtcggtcgcggttgactgggatgatatggaaggagtgaagtgagactggtattgatgagctgaatgatctgcaaaagtcagcttgtttcacgatggtcttgtaggctccgtcgcagatgactcggaagcggcggaaaaggagcatcacctcttgatttcttacggcggaaaggatttgatccagacatcgcagagagacgtgacagcaccaatcatgagaacaaaggaagatcaggcgagggcaatgaaatcggaaagggagagaagaggggaagagagtcgttcgtcgagcgtcaacaaaagacgccgctgaccttccgtgcggcttccggcaggaacaacggccgacaagatttacagtgagactacattttctatacttctgatgctcagctatctgccagaatgcggcctcgaaattcacagaaaacaaaaagtcataggtatatggtacagagaataatagccaaagaataaagatccccagatctcccatccaaaaaaaaaaacaccgccaaatacaagaccaccggatagttgctcgtcacagtatgcctccctcatggcccaatgcccgggaaaaaaggggtatcagctcgccgagtagtaataagaagacaaaagaggaaagagaaaaagagagagagagagagagagagactaaatcgacttcgggggattgttcggcctccgtacagcgcacaccatactagtagttcacgaatgacaattgtgcacaaaccatcaactctccttgtagacatgccattcgttttctggcccaaaaaatgcttgggctaggctcttcccgctgtttgttggctggctgaaagctacctgttccttcgggatttccatcccgtaaatgaagttgctcacgacgcagtcaagaagatccatcgcaatgccctttcgacgtgaagagccagacgtccagatgcgtgagatccccacgatcgcgggatgggtatcgtcgcgaacagtgacggccgagtcagcaccgtccgtctggatagatgccttatccaccgcgtgagactcccagatacgctcagttaaacaggcgcccacacaccggctgtccttcatgtgcaagaacaccttgtatctgtccaccttctccgacgctccgttcttgcgcagatgtttcggtggctccgtctggctccatagggtatcatcctcgatcaccggagaggacagctccttgctgatgacctccaggaccttcttggcctggttctttgctgtaggtgacgatttgcgatccactatcaccacatacccctcctcaaagcgagtcgcctcgtaaacccatcgggacgcgttcgcccgcatgaacgctttgcctaggtctaccccagtcgagttcatgtcgtgaaattttttgtggagcgacgcgtcctcgctgttggacggcacatattccatcccacaggtcgcgcacgttttccgtacctcatggcccaaatcgagctgcatctgcttcaacgccggttgttgagaaaccggtgtccctgctttcttcttcggaggatcgagagatgcgcgtacgctgttggagttcacttcggagagaggcgacccattggccccatccttgggcgccgacttgcgcttcagaaaggagaacgtcggtttgcgggtgttctgcggcggaggagacaagcgtggcggaggggaagaaggaggtgttgacaaatcagtgtcctgagaaccatcggaaagtgccagagagtttcgacgcgacggactcgatcgtacgttagccgtggactcccggatggcgtactcaaggctcttttcagccgcgtccgactcgcaatccgacaaaacgcgtcgtttcttggccgctggacgttggtcatcatcgtagacgcgccatgaagaccgcccgtatgttttcatcatgagacctctgtggaaaactgttagaagcgggaaaacgcgacagagaggggcaatgagtgagtatcgcaccgcttgaatgaatttgttacagtccacggcatctcctttttgtacttctcccgagcgactgtttcaaatcatgagagaccggtacgggcaaacatggatacccagaaccgaaataataggagagtgaaaacaggagccaggcagtgctaatgttattatgcgctgatgacgcctgtgatgattattttccacggacggaaagcttcggcggcgacggaagtgatcgacggaacgcgtgaaggcaaactagcctgattcaggtatattgataacttacgtaggtgatgccactgagaataccagtgttagtataaactgcaaggcgaaggcgatgggaagaacaaagaacccagagaaggagagatatttatccaggcagccgttacgacgatgatgatgcctgtggaactgctttgatgacagtcactggcgactggccgccaacaacgtcccgacttcgcctcctgaaatcatgggcgaccaaccatcgcgctcgctcctccctgcataaagtatgtacctccagcgccctgctatgactgggtggcctttctcactctacgctgtgctggcagttacatattttctcctctcattatttattatttattcccctgccttggttggcccagcccttgccgcaatttcgtcgatgatgccttatggagtcccccctttcggtcctccttccgatctacagtactctcgaagcaagggctatcaacagctgatcttggactctcagtcttgcgttggactcttaactgttgcctatcgcgagcttgggctgacctccgctatggtacatggtgccggcctgttcaattctttccctatgagttttggggtgtccagatgcttcctggatcatgtctgtcgaggctagctacacaaaatgtatactatctacttgctgtcccctgatgtcttaagtcagggtgataacatcgcagtgctgagactctcattcggtacctcgagacaagccgccatggaggatcctttgttccagcacgaggatgtcccattgcatgcgcttcgttcatcccaacattctttgccgtctgctaggaaagtcatgttgctgccggccgaattgctttgaggcgccaggcatgcttcttcgtctttctgcccacctaccgcattcttgctttttcgaacatcatgggtccaagacgcgtcaatcgctaatccatgcaagtaccctgtccggattggagagccgtcaaatcattccagtacctccgccatagcacttggctaccctgggcgatcaccctgtcaaagagaaaacatggatgacaaagacattcacgccctaaacgggaagatgcgtacaggagggcataaatcatatctattcttttatattggggct

SEQ ID NO: 3761 - DNA, 3011 bp, Emericella nidulans
tactcggcaccaacaccggcggcgagaaccaagataccttcggcagccgactgcaaaattacggaaaccaaatattggacgcccatgcgaatgccataccgggggtaacgcgcccggaagaaggggaggaatcgagcgacaacctcacacccgcacaacaagctttgtcccgctcttacgcggatctggaacggcaacgcgagcatgaccgttacgaagactacctagcggagctcgataacgaaaagatgccgcatgcctttgatctaggctggaagcgcaatctgctacacctctttggcgacaggcctcttcattggctcgtacctacgcccactacgacagggaatggctgggagtgggagccaagccgtaagtttttggaagcgcaagagcgggtgcgtcagcagcgggagcaagtagcggaacagcaacgacaacaccaacgtgatttgtacttgcggaacatgaacaacagccgcgcctggctgggtaatgagttacctccggggtggacaccggatcagccattaagccactcagacgatgtagcgcgacctgctactggtgtttcaatgaagacgcttgctccaaggtctccgcggccacggccgggtgaggaagtctatgcggaggatcttgataaggatgattttgttctcgagccaacgcgtggtaagggatctggaaatcagagctcaagagaggatgactggcgtgactgggattgaagcattctttgggtttatcgatcggcgtcgaattgtatacatagggttgttcaaaggagtgtggagtattagccggtgttagattaattgatgcctgatattttaggtattggtctcattccaataggatctcgccaacttgcatcaacttcctccattttcgttcatatcctttttgctgaccttactgcgtactcaataactcactctccgcactcatctcataaataatgctgttctagctggtctcggaactgccgcgtcacctccaaataatcgtcgcatataatcttagtcgcaacactaccagaaaacatacacatctatcctcacgaacacgcgcaagactaaattattttcagcgatatccaacaactgatcaaggggtcaaagcctgacaagaaaaagaatgtctcgctccgtccgccgcctgatgaaagaagccgcagagctgtcctcatctccctccccgcacttccacgccgcacccgtctccgactctaatctctacgactggcacttcacacttgccggcccgccaccaccatctccctatgccggtggaatctaccatggccgaattgtcctcccaccaacctacccactccgtccgccctccttccgcttcctcaccccctccggccgcttcgaagtcaaccgcgagatctgtctgagtatatccggccaccacgaagaaacgtggcagccagcgtgggggattaggacggcgcttttggcgattagaagctttatggagggggatgcgaatggcaaggtagggggtttacaaggcgtcagtgacgaggtaaggaggcaatggacgggcacgagtcaaggttggcgttgtgatctttgtgcaaagagtaacagggagttgcttaggaagtgaagggaatattgtgtgaaaaagggggtcgacgtttaaaaaaagaagatcgctgagggggtgccgcaggggttaagaattgggattgggaccaaggggaagaacgacggcgataactcgaaagttgcggatagtgctggtgcgactaagcttgaaagtgggacggagaagttgaagtcagattcgacctcgatggaagagtctacaatgggcacgtgtgagaagagtatgagcacaagcacgagcaccagcccgcccgtactagacaactcatgctccagttcttcagctataccttcgtctcccaccactttttcagcatcagtgattcgggatgcgccggctcagtcgccgtcaccggcatcacaggccgttacacaacgaccacggccaacgcccacgcgaccagctagtcaggctgtacaggtggcctcgcaggatagcccatggctggaccgggctatattcggcgtgctagtcgcgttgatcatcatgattttcagacgctttgtcaatattgaggagtagactctttgaagctgttggcgttcaataggtaggataacaggcgtttgtttcatatgaatgatcaattaagagcgcaatgcggtataaacagttatatttcggcgtggattatgaaaagctactatttcgattctatttagggatgattgtgcgcttcatcactgtcgctcttaagtaagaccttcgaataacgtctgcgagtgatccaaaacggcaggcgtgatggaaatactcttgccacaactaacaggactggcggttgctgcagttattttcgcttaatgggaaggtgccttctgttatgttttcaactctcctcgtccggctttcatctccaatcctcgatttcacctgtggactgctgcggattcattatcgagcatacttattgtccctcttcacgatggcacctttttctatcaagcgtgccaaaaaagaccaacctcaggctggccaacccaagaaggcagcacccgctaaacccgatcaacctacatacaagaagcgtgcgcagctcacccagatgtttcctccacgtcctacattcaccgagaaagatatcactttccagaaaggtcgggtcttcctcgtcaccggcggcacctcaggcattggtttcgagcttgccaaaatcctctacgctagaggtggcacagtatacatcaccgggcggacggaggagaaggcaaaggaagcagtccagaagatccaggcttctgttggcgaacgcgacggccagatagactacatcgtccttaaactcgacgacctaacctccatgcgagaatcagccgacgcattcatggagaaggaatccaagctcgatgtcctctggaacaacgctggtattgcccagccttctgtgg

SEQ ID NO: 3762 - DNA, 2383 bp, Emericella nidulans
tcgcttttcttatacctctggccttccgcgcgcctcgcttccctatccctttccttccgaagcgtcttggattcgaactcatgccagtcgccttggatattctctagtctagaggaagtcagtattcgtactttggtactcggctggaaactgctaaacacttactcgattggctgttgagggctcggttcctcagaatggaagtaagggtgggcgagaacatcttcagccgatggacgcttggctggatcataacggaacacttgggagaccatatccaacgcggctggagagaggatgtcccgatagatatcttcgaatatcctgttccttcgctctgttggccgcatgagctcaaaccagggcatttcgacaatattcggacactctgcacgagttggcgttcctagggtattgcaaagcttgtcgagttggctaatcttcccttcttctacagggaagactgcctttttcgggaacatttcgacataaacacaggccgcactccaaacatcaaccgctggcccatactgtgtttcaccaagaagaagttccggcggccggtaccaaatagtgatgacgcgatttgtatagtcaagctgacgactctttgaaaagaatcgagccaagccaaagtcagcatacttgagtcgaccttgattactgatcagaatatttgcagctttaatgtcccgatgtagaactcctcgatggtggagataactcagaccctcgaacatttgtttcgcaagatccttcttgtgcgcagctgtgagagtaaaggttggatggttgatgaggcccgtgaggtcgtgcgagagatattcaaaaaccatgaagcactcattcttctcgaccatgacttccagcaaactgacaacattatgattccgcaggtgttggagtaatttgatctctcgaacagcagtaacagggaatccgtccttctctccttccatccgaatcttcttcagggcaacctttctttgagtatagacatggattgccttgaacacttttccgtacgtaccggccccaatgactgactcattgccaggcttgcggaagtagacagaatctgagttggcaaactcctcggatatggtgggacgcggtttgaggcgaacgataatcttcgagcgttttactggttctggagagggatcatgacgacgctcaggtcggaccccagatgctttgtcatttcttcgcttatcccgagggtcaaccctccgatcgtctcttctgctgtcacggtaatctcgcgcttcacgagacccacgcggttctctgtagtctcttcgatcgttccttcctctattacgatctctatcacgatgacgatccgatctctgtcgcggcgatcaaaacgcggctctggtttgaatctaggcggcggtccagacgacattttacttcgggggggttcagcaactcgctggggcggttctcgtgctagcattcgttgagccagatcaggaacaggttttggagctgatgtcggcccagtctttgccttgaacgcaaagctaatctttccgcctttgctaggaccggaagggggttctggtggacgcgtatccggttgccctgtttgaccagctcggaatccagatccagaatcatgccccgaaccttcatctggtgctcgtgtctcgcgacttgctggtctgtgatttgtgaggttttgatacccttctcgatgcgaccgaggttccgtaggcggtggtggaggcgggggagggtcgtctgccgcgggcccttgcggaggactggggggccctgccctacttcgcgaagccgatgcatctcgctgaggactgctgaaacgatttctggcatgagacagaggagcagtagggacgatcccagatatgcgacgatcttggtgagtttcttggtatctttgctgcccatcacgataggaatgtgacggtgctacgtggtgcgacgaagtgggctggccatgagagagacggctgggtgaatcatgttcggagaaattgcttgccctaaaactgtgggttgtcattagcaatgcatagaaaaaaccagtcgagagaagtacatacctatgctggctagggtgtgaagaatgctgcccgcttcgtccactgcgtgcagtagaataaggcgaactaggacgggtagattcatgatatgaattgactggggaccttgaagctcggcttcgttcaggaagaccggctccgtatcctgtatctggaacgcggtctagacttagcctagagggtgagggaggtgggtgcattgcaatgtcgccttttgatccccgacgggaaagtgccgacgccttggatttagaagaccctgcccatacgcgagaagggcgaacgggagataggaatccccgtcgattccg

SEQ ID NO: 3763 - DNA, 2571 bp, Emericella nidulans
agaccgcggcatcaaatacggcaagctcaaacattgattcagagtcagcagagtcaaagacagcggacaattatgctggagaattgagtacgacggaatcagacgcggatggatctgacaattctgaaccgactacagtatcagtagcagcctcaggcgcagtggagtcagaggccacaggttctgagagagcatcggatacaggggattcagatacagggggctcggatacaacgggtgcctcggacacaacggaatccaacgcagccgggtcaaatccagccgaagcagattcaggagaatcaggtgcagacgagacagaagcaggccataccaaaacggaaacaatggaggcaagcccggtgctggtagcacagaccacaatcccttatgactcagaatttgatctcgtctgtgatctctgatcgcgaccaaattctgtacgctatggtcagtgtatgatcagtgtacatagttctctctcgtggcctgaggaatgctatatatcctagtttagtttagcgtgcacgtggcagcgcgtttccaagcgcgtttctacagagcccgtttatcacccgcggtcaccgttgcgatccaatatattaccccagtttgcctacttcttacagctcaaaaagagccacggttggatctggaacttccagcgcggctatctatcaagaattatttgtactcctggtgattcaagctgctttccggtcgtacaatctccgcgaaagccaaagcccaacccgccaacctccatttcatcatcgctataacctgcggcgacagcgggctaagcttctgctctcatatcaagcaatcgccatgttcgccgcactcgcgccaatgcaaccggtatccaataatccatctcaatacccttggacgcccgtccacccgtcgccgctctccccgcgcagactatcaacgacagcagcgcctttcgctgctgctgctgccgcatccacaccaacaccacaaccgcaattccaacctccggtatttacctttacaccctcaccctcaccaaatcaaaggaatttgggggtaacctcaccctcacggaaccttaaagccaatgcggatgcaaacgccaataccaacggcaccacctcaccaacccctagctcgacctacgcaaaccgctacagaaacacaatttcaaaccctctcttcgcacactccacaaaacgtacatacacatcatcagcctccccgcgcgcgcgttccgtccggcgtaacgctttcctcaaccgcgtcaagcaagaccgcgacaatgggcgcgttgatgctcgcgccgagcaattggcatacatggatgacatcgcggaacagaaggagtgggctgagagcatgaagaggagggcggaggagattcaggcagagtatgggctggggattgaggaatgggagggtgaggatgagtatgagtgtcttgatgcgggtatgttctccaagatgcatttacttcgggcgctgtgactaacagactaggagtagcggatgaagcagcaatccgagcactggatgaatatattgagcaagagcgcgctatggagatggcgctgctggagggggttgatggggatactaatatgagtgctgggcatctaccaggtgggacaggacacaaagccaacgatgcggcttcgtcattcagcgacgaggaatacgacaatattttcatggatttggtggatcacaatcctcctgaggacacggagatgtctggttgatttgaagtagttttacataccatgcgtcggactctatcttccttattatctgggatgatcattccacattggcgttaaggctggtgtaggcgtttgtgcttcgggttactggtggttcatctatatcaggactgtttgatactaaattccgtggactgcttgcatacgagtaaatattaacattcgtgatatgcacatacttataagggtttgagtggcacttgatctctgtagggcgcctaggtcagagggagaaatggtgatgggaccgccacaatggaactgtatatgaagagatgcaaaatttgaatcggctgaataatatgatacccagaaaggacgtaatctggtgtgaaagaagagtagactttgaaatatgggtatagtatgacacgatactatatgcgagacgtatatcattgctgcggacaatcggggataccaccaccgccgttcttgaggtcatccatccaaggattagcaacaagttcatctggtggatttccagctgcttgcatctgtcgctattgttagcataaacagccttcaccaagtacgttatgggacatacagcctgcatcttctcccatacatactcgcgacaccctggatcctcatccgtataacttggctcctcgaacttcctcacaatttccccgaccagttgggcctgcttttcgtaccgctccatatcagcatcggaaactttcccctttcccttgttttccttcagccagggcccgaatttcgtgtccagttctttcatcggctcgtaagcatgtctttgttagacagttgctccatcatacccataaagattttggtcagg

SEQ ID NO: 3764 - DNA, 6316 bp, Emericella nidulans
cgcgactattcagccagaactgtgctgcagatgcgatggaccaaaggcacatttgagctgggatctaaaatagagttgggttagcacaccatatgtcttgtgcgaagatgtagttcggggcgggaatgtttacccatctgtctgggcctacaattcatcgtatcgtcagcatatgccccggacaaactgaactgagagaacataccaaccttcttactgacaagctgcgacggcaactcggcgagcaagaacgcaaccttgaatagcgtctggccgaggttatagtctatgaacggttcccaacatcagcatcggcctcggtctacctagagtctcgaaggtggacagattagaataccattcgtgtctagccccatatcatccaggaagctgtcagtattcgcctggctgatgttactccggtctagatcaagagcaaagaacgctagcgctgcccagacggtgaccttccagtcaattttgcggatcagaggctaaccgacctgtcagccttgcattcaccattgaagttaagcgtgaaaagggcttcaagctgggcacataccttctcctcgccccatgtccaccgaaaagcaggatcaaatcggtgtaggttctcatactttggatttggctggaagtacggtgccagttttgggtcgtcgtagaccgagggtggcgtagcgatttcttcaggatcacatctatctctgtagcgtttggagaaagagaagaagctggcgatagctggctgaggcggtttgacgttgacggcctgcggttggagtgtctttctacggctcggtgttgggctgtctgtagagtctttcgagctctcgcccacgacgatcgtctccttgtttgacacggcttccgccatcttggaggattgttgcttgcaaaaagtaataagacaggccgtggccccgcccttttataggcttgataacgaatattgttttgatagtgagagacccggcagtggaggtactgggatgtggttattttcgccaaaatgacatgctctcttggtatgaaggatgagccccttggctttctgggctaggagcgggacgaactgaggcaagaagcgggaggagagatatctcgtcttggtgagtaaggttatggcggatactgcgcttcaacggtatactttttgatgagacgcttggggggttatagtagtcagattagggcggccgttgtcattgaccgaagatcgttgagcaaaacatctctataaattacaaaaacaacttcatatgcaaggcgactacctactttaagcctcttctattgatcgcagcgatcttatagattataggattacagaaattccatcaggcagcgagatgcgtgggtatactcatctctagctatctctagctctaatttcaccccgcgcggagtcaaggattctaccctatgaaggaggtgctaagagcgctgggtgattacaacatctgcacggtgcaagccttggggtcgatgttgtcagatatgatgacgatcacagaatcaactacgttatcgccaagtcatgcagaggagtttagcgtcttattacctcagatgagggagaagaaggtaaaaagaggggtaaggtcttgatacaagcatatatagaactaattggtcgcttcctgtgatgttgtgctatagagttcttgggaaggctatctagcatatcagataattgcaccatgtcgactacactcaccaaagaagaaaccacccccgccgtcgtcagggcttttgacgatacggcacacagtgaggtaatatatggattgccgatctatctgtctatcacctcgttactgaaggatagctgcagtatgcatactccgcgtacctccccgtctacgacactaccacaactttcccacccaccgaacctttcgaccaccaagatcggggtctaagtgcagacaaatccaagccgcacctctttcaaaccggggacccaagcgtgtccatcacgaagctaacaccccgtgttggctccgaagtacgtggcctccagctctcgcagctctcagacgtccagaaagacgaactcgccctccttattgcagagagaggcgtcgtggtctttcgagaccaagactttaaggatattggacccgggaagcaaaaggagtttgctggttattttggaaggttgcatgtgcacgtacgtcctcacctctctatcttcggcactacttcatcagattgaatatggctaacgaaagtggatgatgacagcccgtcggtgcacacgtcaaagatcatatcgagttccacaacatctatctcggcgctgacaacctctaccgtctgcagacgcggtcaacaaagctcaccacaacgggataccactcggacgtgtcctacgagcaccagccccctggcgtgacattgttgactctactcagcgtgccatcttcaggtggtgatacagcctgggtatcccaggttgcggcgtatgagcgattgtccgatccgatcaagaaactgcttgaggggctgcgggctgaacatagtggattcccgcaggcagagagggcaagggctgacgggaagtttgtgagacgcgagccagtgaagtcggaacatccggtcgttcgggtccacccggtatgcctatagtcctattcatacacgtggaatagaagaggagaggggctgacgattgttgtaggtcaccggcgagaaagcgctcttcgtcaactccggcttcacgaagaggattattggcttgaaggatgaggaatcggatgcaatcctgcagctattattcaaggtttgcccttctgcccctttataccaagtattactttttttaggagactttgaaggctgatacaaatgtatgtagcacatctctctctcccaagacattcaagtccgcgtcaagtgggacgacaggactgtctcgctgtgggataatcgggtcactgcgcatacggccatctcggactatgacacctcaactgatggcctacgacatggaattagattgactacattaggagagaagccagttgggctagatggtttggagacagtgtggtagttgcacttagggtttgctcattgggaagtcaatatttcaatatttctagtcgtgtatagcctcgtacaaattttgtgaacataaacttgaacttagacaatgtctaggattacaatgttgcgaagctcataatgggatcagcattcctattttcaagccctaactgctattgctgggcatcacttcccctgtgtatcaacaaccacattgacgctctcttccgtctgactcccaacgctcccctcagactcgactgcgccacccctatatcacataattagcctagtcccatctcatcgtttcatttagcaagggtatgcaacatacctcctcgtctttcgattctccctcgtctgcaagctgcgtattgagagcgtgaaaattatcaggaggacactcatcaccgtccccgtaatgaacccctttctatattggggagcatcaatctgctgccaaacgacctgaggcagccatgcttgaaacacatacgccatctcgttcatagagcccacaactagagcgcgctcttcgttgtcaccgctgcagatctcgtgcgcccatgccatgcacagaccgctaagtccgtacccagcaccagacatgatgtaacatgtccatttccacccatcaggaatgtcccagacggctagtgaggtgtagcatgttatgtttgagactgcgcccacgaggattgggggccagcgagcgccacggaggatggagtcagacgtccctgcaggtgcactggattagcttccacttggctggatggatgaattgggacgtacaagcgtagacaagggttgtaaaaacttgcaccgcataggttgttgttgggtaggagtttatctgtccaaccgagtaaactgggttcgtcgaggccttgaggtactgttggaagaccggctggccgccattggcgttgttaaacgttctgcgcgcgtcagaaataagttctttgctcttggcagtgttggtcatcgtacatgtacagtccggtaagaaaatagatatgccatgaggtgaggatcttcttgagtttcgcttttgtgtacggtcctctgttcttgcggccttcgagctccattcgtttctggcagagttgtacctcctttatcctgtttagtcccgccttgtcctatttgaagaggggcaaacatacttgcttggtcaaataccacggattagagatttccggcacatctggtaagatgacaaagcccaatagagcaactgggagggatataaccccgtcaatgataaatagcctgtatccttcgtcagtgcatgctatcccatgattagagcgataaagtcttgggaagcgaaataccactgccaccccttaaagcctcccctcccaccaagattgtacacgccggccatcagatatcccgaaaacatactggcgatgccactgcttgtatggaagatacatgacctcttagccagctcgtcttttcgataccacgagccaatgatgtactgcatgccggggtagaatgtgctctcggcgaggcctgcaggcacgtagtattagcattctggggctagagcattgctggctagtatcgaggttttgcataccgataaagaacctcagcacgtagaactgcgatgccttattacagcgagagagacacatcgtcagaactgtccagaggagctaagcggtgacagtgattagcgatcctcctcatgtctaagagcataagtgagccctacctccatcgcaggcagccaataccgcggccgaacctttgtgagcatgatattgctcgggatctcgccgattacgtagcccacagtccatgcggcttgcatgtagttcaattggttttgatacatgcccaaatcttctttcctacgttctatcaggccttgtccttcttcatgtggtgtagagcagaggagggctttgggagcaacgaacgtacatcccagaaacaaaggcattgtttatgttaatctggtcgagatatttgatgaagtatcctggaaatgatctgttgttagcgagtgcggatggtggtgaagtgtgaccgcaagcctggaaacaataactcacctaacgatgcgaaagagagaattgcagcatcaagcttcgtgagaagccgtcgctcctcgggtgacttatcgaatgtatcccagatgtaactgacccatcttcgcttgggcgtttcttggatgatcgtttctgaggcatctatggttgcccgttcgtcagctaccttagaggaagtcattgtattgcggatagacctctgaagcagtctcgaggctgtcctctcggttactgtcgtaaattccaggtttatatactctggaaaagacaagctcatgcagtttggaggcaagattgctgatgggatatggagtcacctcatccaagctaaacttgcgcaccctgagccctaaactaggtgagattgctcatcgccatcgagacttgcaccatcccgaacatccaataacacctgtgcattaaaccaagtttggccgttactgagtaagtcatggcagctcctgtgacagtttgtgagggggcaaaaactaagaacttttccccaatccctcccgctgaagccacaccatgcaaggagcacaccatttctgtacaaacgaggtcatagataagaccattcatcccttctgaatccaccgtatataatatctgataataatctagctgcggagtattattgcctgaatcatgcactgcacgccggtagcaccggaagtccttcgattccactgtccctccgatcattagttgcagttggagtctcgaaaaacgccttcaaccgctcgcgctgcgcttccttcgcctcgtgccatctttccgtgtgtccctcgataggtgtcagacctattctcactctcggcgtgtttatccattctaggagattgttgacgtagtcatcctccacgtctttcagcgaatggaatcgcttcccatgccctttccttttcagtttctcattgtattctgctctcatctcttgctttgagggtaggtcagcaatacctgagaagacatttgctgcggttatcgcttggaactcgaagagcgtaaaggtggctgtgtaaaacggcacgccgacgaacgcaagggtagggtcgggaatgtagaatatgtccttatgtaggttgtgcgcctgagtcccatccgtcacgagaattgtttcgtcagcctctgctggcgagagtctgtcgttatgggaattcgcccaagaaagggagggtgaaact

SEQ ID NO: 3765 - DNA, 4512 bp, Emericella nidulans
gaccgagtctggctgtcattctggtcaagcaccatggaagttgggtttttctcagatagctgtatgaatttcattttgcgtatctggtcgtccacataccgtttcagactgtcagtcaccgagactgggtatcgatattgtgcctctatctcaggatatgcactggcagtttgttctccaaggaccttcgactgggtctggagtatagcattcagtggggcaacactcgtcactactcctatctctcgggaattgagatcctttgatcttgctgcagtctcgttgtagatgatgtggtaggtattgccgaccctgacacctgcagtctgaccggcctggaggatgtgctctcccgtgtctgatatttctacctgatagacgttggtgtccttctcctgctgagaaaacacaaccctattgtacgggccttccacatgcggatgttgataggggaactgagtgttgaccaggtccgacactctgagcatcatttgcttccatgtgagactcgcctgcagtgcattctccagattcgcgagcagggctctggtgaaggcaccgattatgcgcccgtcaccctcgtcatattcaaacgctgcctcggaatccgtcgccgccacaattcgcactgcattcagattcccttcaacactggtcaaatccgagaagacacttttggccgctaattcatacgccttcgaaacttgatcatatgggacattctccagcgctttcctgacggcgtggcctccatgggtgggatcgcgcgccatgcgtcctgaaaagcagcagtccaggatcacggtgacattgtgagtattcttagttgtttgatgaacaagccttgatatctcgatatcgaaaattcctttaaaatcaccaggactggaaggggtgacatagtcagtcggcacgatgtactggtaccgtctcccagagtggtcttttggatcctttgcgaatccgccatggccggaatagtaaataactactgtatcatcgggttgagtgtcaaagatgagctctctccacatggtcaagatcccatctcttgtggctcggggcccgcagcactctcgaacccggaacccatggcgtctcaggaggttgccgacattctcgacatcgttctgaggccccctaagatcgtatgtcggactgccgatcaggagagccctttttgtcggggcacctgaatttgaggccgacgtcatgctgtagatgtatttctatttgttttatcttgcgatgtaggactggcggagatgttggtcttgaaatgcatgaacaagaatggttgaccagtaaacccaaaataatgcgaatagtattctatttaataaaaagagttttgggggaatgtcatataggactcggtcactgtcagcctcgactcccgcgagcgtggaatgtcttgcgtgagtcaggggaaacaggctagctttaagacaccaatcaagaccaccactagcccctgctgggtaatggtagtagcgaacccctcggttgtccaaagccatcaagccactggcatgaggtggcgaggctgagagcgctaatatttcacgaggctctatttcggactacttccacccacctgaagagtgaattactggattaatgcgcaccgggcgctgtgtggagcgaggctcgccggccccattaagtatggagtagccctagtctggtattggcccagccagccgtgccagccttgcgggcagatgcatgttcaaagactgccctctctagacaccatgatggtagcagccgtgagatagtctactgcgataggttagtccggtccattatcgtcttcggacgctgagctagccctgctttatccattttattgcacgaggctgcccaaagacaacggggtttcgtggccggtgaagatgagcagtcagggattctttttataaaacaagtacaacctaaagaaccatgtcgtcttgcgtcacaggtcaatgacttgatcttctatgctttcagttttataaacagtcggctcgtggcttcctggtccgattcttcaatcatactctactaagttttgcatattcaatatccattatatatacaatactagaacccaagtaatcgacagctttgaattagctgggtcttactgactctcatgggacctcccttcttcagtagtacatcaaaacttcgtgagcgacaatcctgtaatcgagcagctcaggtacagcgtcccacataggctaacggcatagccttcactataatctccaccccccacagtcgagtggtctctctgtttagcgagaaggtctgtcttggcgaatatttatgcccaatcaaatagttggtatcacagcaatccctgccaaggtttttttttcttactgtccatattggagaaaaattcaataatatcagagccatatcgcgaacagtgccttggaagtgtcgaactgactgcttatgcaatcttggagaggcagacatataagatcaacagaaattaagattgtaattgtgtaactgagtcactgtaatggtttaatgcttagtttagttaccgcccatgatacgaatgaaaggcttataggagcaatattattgtttatagcctggccactgtcttgctacgtcacaagggggctatttcagtgaccgggattagagacagcctcttaaccatcaaccatgttataacgtcttcaaccagtctgaagattgcacggcaaaaaaaaagaatagaacattccagcccgcgtgttaggctgtacctcaacataccatataagtttccagtgtaaacttaagcaaacaactttctcatatgaagccaatcttagttgaattcaatctagaaactaactttacaacaaagccagagaggaataaccggatgattttgaagacggcattgaagagactttcaaagaaagcatcatccaggctaagaggaaagatattcaggcgataatagaaggggccgggccatatattgagttagtaccatacttggggacaaatactcaaggacgggagcaataattgacattgagaaagccattcaagctgtaccgggagctgctattgtaatgtcagaagattgtttgagccctgtatctacacaacctcggaactttacttagcgaccgatactcaagacagacgcaatcacggatcttcatacagctaatcacatcaagagtctgtttgtcagctggagcgtacttttatattgctcaattacgatatggccagggtgcactcaagagtcttgctgtgttcattttgggagcaggcttacaagtctgccgctgctgctgcttgcatctgactccgcgatctacgttaccgtggcttgacatctctgataagcgacacctgcttggcgaggtggtggaattgcttaagagccttgattgcaatagacctgcttggcttgggccggggtgtccttgcagcacctcttgaagagatacgagcagatattgaaaattttagccccagtagctgtacctagaccttgacacaacccgcgggttacccatcacaggtcaacccaaaacccgtaacgcattgggtttgggtttactgtccgccagttgggtattggtcaggactcctaacccgtgtgattctaaaacgcgagggtttaaggttattggtacgggacctgatccccgatccgaaccgtgggtcctaatcttggaccgctacgggtttgtcgtggtctagctgtaccaaaaagtcagctatcttttctttgacgggccgtctttcatgctttcccgtctacccctctggcgctttctggtattcgcgaacaggaagaggcactggtaattcagtgctccagaatcggcgtactagggtaatctataatatggaaatgcgcacatgctgtaagttatatcatcgcttttcccaaacccagcaaaattacgcagtgaacagttgctacacggtagatttatgttgagaagcatctaatataatcgtctgagctcgctattttctggcaatataggcttgtcatggtttttgtcatcggggaagcaaagctggagctgcactatttgctatcgcagtccttctggtgtcaatctggaacacagttagaggatccactatggttttctctacctttctcagcttcagatgaactcaacggtgagtccttgaaggagagtagcctacctatgtttccaaacattttcgttggctgagcaggtcgtccattctgtcttccagttgacaatagccccatccatttgaaccacgttctatctgggatctgccgctgctgcagaatattacaagcactgtcaagatatactccctcattatcagcggggaattcggtgactcatattttcgggtccaccgcgcggcaatggcagcacaagcccagtacgagcatcgaactggtcgcttaagtaatgatcatcctccggcaatgccgtcagagggatggatgatgtctgtttcgcgcaataatcaggagtcgctcgtggagtccactgtgtt

SEQ ID NO: 3766 - DNA, 6915 bp, Emericella nidulans
gagagagaatggcccaatggtgtttcacaactgggacaagtggttgatcggtgcgagcaggtgattagctgggtggatgcggaaatcaaatcgccgctgaacgaaggcaaagctgcgtccgagccctggcgtagacgtggatatgtctgcggtgtaccttggcccaaattccgcaaggccgtggaggactaccgtaaatggcttattgtggacagtggtggcgtacatgagatcaaacgacagcttgtgtttggccataacgacgtaggttctgaaacgggtcgtagcttaccatcgttgctaacgaacttcttgtagacacagtatggcaacttgctgcgtatggagcctagccagcagtctccccttctcctcccgcagaacgagcataaacaattggtcgtcatcgactttgagtatgcctcagcgaatactcccggtttagagttcgccaaccattttgtgagtcaaagcaacatgatcaaaattcgatctcactaactctttccatagactgagtggtgctacaactaccacgatgccgagaagccgtgggcatgcaataaccagctgtacccgacaccagagcaacagcaccaattcgtcaccgcatacctgacacacaggccagggctaggcagccgcgtctccccttcgataacacccataatgcgccccctttccgcaagcacgcccacaatgacaccgctggacctcaacgcaaccagccccgaccttgcaccccagcggccgccagataacatcgagcgcagtgcacaggacactctagaagcggagacccagttcctcatccgccaaacacgactttggcgcgttctcaactcagcgcagtgggtggcttggggtatcgttcaggccaaggtccccggaatggaagacgacggaagctcgactcctacgccgccagtagacagcgatgtcgacgagtcagatgagtttgattatctcgcgtacgcgcaggaccgagctttcttcttctgggcggatctagtcgctctaggatttgtgcagaaggaacagcttccagagtcgttggctgaggttgttgacgggaggatacttgagtactaactgattgaccggcaagtacattgatggttataaatttttatccagtcagagggagaatagggcatatgttcctcctcttcccatcttgccttttctccccttgcatgctcgtttgttcattcttgacccccttattattatgttgcgataccagacatacaatgccatgattaatgagccatgataccatgtacgagcttgtgagaaatcgtcagcatcaaatcggaatagtccaccactttctggtggaagacataccataacaccgctgttgggggaaacagtacatcacccagcgtagtataacgaattcccatttgacagtcaaggaattgacatgacgttacccagagtgagaagagtgacaacgcattacctgcttccaccggtacggacttctattgcgggttatttccaaaaagagatagaaaatcgagggtatggctaaatctgatactggcagcacatattcgcttgcgtttcatgtctacttttaggtactggtttaacggctttcaatccggcaacaaacgcgcgacccgcccatgagccagtgcaggtgtcacttgtaagctgtttcttctctgagactggttgagggacgcaaacttcagctcggttgttgatcgcccattctatatttggattgttgatatcagcgcgcattgatttgttcaataatattaagggaagacgcggtagacggccccatggactgtatttatcccgacgttccacttttagtagtatgtttgggcgtggaatactgaacctccagctcgtatactgcaggccaaaaaatgcaggttagcccgaagtggtggaactacaatctggaccgcggtttgacagtggtagactagtccctaacatcgatcagcagccagctagcttttgtcctgactatacgcgtaaatagtatgaactaagtgctgtatcccaatcgtatggtagacctaaaatgactgggattatcgcagaatcagtctactttgagattggcggggaagagggggtcctgcaggtttggcatatatggtactttcaaaacgaggaagctactgcagcccccgacatttttcttcttgggggctcgagccggttgtttggagttggactactagcttgattcaagtgattgacagggtgaagaaccccgacagctctatttttggctcggcttgtacggacgacattccgtcgttgattgtagacgcattggatggtaaatgcttgcccatcagaatggggagaagttgcaggtagattgcacagtagctgtatcgaactatgtaaggcggagtgctactgagaaccctacggagtagattgagttcagggtcgacactttgaggacgaaaatagaacggaggatggaggcgagatggcgataggtcgttggggccatttaagcttgtcgctccatctcgcggggcggcgtatggtggaggaactcaagctgtgcgactagcaacgcgtgagtatgacgattgacgaggttatgagagaccgtagagtctgtgatgtaagtcggagtataggatggctcaccgacgaatatgggacccaacccagaagttgagtcacagacagacgggaagatatgggcccactcaagcttgcttcgagtgatcttaattttattctatgacagacccctcctgggacacgaaaggacgaatcatagccggcgagcgcggtattcttagaaacgaactagatttgggtgctgacatggaccatggccatccacgatcctggttgcaggattggatcgaggagctctggcgaactgcagtggcagggaaatgcccatgatgtgcgttggtgggaaccccccagcggccttcattgggcgggacaactggtgtagaggccacggccaatggcccaagaatagaagcgttggagaagagcgcacggagatactccgtgctccgtacggactgtgagtccgtgacaatgtactctgggtttggtcccttacagatcatggatgactgcagtgaacattcccagacgaaacccgcgtggtgacaggcaagtggtatcgaaaacagtcaacggctgctcattcggacgtctcctggtgagattatgcaggtggctgaacgtcgagaaaagccgcctatcaatcggtgaggcagaatccgtgcccgtgcccgtgcctgtgccctgccagtatcttgattctctgttgaccatcttgcggaaccgcttgagtgatcgaggctggtcagtggaggctggagcgagcgaaataaagttgcaaccgtccagattgatggtctctaacaagcggtgattaacagcaggctaactagaataggcgccatctcgcgagatgaaactaatttccctgacgccagtctgctaggggcatggcagccttgctgttgcaaacctcaagtcggccaggcgggccgattctgcctagaagctacccagcgcggtgagtggccagagcaatcagatgcgaagtttcctttgtggacattgattggttcagaccgtcggtatcccgaacaggtctagcgcagagctactctggacatgagactggactggacctggattgacaatcgatactctgagatcaacaggaagacggggcaccgaagaaatcctgcaccgctccttttggcccaagtgtctcttctcacgagtcgtttcgctggtcgttgatcggtctgaagaggaccgctgtatagcgaccgaaatgactcactcagtctgccaccgacttagtgaggccattctgtgcgggcagggtcacatggtttctttgttcccgctcccttgactctcggtcacagcgcactcacaatcccctaggcatctctgcttggcgtccatccacatcatctcatctctcgcaggtctgacccccggaaaacgtggcaggagcgctgctgtaagactcatgcatgcagctgtctcgttcttgccgaatcagaaattaattatgggcttcacccttaatgatacattctgatcattgagccttgtcagacagtcaagtccgtggctacctatccttgccgataagcccattgctaatcgaaccgagcatccaaaaggaatcgtctatgataatgagattctgggataatcgatttcggccgcatgctccggatatgcctgttcaacagttcgtcctcaatattgggaaggtggaacctgtgaattactagtttcgagtatcgacaaatgcccagtccgatcatgatcggccctgtcaccctcagcagtcaccactatattccttttaacctacgatggctttcttcatagctatggtttccgttagctcatcttagccagcggacgaatgagcacgcagcttgcaccgatccactggaccttttaattattattattttttctttttttttttttcttttggccccctagtcgacctgtccataggtgtgccaagcagccttgtcctgagcttcccgttctgatcatatttagcgaagctgacatggaccaggctagttctgctgtttgatgatgtttcacagtctcatcttgccagttagtgacagtcgtcgcaaaccagaggatcatcgtctcagaatcgatagactgcttagaccgcatctaccactcgtcattacgtatctcgctgcggctgaaccctgtaaaaccttgcagctcttcttgctagtactggtttgtctgccgcaaaaagtgacctcggagtgcaggcccatgcaaaatcgtccaagctgcatgcattcgagtcccaagtggaccaaccgctctgtagggttccttaagccccgcctcatcgggctcatagtctcagccgcagaaggtcggagggtgaatgaccattgacacgttaccaccatctgctgtcttggctgaaggctcaccccatgccaatcaccaccccccctggcattgttccaagctacacatgacgagggaaaaaatagtatcactaagcgtcttagcgcactataccgacccaatctcaagggtcatctgagctcgctaaaccaggacgggactatggcgagggcatgccaagcaagagcaccgattctattaggtacgtgctcgacaccgattaggcgaaggcttgccaagcctgcgtggttgatgtagagcaccctcaatctcagttgcacaggtgcagcatgaaaaaaatggtaaaacagttgatcctgaaccagttctgggaacactagacgactcagcgcatgcaaattcagtatatcgtacctcaactatggcctgggtcacgtaatccgtcctaactagctcctctaaactaccatgtttttggaccaggttggacttgcggttctagagagcgcgatctcgcaacacgtcttgcagaatggtgcctggattgtgcagcagagaaacgcgccatttactcatgactttgagcagcatcgcagccttcttggctctggcgcccgatttgaaaggaaataatcttcaagcccaggaaggcaaccctagtgcggtttagcctttttaaggttgtctgcccacaggacgatgaagtgctccacggtaacgccttagtgtcatgctctgcttcctagctcccacagtcattattccgaggaccctctaattacaaccgggatttttctcctggtctcctccagatgactgggcactgcgcctgcctcgcaggcaatcctagaacctgtaccagtgtccgtctgacctaattattgcgaacgagccgagattctgtcaacggctttcgggcaacaagacggttgagagtcaaaatgtcaaagcttcctcttcaagacgaacccatttggccaggaatccttgggccgtcaacaagcgatcatcttgactgaaagaggcaagatcgtggactatcgccgaccgccctgagctgaatcgccaacgagacgattgacagggtctagctcgctctggccgatgagactaaggggacccccccgaatctggtaaactagacgtcaagcgtgctgacgggcgtcacgtctcaatcaagccaaggactcccgaccagactaggagtagagaacaatgacaaggcagcatcggatcgaaggatcgagagtccaactcacttcactgcctcttgactgccatgatgcccatgactgccttttgacgtgcgggtgattcccagcgaagcctgacgagtgccttgggtccttcaaggctgacttgctggcttgcccgcatttgcccgcctgcccgccagcccgacacgtttagtagattcagtgaaccacaggacagaaacgcgccgttggacttggtatggaggcgctctgcgctcttgaccttttttctccaagattattgcttaactgatcgccacttttcctgtcggtggtccatttccgcatgcgtggagtaggcgagggctaaagtttggccgatctgtggttgaccctggccgcggagttggatggttcagaccctggacgggaaaaagaggaagagatcccgtctgattgatcacgtccagaggtagtcagcccatccgattcttgctaaactcttgctaaattcttgctggatcgacagcagaccgacccagagtctggcactgagcactgtgacacggtcgacacggctggcgctgtggacacagttgacactggacggttgacatgatggttgacacctcgcttgcaccgacccgactgatagacgcttacttttgatgctcgtctcatcgttaaaaggggttaaactcagattgggccttggggctgaatcctgacggcagtcggaggaacgtcccactcgcttgggaacgggcgtcgggaacggggctcgatagcttgcaactggcctggc

SEQ ID NO: 3767 - DNA, 3318 bp, Emericella nidulans
cttgataaaggattgctagcagctgatgcagttgggatcggtggggatgcaactaggccaggatttgttgtcatagggttcagcgcagatgcaggtgtcggcgatggtgggacatcttgatcccctccaaacacacccaacgcccgtagtttctcttcttgcaattgattaacatactcatcccagagcgccttgttaggaaagctgacggtatagctttcagacttccgttcctcctggatatcgctttcttcagggtatgatggacgactcgcacctccaagctcaaagctgaagggatcctctggcgcgatgacgctgaatcctccaacatacgaaccctagcttttccatttgtgcaaggcttgcctgacatttttagcggtcatcagtcgctatccagacttttttgtgcctaccctgtccgattgagggagctcaataacgcatccttttccgcgggacgtgttccatttcttttgtcttcgcggcaggggtttatccttaaccggtttctcaacgtctccctccgtttgagcaatttgtgtaggagtctccttcgccggcgatagaccgttttcttctattggaggtggtggtaatggcttcttatctggcgagagaggcttgcgttcttgtccagcaggttgcgtctcctttgagtcttccatcgagtttggctgtggatcttcgttcgatgcgaaaccccagaaatcttcctgccgaagagtatcagttcttttgtggagcggctcctttcttttgcggactggtcctcccttaccagcagatcttcggttgacgaagtcggctagcgtaggggtcttcagtaggtcctgatctagtgagtcctgttctaacccaagccagtcgtcggatgcgtcgtctgcaaagtggtttgcggccgtgatgaacgagggagcctcgctaccagaatcgtcgctcaaccagttgcttcgctcagttctttgttgaccggaaaggtattggttgatccaatcctgcgtgaaatcctgaatcgactttcctcttctacgttccggggaacgttcgagactattactgccgacctcaatcactggaccctgggacggggggaggctgcgcagtatagtaggcctattcggctcgagcccgaactgaattgagattggagagctatctcccgaatcgcggtcaaggacagcgtctttctgactcaatgaccacgacagtgtccgtgggctaggtgcggcatacggggaaccccaggccgtagtatagtagacactgctttccgccttcttatcctccggggacgtggtagacgagtccaaagcaccacgatatctctgtagaatcgggagggtcgacggttcggtgaaggcgacactgcgacttccgggggaagttggccggccaggtgatccagcagccgagcgactcgacgcacctggggatggaaaaggcgactgcagcggggccgacagcagcgaattgtcacggacgccagaggggttcgtggaatgcggcggtggaggagaaagcgccgaattggcggaagacacggtttgatctagatttgtgcaagacaatggatttagcctgtggtccatgcaatctgggctcgcagagaacgcataaagatcgaagagagcctgggtaatgattgaccaaccttccgtgtcgactcttgcagcaagcacttgcttgctgctctccctattgtccagaatgttgaagcatggaattcaaataccagtatcttccacgtcgtcaagcggctatcgcggggaccctcgcacaacctagcggacgcaaacaaaaacgtagacgcggagctgttcgtgggagacgtgtacggagcgagtcgcggcgaattggcggagcgatcccgtagtagcagcgagcgggctcttcagggggagcgggcggcaataaaagcgacaggtatgatgaacaacagatcacagaaacctagggcatgcgaaggacttggacatggcgcatacgcgaagggcagccggatcgaggttgaacgatggaagaaacgaagaattcaatgacactaaactaggggagatggcttcctaaggttattttgccgggttgcctatcggggttgggccatgccacgacctcatttccaacgaccattagcagagcagagaaggttattttacagtacgtaatttacctcgaggacctttaacaatgagcattatttacactagcacaccgaggcttacgggaattattagctactataccacatacagcagttagtgaaccgttaataaaactgctaatttgcataaaattcggctctaactcgcttcagctctctccgaggctcccaaggagacccttgtgctcactgctttgccaactcaccgccataaagtggttcaagcgcaggtcggacgcgtttcgtattgttctgcctcatcactggtcgcttgagggaggtacagtaatagtgcaaaagcagcttatatttggttgaatgttttgctttctggtcaataaagggtgcccctgaatgcttaaattgctgagccccataaacaactaaacaacgcgctcgtggttcgtgtctgcccactcaggggtaaaagtgcgctatgaaccacggtttccgcctaccgttaccacactactccatactccatacttcgacccaaactcggtaggccataacatgtaatatgatggcctcatatgatgtaacaatttcttccaaacaaggccacagaaagcaaaccagattcccttatttattgcggtctgatatgttacatcgaatcagatattgaattttaggtatccgaaaattgtcccgcataccacctacaaaattcaacactagttcgggcacgacaaatcgaacttggccttgcgatcatcggtaaagagaccccagtgtttctcgtccttgagctcgccgttgtcgcccttggtgtcgggcttccaggtctcgtcaaaggcctcgaagtagaaaacatcgatgccccaggtgagcatggcgcagacggcattcttgtagtatttttcagcgaacttggtgctggccttggcagcgccgtagtcagatccgccatctacagccgttagtacgagtctagacttaatgtgcatgaagctcaccggtaggccagccgctctcgccgttgccaaatcggattttcttcgcattgtcgccggcaaccttctcgatgtgggccttggcttgtgccatgtcatcgaagtaggtagcagtggcattgtcgatgtcttggccctgccagtacgcgaaaccgttcgccatgcttacgaggattagcacgcaaaatagaagcg

SEQ ID NO: 3768 - DNA, 5394 bp, Emericella nidulans
caagatggaatatcccatggctcagcatcgcagtactttgcccagtgtgtccgcagtgtccccagtgcggacactctgtcaacccatggtccatggagaggatttggcattacgccggccagtgtggaactttccttgagcacagcgggtctaccactctggaccaggccccctacttgaggcccccatacggaggtaaaaagcgcgctcggtgatatcgggcatccggggttccgtgcatggattgcaacaaaacagcctcaatgggagtgacgcagccttacaacatgtggccgtcctaaaacggattaaaataaatctgatttattcgactgcacagattggccctctatctcaacgcccggttcagtcgcgcttttccggggcttagcaacaaatattcgttccagtgaataaatactcgcaatgcgcctctgggctggctttcgattcaaacctccaccaagcctacggagctggactatatagccccttccttctcgttgcactcagctgtactgcttttgactccttttgaaatcatactccctctcctacattactcctcccagctcatacttctcgtacatatttaccaccgtccacaatgcatcgctccaacggatattcatactctacaagctcaagaaaccacggcacaagtagtgcatttagtcccaatgccaacccgaacgaggactggaccaagatctctgatcttgctgaacggcgccgtatccagaaccgtattgcccagcgcaattaccgtacgtcctgcccattaccggctctggacgagtctaactagtgacaggcaagaagctgaagcgccgtctggaggaccttgagaaacgcgccgcctcagcttcagaatctccagagcggactctggagaagccagaaccgccagttagaatgacggctaagtctcgcgcaaagcatgcccgcgcaaccaagtctacctcagacgtgcacgcccctgcttcaacagaccgagtctcatacgacagctactccgcgcaagaagatcgggggtcgatgttctcataccagagtacgcgccagctttccacgtcgccgccgcccatcctttcgtatcccccatactcctctctagaccattactcccactcttcatacggcagccacctaccgtcataccactcctacagcgacgtcgcctaccataacgattacccgcctcccgtgccctctcttttcccgctctcaatgcacggcgctggctccgcagcaaagaagtactcctcctacggcgacgacgacatcatcagcccgttcaacatgagctacgcctcgatggcgggaatcgacctctctccgccgcagcaccaccatcacgcggagaatagtaacgttcctgtacatacccataccctcccttccatcagggcgacgtacccgcagttccaaagcagaaggagctaacgcattctctctttcttctcgccagatgccagccttgtcgcaaggatacggcgacgatcactctgagagctcgccctcgactcccgcggagttgtcgctgcattgcccgttgaccccagagttggagcgggtgtcggaccgggtctccttgcatcctgcgtacccccctctactgtgaactcttcctttgaatcttgacgaattacgactcttgtttgcggtttttttttcgcggctattgctccttcaacacgttgtgcaatagcaccggctgttatctttttacgtttacatttgcgggctagatgcatagcactcggcgttacttggtctggttggaacttggagactggactagagactggagtatttgggaaattgtccacaacccctctgatcattagtagactacaatcctgcgtttcctactatcactaatcttaccttcagacttagagtagacaacaaaattcccatcttatcgcggaccataaccgacacattaacatcagcgttgaacgctactatactagatccatctaaattgtacgagatggggccgaaaaccgatcaaccgaccaatgacagccgttttggcccccaaataccgcgcagccatggcacgttgcctagcctcctcattcggtccctcgtatactaacgcaacggtacggagtaaagcaagcgactactcctccagctgaaccaaaaagatctaaccgtcgggaaaagtccgccgtggagcgcgagtggatctgactcgtggagacaggaggctgtacagacatccagaacggatccctagttcgatggattaagggactcttttgtctttgttcccggtgactgtaatctgtacgacggagcttagagaatcccgaccgcccgaatttaccagctctgttccctattgaggtgtgacaatttaatatccaactttccttttttctcattcgcccggataccagcgaacggctgcctgggagtgagtaggcataactattcagaaagacgcggacataagtctctggactcaggagtttagttgttacctccatagcctatcgacagaggctccatctggccagtatccacggacagagcgtacaggaaactaggagtgttgactcatagttagtaatcctcgtttttggagtggcacacgcagacaaagggcactccagcgatccggctccatccgcagtccgcatggaatacgactaatctataatcttggagaaatgattctagagcgacggaaatcagcagactagggatggcgggcccagcagctcgtataatcctggcaccgtggcattaacttgtttgggtattgagctcgtagctcagcctcgtttcattgtgacttggatctcgtcgaggttccagcatctcgtcgggcgcctttgaagcttgacgaataatcctaatccatgtcatgattaaatggctggtttgcagatctcggttcggagacggattcggattcgactgaagccgaatgagacgtgactgtgacagtctatcctgttctgtgaactgcagcagggggttcgcgaacgtgaacccactgctgcgcctcgggcgtaccgtgagcccgtgacgcagcttgccttatacggatgcattggagtatacgattacgcgagtacggagttgtgtagcccgttgttggcgctgcgagacaccttactgggtacccgcgcagtatcctaggcgtgtcttaggcgtgggctagacgtatcttaagcgtaccttaggcgtacctaggctagcgggcttgcgaggtcgcataattgatcctcctcaacagccacagacgtcaagtcctggctcgccgatcagtcactgcaggtagaaattaggtgctgagctgagaagagtattcggtgacaggtggattagttcgaggctcggtcggccagccggacgaaaaactaaggcttattcaaggtcgtggcgccaggcataaaattatgtcgcgattagaaagcgcgatcgacgagtccagaatctagattggcagattccgactccgtccggctccctgatcgaggatctgcgcggccgcagctgtcggagttttgaataacgccgactcgataaacaatcatcaatttatgttcaataatcaataactctcttcagtcatttaatcgtgggtccagattgcctcggtcaaaaacctgggcgtgcaacactggagcccaaacccggcgaaacccgatggcttgtgacttgctggctcgtataatcagaagaatcccaccggctggacgagaaacgaagatcaaacagttgtcgcttggcgggcatgccatcggctagcctgaagattacagtacagtgcttactgtttttgtaggccgcttttaccggaattatcttgcgaacgggctcccattctctgccaaaatctggagattgcctgttctggaaggtactcaatgtatagcccgggcgaacagctatgtgtgtatgtattgcccatactcctggttggtattgaacaggcagcgcgcagacgcgcatgctgcctgtatatgcacgcaccgacgggatattgccagagtacgccttcatcgcccataaccaacccatggggtgaggtgaagacctatcgcttgcgtaatgatacgactgtccagtaccggattgagcctcagcctcgtggatcgtcggactggtaattgctttatctggctaattaggtttgatcttgcgtcgactgtgctatgaaactgccacggccatgcaacctactaccaccagggcttgtgtttggtcttctcaacggtctggcctcgtacttttgcgtgcccagcctgatagctaaaccagcgctagggcgcgacaaacaacccatgacaatggcagaaggttgcctttggtgaaacgaggggagaaagttgagcatgaatcaccgggactgcttccgctattcgtggagcttgttgagcaacagaagtaggttcaagtctcgtaggacgtaagttattgaaaactggtaggagggcatcagtatattgcgcatgacgtcctatcattcccatgcggcaagcctcattctctatacgaaacttctgtgttgacctactattcctcacccgtccagagatgattaggatcaatggcccgccatatgccaatttgattgctgatactgtggcaagtatgtgggagtcactgcctttcttgttcgcgcacgctcaaagaatgtacctggtggtttcgtccccaggattccacacagttctctacgtctgcaatcccgcgctgatgcttgggtagctcattccaaaaagttgtcgatatgtctcgtgctgctaaataaccgacgataatgaggtgtactcattcgtgaacatactcagtaaacataagcagggactgcgggttctccaggagctgcgcagctgtaggtctataccaatgttggacgcatgttgaccataacaggcgcctggtgagccagcccagcggcgaacaatgaatagcccgaagtagaatcatcttggtgcttcgaagaacggattaatatcttgtttgtacaccaatatatcgtccgtaacctgcaacctaccagtttgcagcacggatgagtccagtaaatgaggcatcatcgttgactcgccgaagacttgtgcacaagacaatctccactgagagaccattaggcagatgtcagcctgtaggctcgctgtgtcatgtacgccgactccgttgttgttcaccttgccgctggaatagagcaaagatgctcggcaagtccgttcacattacagggcggctgtgctgaatttgaaagccgtgatagccatctttgtaatgcgcattgtgaattcgactgctgccaatacttcagctgtctcctcatgattcgcgttgggattcctacagcagactgctcgactagtttggagcagagaacgcatagtctcctcacag

SEQ ID NO: 3769 - DNA, 6383 bp, Emericella nidulans
atgctttcagtagatattgtagtctctaaaaaagcgaccttcatctgacgctcggcacctagtacgattaccgcgtgcccagccccagccacgactgcgtgccgggattgtacttgccggttccggcacactacttgctccgccggccggctatgcgccttcagctggctctactagaccacggccttgccttcccggcagacagcaactttactatcagcataggtcctcaggctagggttgataatcgcggctgcagctccgctgttaatgctactcatattgccctgtttcagtcccaagttaagaatgtggatgtggtgaagatggaggaaataaagaaagccaggtggggataagttgaccatgatatgagcttgctggttattaataaatctaaaaagtctagtagggggtatatagggtagtagaataggagagtatagagctctgccagagctgcctactgaattttagaacagcctggggcaataattggacttagttgggcaaaattggacgtttgtatatgagatcgaagtctgtatacttagaatactacacaatatatgctgtttctgtttctagggtatgcctagaacaatcctaaatagggaacctataagtaacattgcagccagttcatgaaaatattggattctttttcttcctccaaccccgggcaacatgacatggaagggtaataaatcataattacctagccgcggcggccttctataccatcaatccaatttaatggctctataaacctattaaaccaatcaacatagttgcacacttctatatatatccagccaatgtcctcctctggatcatttacgatgctatccttataatacagagaccattgcacatcctctaagcatgcatttatgttattgtgtgtaattcagctatagcatgtgctgctagggaattcttttggtgattcgtcctcgagttcctgtcttttcggttcggcagcgaataaggcccagcatgcggaccacatcctagaaggttaaatactctgcactcagtataggcctcagtaggagagcccaaacgtcaggaggttcctgggataggctcagtcaagggtaattcttgtccatactataatgctgactcgttccacttaccggtctctccttgaggatatcagcatgggagaaaatgtcagattgccgctcttctacagggcactgcgagagcaacagtgactgccagtcacccacatctgacagaacctgctcgatccttcatcgtcccctccgcccggatcttgagctggagcacatcctgcagacagcacagccgctggccatcggatccgccctaacggcgctctccagcttcgctccattgccagcgatctgctctgatgtctcagagttgttctaatacttgtaggcagcgcatgcgcatagaaaaccatggtggcagacatcaagtaaggttcagtatagaagccgtccataacacggtcaaccagaggccttggacaagcggacggtcccttcaacatgataaacatttctacctgcacccactggatacacctttcctttttctcaacacacgctgcgtgtacatacagcaggatgtagcttagaacaggcatatcatcccctaacagctcggtaagtaaatgccatcaggtaaggacttcttctacatttcccttggcataaaacgtcatgtaacacgaattctgccttgtcattccgtcttatcgtgtctggaccctggagtctataatacttaagtgtcacctactttgccactgctcgacatattattcgaggatgaaaaaaagactgactaatttatatcatatctagttgcaacctcatgtaaatacagatttgtatactttctggatttgaaatgcaggcgcaagtaaacctgcagatgggctctctgctttttaggtggaagcagatcgacgaagatgtcagctgctagagcttgtaattgtggtatattacccatgaggccctcgttcgaggtacatatggttgccgtaaagggcgacctgcgataccagtctccgtatgaatcaagtcaaagggctctttatagatgtgttcttggacttacttgaacctttgcattagaaacaggacaacagtccctgactcatgatgagagcatatctgtctctgttggtatagtatcgagcacaagtttctgaaacttgatacagagagacagcatttgctccgcattaaagtcgccgtgctgttgaactttggtcataaatttgacaaagtcaccaatgcatcccaaatagatctggcttgcacatcagtgagggttttgagcaaagctgccccaagtacagcacatgcagccaatggataggacagaatctgcctttaagaaacttatcattcttctatatggagggtctacctacttacctcaaccaccctagtgtttggtactgcagatgctccagcaggcgcaccgtttctgcagccattctggtgcaaattattctagaagaaatggattgcgataagaaagagatatccttaactgacataagctgtgcagcaaagccgtgccgcgtgctcatagcgcgatggtacccaaatgtaagacaattatgatcgctttgtggagcagcagctgaccaaacaatgtggtctgggtggatgtttagagggacctttctcttccagccttccagctggtaatccagctctttctctgtcaggaagagctggcttgcactgcaagtagtactcctttcagatcacaactgatcgtggatttttgattcgatcatggctagctgggcccgagtcggaaaactatagcttccacacgggtttgggaaacaaaagtcttaccagggcaaccgaatgaacgtgtagttggatattcaagatgaatctcagcgtcatggtaagcggaagctattcaagtcctgatgggcatgtcgttatccaatatgcatgctatccagaacgcgcgcttgtggcgctcggccgtggccgggttcatatccatataaaaagactttttgtgaatccaagtgtcaaagatagcctcgcggcttcagaatcatagtagaggttgtttgtaatcacctgaccccggcatggacaaagccatagcaagaagcgcttcgacagtcaggatgtctgttcccgcgaggcaattgccgggacgtactgaatgagtctttggaaaaaatgccatgataaaactgtaaattcgtggtatgaatccttggcagctctggaccggattgcaattgctactgcggcgttaagaagcccctgtagtacaacgttgatgtaaggtgaagccgcatcgcttgtgccgtgttcatccaagactgacgtcaagataggtgggttgaatagcggccacagacagttgaagtcattatagaatactgcaaacaatgattggagatggaccttggacggaagctctataaaatcgagctcttgtgaagtggccgtgatggacttgggcacgaagtcgtctcacaatatcctcatctggatggttgcatggccggtgactcttggcctaaacccttgggggaaacagtcggacttcgagcaaaataacagatgatatcattcgccatagccctagaggagacaacaatcaagcatacttcatgccttgatgcaccttttgcagtacattgcaacaacttgtacggactttgatgagattcgtgcgttgctgcgaccctatactcttgatacaactgactgatctgagcctggcgggtaaccatggccttgaccactataaaagaaatattctgatggagaatcaaagctccgagtgacattagttgctgccccgttgtttgcatcacaatgaccagcctccttcccaagagcgttgatttcccgcctagccactacagccgcttgcctggcggtcgtaaacagcggcccgtcttcatatacccagtactaagggtcaccaagtcacctaaacttgttaaaccatgggttggggcgggttttggggtgggttacctggacagcaaaccgcccatgggttaagcaaacattttttacccagcccatataacctaaataactcaaatatggagatcactgcttttataggtagcgatttacgtatttggatagaatacagttctaagattttcagtacatatgtcaaaggtgcaggctcacctaaacccagcgagtaaaaaaaaaaggtagacacggacatacaacagctgggataccgttgaggagcacagtgggccccccgggtgtcgtgtccatctcccacgtgaagtcttcgacgccgtagcccgggatgggggcttcgagagcgagggtgctcgattgtggctggtttcggggtactaggttagaagggttggatgcgttgagagggagggttaggggcgagatagatgaagatgtgcgttcgagagtgaaggctgcgaaggcaggaagagcggtggcgagtctcatgtttgtaggtctgtagctcgttttagggtggctcgagttgttcgtcctcggatctatcaaaggtacggccagaatggtcgaaggataggtataaagaggtccatcttcacctctgatcgaaatgacttccaatacagcaaaacagtatttccaaggctcctatcctctactctcttcatctaaaaccgagccctcggagccctgcctgatgttacataggaagaatatctcggcaagcaagtggtcctgtatctaggcttgtaggaagcaaggatatgcgtatgctcgtcgaatggatttagagtcactgagtcaatgaccattgtttgactttggtatcatacgagcccaagtagagaggcagtcagaaaccttcgctctggcaatagacctctctaagccctaattttggtgaaactcgagatgccactgctgctgctgctgctgctgctgctttattacatgagctgttgtccagtttccacaatgtctatcttgttttgttgagcctgtacgcataaacatagaagataccctgagttttttcataaaggctcataaatacaaggccggcttcctgtttcaccttcaagtaccggcaccaaggagattgacacccaaatagacgaggcagtatgagtgcatgactttccaataatggagaatgaaccactataagagattaattaagattgattaaccagctagctagagagtgggatctaataaaaaagtaccccatccaccatttaggaaatgcatatccaacgatgaagcaagtctacgctctcaggtagcttgtaggcaatctgctatactacctgcctaggtataccattattgatgccatgcaatggtcttgtaaagaaattggaggatgaagtactggaacaaaaagaagtgcactggaggagagaaaaattttattgcaaggctactagaaaaaggccagatacagtaaagaaaccttggaaggacccgtgtagttacagctttatccaggatactccagcactatagacatcatggcatctggtggtcacttaggcacttaggtatgcgcttgtgcatgtcaaggccggtgcttaccgtattaaacaacgccaggaacttttgtcttcttcacccagatcaaaagtcccctaagtagggttccttttggctctttctagggaaatcacgctagctagtttgcttaaactccaaggtagataagtggaagctgtgggctatagagctttggatgggcccatgccttctactatggcacaacttatgtttttgagccatgtctgcaaacgctctagcctttacttgcccttctgtgtcgagcagcccatacatatatcagaccctagcaagtgcagcactgaccaggtgaacaagtggtctgagcaacagcgatgccctagtacggaggcgtggctccggcacgctataagatgagctcggacaccaaccgcatccatgtccagactataagaagcgcctgcttgtcatgggtggtcactggtcagcgtaagtgagacaccccctacctcgatcggaatctttcgctcgatgagaaatgtggttgcctgcgcccgcgagcatcgcttatcaccggtaatctacaatagtctaggacaatttcaggataggaaagaaaaggaagccacctcactcactgccgcaagccgcagacgcccgaagaccctgtctattgaggaatagagagctagctcggtagccgagggactgaccatgtacgatgatggagcaggcccggcccgccccgggcaaagggtcttctgacacatattcgtcttggcttggggtcggtgacggatttaaagctgcctggcctcggaccgcccttccacccaccagcctagcgctcaggaggacaaaaaggaagagaagaaacaa

SEQ ID NO: 3770 - DNA, 4870 bp, Emericella nidulans
aaaaaaaagtataggaaaagataataaaatagagaaagtaataataagaaaagagtgagataagaaatataaaaaatttaatgaaaaaaataaaagatgaaaatgaaagatataaagaaaaagagtaataataaagtaaatagataataaaaaaagaaaaataagtaaaaggaaaaaaaaaataaagaaagaagatgtgaataataaaaagatgaagttaaggtaaagaagaaagagaaaataaaaaatgataaatatataggaagaaaagtgaagaatttgaaaaaaaatatagtataaagataaaagagtaaagagttgaaatgagagaaagaaaggaaaaaataaagaagtagttatatacataataaaactgtaatcctatataaagttaattaggtttacattgaaaagcaggtcacatacctacagtcctctccattttattcaatttggacactaatctttgtccatgaaggatacggcaagttccatcaggctcactggggacgtgaacgatcgataattgtggcagccgtcacttgcgagtaccaattcgccttgatgtatgttggaaatgataactcgaaatgaataaatgaacatagtattgttgcgcatgaagtaagaaaaccgaatattgaagttcgtttaatgttgccagagtgccatggttcggaatgtctccagctgtggcccacactctccgagtcgtcatgtctccgaggctgggctggtacggtcctagccgcatttgggccgaatgggactaatctggagtttccatgtgcttatcagaaacccaagatttagtagttgaagatactaatacaacttgatagtattatattgtctgaccactccaccacaactgtttatctctacctcctgacgttatcaaagccacgagctttataacaaatggccgaaacgcgcccgagaccggacgggatgcaacctaactttcctctcccctttcctgatagtcaggttccctcctcgatttggaacttggaatgacgctgcatcctgattcatccactcgtgaaccgtcgtctgatttcccctcttaagctcaggtttccgcctccgcatcccgcatttccttcagctctgttccccgctgtctgtttgtcttgctttgctttcccatttacccttctctctctcagtgaaagtcatttgaccttctacttgattcatgctgtggttgtaattatacgagataactcgccacccccgccatacccgccatgcgccaatcgtccatcgacgccagcgccgacgaggctctggcccgtatgggctacaagagcgaattgccgcgtaatctctctatgctgagtattctcggactgtaattttaccctttccctaatgtcgtcgttctcaccaacagaagcagtacaggaagctaatgatgacatgtgcgcagctccttcgcaattatggccgcgcccttcggcctcagcacaactctctacatcacgctcacagacgggcaatccgtctctattatatggggctgggtcttcgtgaccctgatcagcatcgctatcgccgcctccctcgctgagatctgcgccgtgtatcccaccgcgggaggtgtatactactggagtgcaatgttgtcgacgaaagagtgggcaccgatgatgtcgtttatagacggctggctgacattggtcggcaactggactgttacgctttctatcacgtttagcggagggcagctgatattgagtgcgatttcgctgtggaatgaggatttcgttgccactacctggcagacgatattgatgttttgggcggtgattggggtttgtgcgctggtcaatgttttcggcgcgaggtggttggacctcatcaataaagtttgtatcttttggactggaggcagtgtgattgccatcctggttgtgctgttgagtatggccgatgatagaaggaacgggaagtttgtgtttgggcatttcgatgcgagtgagagtgggtggtatgcgtaactcttctcctttcggggcaattctggaaataggctgctgaccacttactgctaggccgtctggctgggcgttcttcgttggattgcagcaagctgcttatacgctcactgggtatggaatggtagcggctatgtgcgaagaggtacagaacccgcatcgtgaggtcccgaaggcaatcgttctgtctgtcgttgcagctgggataactggtctggtatacttgattccgatcttgttcgtgctgccggatatcaagacgctgctaaatgtcgcgagtgggcagccaattgggttggtcttcaagaccgctacgggctcagcaggaggagggttcggcttgctatttctgatcctgggaatcctgatgttcgcaggtatcggttccttgacagccgccagtcgatgcacctacgcctttgcgcgcgacggcgccatccccggctttcggctctggagaagagtcaacaagagactcgacgttcccgtgtgggcaatcatcctgtccacgacagtcatatgcctgctcggccttatatattttggctcaagcgcggcattcaatgctttcacgggcgtcaccacgatctgcctatccagttcatatgccctgcccattctcatctccgtcctccgtggtcgtcaagccgttaagcattccagcttttcgcttggtcggttcggctatgccatcaacgttgctactgttgtgtggatttgtctggctgtggtaatctgctgtatgccggtttcgctgcctgtggatgcgagctcgatgaactatgccagcgtggtgttcgcgggattcgcggcgattagtgtgacctggtactttgcctatgcacggaagcatttcacgggcccaccaattccggtggatcagcttcaggatacgcctggggttgtgccggggaaggctgttgttgacccggagaaagctgggtcgggttcggggtcccttgagaaggagcagccggctccatgattgtattgcacattcaaattgattccattgaagaatgttatcagccgtaaggagttgactgaagtaatgtctgtgaatttgatgccgtgggtgttggagtgggcgactcggaagatggcaatcacaggggaacagaaacgagagcggcctctccgagaaccgcggtccaactggtcgaacaaccaactacaccggacagttaaccttgtagtcagtttatgatcacaactttctctgaacgtatcccacccctgaacaattagaaatcttcacgagcttagttcttgtctccgactgagggattaaatccttatctgctgaaggtacacgcgtggatcgcttcccctctcttctccgccgaaccaggcaacgcaatccggggaactgagtgaggcccgatcaacccgacgcacctttatggcccatctacgttgaactctgcgtcctatcccttgccaattccataactggcttaccgtcttctcgaaatctcgatgagggtgacccgccgatatcaatgcgcaaacccgctctgatgaagtacgagctcaaaccccaagtcttttctaattcgcaatgtcggactctgtgggtgcgtcaaactggttctttttctgttgtagagactcaatggatttggggagtaactgatgattctagatcgtgtcttcgtccacgcccttaataccgtcaaacgtatccctcgaaccggtaccgcgcggccgcctgctacggagcggctgaaactctacggattgtataaacagagcatgggtattgcttcggactaccatataaccttggggagtgggacatataaagctgacgcgggattctagagggggatgtcgaaggggtgatggaccggccggtagggaatacggcagacgtttatatggagtgcgaaaaatggcacgtctcagtcttcctatgccgctcatacaagtactgtatcctaacctctacagggacgcctggtacgctcagcgtggtttatcccgcactgaggccaaacggcggtatatcacgactctcgtggagacaatgcacacctacgcttcgcagaccgaggaggcgcgcgagctcgtcgccgaacttgagtttgtctggaatcaggtgaaatcaaatataccttcgtcgacatcgagccctgtgcagtccacgggggttcccccgatttcccaaccgcaatcgccgtatggaagtataagcgcgcaattagcacagaacaatgagtatcagtataagacatctactgcgcgaggagactctcggctccgtgtgttgagtcccgtcagtcagccagatgatatttatcaacggcgtacggcgcggatgggctacgatcgtgatcaagggctggatcaagggggtgacgatgaaagtgtgaacttagacgaggacgaagaggaggaagaatacgccgaggcgccaagccaatctgtacgaggacgatgatgaagtggaaggtgaagcaggcggcgcggtcgatgaagacgacgacgatgaccaccatcatcaccaccaacaggtgtactcgagtcatatcccggataattctccaagccggaaacgcgatcgtaagcgcaaccactacggtaaagactcttttcctcgccaaacatgaggaactgacctattctcattcgagagacatgctaatacaacgggatacagatgacattgatagctggcgatggcgccgcagagtcgagcaggccttgaccaaaatgacggccgagatcgccgccgcccgcgagcagatggaagcacgcaccctggcagcccgtcgaagatcaggcgtctgggcttggcttcggtggctcgtatgggtcaccctccgacagattatctgggatctggccctcctcggcatgttatt

SEQ ID NO: 3771 - DNA, 4440 bp, Emericella nidulans
tgataggtcgtcgtactgcgagtgagtccggatcttgaccggtcagcccagtagagagcctagtatcgcatttgaacactcacccaatgccaccgcagctgagccctcttctgtctcttcttctgtctctactggcttgaagattgagtagagagttccaagtcttccaagttgctgagctgtgtcgatgttctcataaagcgagccctctccctcgtacttatcactaaggcatggcgtgccgagatatttacagaagacgtggggctctgtcagtttagatgtcgggtgaaaacattctaaaatcagtttatagtcggtcaactgtgctgaaagaagaagccggtagtgcaggagacgtaaaactagggcgtaaaagcgttgggagaccgttgctagatggaggagctcgcgggtactgaacgggtatagaatttgaacaaatacctatcatacaattaggcacactcttatcagtatagcggtcggaagtacctcgttaggtagtgaatagagatgcagtcccgacgtggattccgctgccattgtaacatggatgccttgctcactctcgcagtgcggggtagatgtaaaaggatcttttatctgaactactctggaagggaaaacctagagctgtccatgtcctcattgggatatagtacccctgttaaagtggcccaacggcaatctgcgacttatctctccccgtatgagtatggagggtcttcttgactgttgatgcccacaccaacaattgatgcccctcgtgacgtcagttttgtgcctcaggcttcagtcggcccgagtcggccacaatcttttcggctccgcccgtgttcctgactccatacaaaagggccagagggtcataatactgcaccgtgctcaaagcatttccaagcgttaaatgttcgcttgctgtaatatgccgtgctgagcctggggcttctttcgtgtaccgtatcttcaacaatcgccagagcaaactcaaggcacagatcctactcagatcaagtgtacatagccctggacctcgcaaagcaaatgtcccgaaggaaattagccgtcccagcaaatggtaggtggtgtagcgtcatattatgacaggaaatgcccctccgcgcccggaagaattcacctctcggttccccgcggtcttcacctccacatgtccttaaacccaagggctcgcccttaataaattctctcctctcaattagtcactcctcttcccctactgtatcttgatgttaattcaataatcaatatcctgttaaaaatggttgaaagcgtcctcgacgatatctcccaccggagatataatcctcttcgtggagcctatgttctggtctctccccaccgtactaaacgtccctggcagtaggtgatgacctcccttttatctcattcaaacgcttgtcacttgaattcagcggactgcgagatgaaccatgtatactgtagcctaacctggcgacagaggcgcccaagaaacaccctccaagacaaccctgcctgactatgacgctacctgctacctttgccctggtaacaagcgcgcacagggagaccacaaccccaaatacgaaaagacttttatcttcgtcaatgactacagcgcggtcaaggaggaacaagcgccctaccacccagaagccggaaccggtacgtcatagcgagacaataccctgcatcttcatgacatccattaactgccattcagagaccgaatcattctttctgcgcgccgacccggtcaccggaaaatgctacgtgctcaccttctccgccgcccacaacctaaccctagcggacctctcaccggtcgagatcgtccccgtcatcaacgcctggacagacgtctacatcgcgcatttgtccccaagcagcccccttgccgccgccgcctccaaactcaccatttcctctggctctcctgcagcaagcctcgccaaaccaaatgaacagtaccgatacatgcagatcttcgagaacaagggcgcggcaatgggctgctcgaacccgcacccgcacggccagatctggacaaccagttctctccctgaagagctcgctgccgaactggaacagatgaagaagtatcgccgcgaacataatgggggacacatgctggccgactatgccgcgctcgagagcaagaagcaggaacgcgtagtctttgagaacgatgcattcctggtcgtttgtccctggtgggctatctggccgtttgagactatgatcattagcaagacgcacaagcgtgctcttgttgatctcgatgacaatgaaaaggcgcagcttgcggaggcgattgctgaagttactaggcggtacgataacctctttgagacacatttcccgtacagtatggggattcaccaagctcccttggaggggtctgaggaggagattgaggcgtcatatctgcatctgcatttctatccgccattattgaggagtgcaacggtgagaaagttcttggttgggtaagttcttcgaaaccattcgcaattttgtgagcgggtgttgacagggcatagttatgagttgatggctgagcctcagcgcgatatcacccccgagcaggcggccgcaaggttacggggttgtgggggtgagttatatcggaagaagttggattcctagaggacatcccatgcaacagtgtaggatttgttggtaccattcgatataatccattttttgtaaaaaaggttgaataacgcgcatgagtagtcatctcaaaaaatggcaggtctccaagggtcatattatttaagaaacgaaagacaggttaaggcaagcaaggtcgaaaaagagggagcaacgaaaataatgggatcggtcaaaagacccgatcagtcgtccggagtcacataatatttctttcgatttctaaatatgaaatcctatttcattttccattgcccaatatcatatgctttccgcccgccggaatagcagcgtgcaatgcagaacccagagccgaacaaggaaatcgcaaaattagaagacaagagcagcacccttggtcttcttgtcaccactgtacggacaagcatgttagcttgaaacaccttaaggatcgtttgtatggatgtgagagcgtaccccaactcgaagtgcttgcagcgcttcagagcgagctgcttcttggtcttgcactgagtgcactcgagacgcaggacgaccttcttggtggtcttggccttcttgtggaagacgggcttggtctgaccaccgtaaccgctctgcttccggtcgtaacgacgcttaccctgggcgaatagggaggcctggagagtcgcatccatatcagtattcgttcagtgcgtgtcggagggatgcggtggtcttcacctttccagccttgtactgggtgaccttgtgctgggtgtgcttgtggcactccttgcccttgcagtacgtcttgcgggtcttgggaacgttgacctattgcacgggaattggtcagctttagtgcatgcaattcaactgaagagatataatccgattagagtttgtgctcagtcgtgcagcgtgtccctggtcgttgaagaaatgttgaatcgatttcgagattcaaagtataggcgatagcgccacaatatcgccgtcgtgtattgcaatttgaggccaatcttattcgcacgctgtattcgagacattcaaaagtccgtcgtcatacgccttctctttccttgcccgtcattttccagagcgtcactccgcatgaccctgcatctcggtttgacgaggccttatattacaagtcaatcgtcattttgagactgtttcccgtcgtttccctcgtcgccgcagtcgtcatggccgcacatcgaaatagttccgcacagactgatattctcgaaacgatttttctccataatccagggaccgacaacgcactcaaaagaaaatatcgcgtcttaccattttgactgattttgccggctcgcgggttgctggtcgttagtggtctcttgtcgggagatcaagtcgggtcaggcttggttgtgggatttcgtttcgcttagaacggccctatcggcgtgtggacaatctaaccctttccggtccggccaagacatagccgccagcgaatctaaccagctccacggttgtgcctcaggcgctttaacatcattttgatcactgtccttgtgagcctgtgtactcttacctatgtttaccatctaaatctttccgaaatactgaactcattgtaaccccaagcatcctccaacaagcactttgtcgccacccccataccacgatgtccccttattaaattccaaaccctgctcctgcccaacaacccattcccccttcgctcgcgtactcccttctccaccttcttggggccagtactccttcctcagaattgcattgattctctctatcctctggactaattcagctacactgttcctg

SEQ ID NO: 3772 - DNA, 3218 bp, Emericella nidulans
tcttcgctgccttgccggtggcaggacctgtgcacgccaatgatcaagatgaaagcaaaatgggaaaaagagacgtatgtacttgaccccttctccctttgagttaacttgaggatgtattggctaaccgagatggaatgtggatagtgtgtatgtgcttgacccctcgtccctttgagagttaatttgaggatgtataggctaacagagatgggatgtggacaggatgtatgtgcttgaccccttttccctttaagagatgctatagagaatcccttttatactgaatcaaatctagtaaacgcctcctgtgtgatatgaacggtactgcggtgtcagcaacatttcatcggcgtaaggaccgacggttcgaaagtaggatcgtcttctactaaaatatttaatccctagcatgtccgaaactgacgcggctgtggagttcgtaccagacccttggggcatcgggtctagatagtgctcgtcgctagccttggtttaggttttccctattgagttaggtttccgtagactgatatgcgaatgcaaaggcttttttcgtgaatagcatccaattcctcatctgattagccctttgaacatagaaaatcatacatactcgatagtcaggcccgaattccgaaaatgcccctctgcgttctgcctccttccaacaacagtatcgacacaccactcgagaaacgtagcaaaatcttgagccggattctcttcataggagtgccaatgccgccggataaacgcttccgtctcagcgaagagttcctcaataaggttcaaatccggtgggtacggaagcagatataccaacttgactcccgcctgtgaacacagctattcaatcctttccgagtaatgcaaggaggcattatccatctaacagtggtaccatacgataggccgcctaataatagagttccggagctttgacaaaacaagttagcggtctcttagcatagggtctgggagacaaagaaacaaccggcgggggtgacactgattttgcaaacaagtgtagatattcttcggcgctgaagaattcaggactttgtgcgtttaagggcgagtttgagtccgctggaggttccaggcttgacggtctgggggaccgcggctctaaaccaaagagatccgagcttgatgcttcactgagctgagttgagacgacagagggactacggtccgacggtcctggagaagggctatgagaatggggacagtagttttggtctggcaacccatccgattccagatggtgcttgtatgatttggcaaagcgagggaaacggagcttgtcaacccgatattggggtaccttttgagggaacctcgtgggcctgtttgatcgaaggttgtagcgatgttgtgccttgggatcggacagctcagcgtcgtcttcagagtctggagtggatgcgatggaatgttcagcagagctctccaattcaggaacagggacgtgagtgtaaagataacaggggcctggctcaacactggagcaccatgggcgagcatgagaggcgctgcgacgtcgtgcagcagtactcccggttgaagactcagtggttaatgatcggtatatgtgttcgtcggtggactgacgcgaataggcatgagcaagagcgcttatcgatagtgagggaaaccagagtctctgaatctgtctgtaatcccagcgatgtatgtatcgaaaatgtgaaagaatattaagctccttcctcgtccagccgtgcctgtatactcttttctgaatctgaagaggtggctccttttggcgtgagcgcgacatcctttgggtgtagactccgaagaatgccttgggcagacagtgcccatttgttcaagttctgcctaagttttgaccttgagtgactccgccgccatagcgaatcacatctgcccacgatctctctgcgctggcagcacacctgtcatgcagtcatttgtcatagtgtgcgctttcgtcatgaattgtgatacatcacctggggatgcagcaccggctggctgtcacgtcatcatattgtccatactgtggttgtgtgcacagctggcccccgaagggaatcgtccttcttccaccctctcgttcagttcatgtcgttgtcacgtattttgtctctcggaagtgccaaaagattcagtgaataaaacatcacattgaggatgttttaggccctcttcaacaaataaatttatggggtgtcttgtgagcaagccgggctcataatctgttgattaatgttgaagaggttcagaggtatgttgttctcgttgtgaggggcaggtgaactgcttatatgaacatacacacagacccactcccctgcagagagtcacagccaccttgatattcaacaggtttctcctggactgcgatctgccctgtggcatgaactgccgtgcggcacgccatagtttctcccggagtgcggtctttgcccgatggcagacaatggtcttttgcttcgtctggtggtccttttacttcctacttcatgctataagttatttgggcaacagttgtacgcgcataactctccatatagaacctgcactgctgaacagggtatatcctaagtattacagaccaccagttcaacaatgtgctagttttttcgaggttgaatacagtttgccgctcagataaagcccattctccctctctgacgatggctcctattaccgtgggcacgccattgttttccttgttcgagtagtgacctctgcctataaaatgctgcatctcaacgacggctactgatttcagagcatccacaatggatatttaccattgacttaccgctggtcatctaccgattcgttgctgcaggaattgcaggcctactcctgcttcggcgattctgggctcccttgatcaagtatgtgtttaatcctcgcctcggacatatcttcttcaaacatctagcgctcccatatctcttccgtcggcgtcgcctttggggaccgttcacaaggttggatggtatcctatacacagtataccttggcggaaccctcacttgcaatattctaggtgtttcaaactttgcagaagcgagtctcagagctgggtcgctcgcagttctacatctgctttccgtgatctttgtcccgcagctaatgatttttggtagcgccgtgtcgtcgcgaagctggtttcacttgaaaggtttcatcctttcttcctccgacgataagat

SEQ ID NO: 3773 - DNA, 2819 bp, Emericella nidulans
  unsure (1)..(2819): unsure at all n locations
ctaaagggatcctctacggcagagtggagagaccgtatttattgacggaaagggaagaattgctggaggccgacggtgagacgaaagagacgcggctgcgctggatgctccgacctatgaaactcagaaggagtatggaacgaagacgcagtactggcactgctgaccatgagcatcagcgccatagcagagtccagcgacacagacgtgcacaagtcaacaggatgcagactggacgaccagggactgagcggaagggctcccacgcacattccatgaacatatatccagcgtacctaagcacatctggagcacgtgtcgaacataccgaacctattgaacctattgaatctatcgaatttatcgaacacaacgaacacaacgaacacaacgaacacatatcgaacacatagcgagagtctgcagtgcaggagtggattggtgagcgaccgtggggcgatgcagtggacggtggtctggagcctccagtacggtggcagtattcgtagtacagtcgcggctgcatcgagcaactctcgtcttcagcaaaagacggtgtaaagtcatgattcatcggcgctcaaagagaatccactagggtgggtggggccgcacaccgccagctttggccggggcggccaatcatgtggcggtggccgagtccacttgccctgtgaccagtgacagatgctattatgagagggtgctaagagtccaagacctgctgcccgtatgctttgcctcctgccgttgtttttattacacctcctccccttttcttacctgactctcttacccttcatctcgcccacgccctcctacctcttacctcttccttatcctcttatccttccatcctccctccccctcctgctcctccttattgttctgctctttcccttctgtacctacctctacctgttttacctacccttgcctaccttcatacgttttataatttctggattgccggacacttcagcaacacttcagcatacaacacttcagccaggacaaacaaacactgtctactacttgcgccactgccactgttactactgctactgcaactgctactgctactgcgaccactactgccaagtcactgcgcctggctgtgcaacaaacatcttggacctcatcttggacctggatcttgacttggccattcttgaccgttcttgccattaaccatttgaccatcttgactttcctggatccatagtttgacttgaccgactttccttccatggcttcttaaaccttccattcggtcccgatttggtgtttgctcgatcgccctttccaaggatcctctaggataatatcgtactccgtaccgccgctggatcaggcctagctcgtttggctcgttcaccgcccaggactttcaggacatcatctgcatctctacacactccgctgccatgctgacccagcctgtccccttcatgtatcctcaccctcatcctcttcctcacccgcacccgcaccctcacatgctcccgacccctcccccttcgccgccgaccggccgtttctatgccccagaggaccgtcttggattgctcctagccaaccggctggaactcaccagcatccttggagtcggcgcatatggcgttgtctacactgccgtggatattcacacggatgtgctctatgccgtcaaggccctcaacaagaccgggctagatccccgccagctcaagttccagcagcgtgagatcaagctccaccatatggccagccagcacccaaatgtcgtctctctagtgcgcattatggactcggacgactgcacctatgtcgtcatagaattctgccctgaaggcgacctgttctctagcatcactgacaagagccactttgtcgggaatgatcccttggtcaagcgtgtctttctccagatcttggatgccgtccattactgccactcgctgggaatctaccatagggacctcaagccggagaacatcctggtcaccgaccagggaatgacggtcaagttggccgattttggccttgccacgacggatatgttcacctcggactttggctgcgggtcgacattctacatgtcgccaggtacgtcttcgtttttctgccttgcagtctcggccaatgctgaccctagcagagtgccagcaaacaaaccctcgcccaatgtcgtactaccagtcggctccgaacgacgtctggagcttgggtgtcatccttgtcaatttgacgtgcggccgtaacccgtggaagcgcgcctcgatcgaggactctaccttccgcgcttacctgaaagaccctttcttcctgaagtcaattctgccgctgtcggatgagatggtctgtatcctcagccgtatctttgagcccaacccatcaaagaggattaccatcccggagttgcgccaaatcattctggagtgccctaggttcacgcttaacccaatgaccccttggggctccaccactggaccactggtcaactacatgcatcccccacaggttacgcctattgaaaacttaaacacgcaaccctcggcctgttcttccgactcgtctcaatactcggacgccttctcagctgtctcggacgcctcttcctacaccgaaggctactcagacatggatagtgtgtcctcggtgggccaagacgacttcaaggatgaattccctgcggacaccgtatgcagtgacctgcagcagccgcttagcgcacccgtaacgggatctgcggcgggacctcttgtggtctgtcagcagaatttcacctaccttatccctgtttgttgatatgcatcncnacatgcgtggtttttcca

SEQ ID NO: 3774 - DNA, 2465 bp, Emericella nidulans
ctactgtcttgaggaaacccccgggccgcccggggagtgcactaaataaaaacacgcggcactcgtcgctctttagacaaaccctcgatcctggggacctttttggaagcgtggtgcttgctagcacacgctgagcgagcatcgtaaggcccaaccgaccctgggggtgcaatccgaactcaccacctccgcagaggtcaagaggacaagctgaccctgcagataggcgaattcgcctccgtcttatatcgccgacgacaacgacgacgacgtcgtcgtcgtcgtcgcatgttggctgcccagtctcgtgtgatggaagagggtatggatggccgtaattaccatacgataagagtgatcaagggcgggcgcaaacggccacctcactcagaatttagaaaaaatgacattcaatagtcagactattaatcagaagatgtagtcactagtagtcagtgtgagagcagtaattattagcttgcttcccctcgttctcagcgctctcggacccatccaccttcgtcattcacattaccgtcaccgtcactgtcactgtcagtttgtacggagtccacccggcctgtagagcccggaggtacagcggcctcgccccatcgttctccctctcctcaatcactctcgttctgcctcgttcgccctcttcttcagtctttcacttcttctcccccatctcgcatctttatccttttatctcttgccacggaccccgattcacaccaaatctcgctccctcctcggccattcgatcaatcggcttatcgtccttagattccgccctcacgtttccgccccatattcttccgttcgctcgcccacttccccagtctctgctcgcctggtccgtgagattcgtccactgctccagacctttctttgtcatcccccattacgcctttcgttgtgcgtcggccaattcatcgcgccgcctcctcgacccttctccgctttggcccgtcctgactccggcgcatacttgaacggctcgtggattatctaggcagcacttgagttgttgagcgaactgggtagcggctcttttccccgcgccgtcgccagatgacggcggtcattacggctctagggaattggtgataatcatggggtcgtttctgaaaagtttccgaaaagatgtggtgagtgcatgttctatgccctggccgccctcgaggtctaccctgattttacctcaaccggtccttggttcactgttgcccgcctagtcctgggcgcctggttttcataaggacccggtgtgatatggactacgtctactctgcattcgcgtccgttgccgtttttactttagcaatgctgattgtccgctaggggatctgccgcaccttctgttggggcaccacccgcaaagaaggagccccaaccacttccgatgaccccgttagagaagatgcttactgagctgggcccgatccgaggtgatggcagcgacaagttctacggaatggaaaacgtaagtgtgcattaaggtttctcccgcaaatctccgctgaatttctgctgacttggtatgtaacagttcggaaacacttggtaggctgctccttcagaatctgaaactcgatacaggttgctgatacgtgatagttactgcaactcaattttacaatgtctttactattctgtccccttccgagaagccgttcttaactatcccaagcggacgccgatcgaggatctagaagcagcgctcgcaaaagccctccggtatcaggatccaaatgcccgtctggaagcggaagctctggcagagaagcagaaggccgccaactccccacggcccggacagcctccgaacccgcagcagaagccagaagataaggattcgccggagtacaagaagaagttggccctgcaaacgctccctctcctcgagactactgataactcagtcagttatggtataccagagtcattattttcttcactgaaggacatgttcgagtccatcgtggggagtcagtcacgaattgggataatccggccgcagcatttctggaggtgctccgtcgcgaaaatgagatgttccggacagccatgcatcaagatgctcatgaatttcttaaccttttgcttaacgaggtaattgtggatgtggagaaagccgccgcataactattagagagccctcagcccgcgagtgacgtttcagattccgtcattccttcgtctagttcaggttctagaacgccaaacaccacacggtgggttcacgaactgtttgagggtctacttacttctgagacacaatgtctcacttgcgaaaaagcgtctcaacgagatgaagtctttttagatctatcggtggatctggagcagcattcgtcggttacctcatgtttgaggaagttctcgacagaggaaatgctttgtgagaggaacaaaatacactgtgacaaatgcgacggactacaggtagcacacaagag

SEQ ID NO: 3775 - DNA, 1743 bp, Emericella nidulans
taatatatcctgaagtttgggtattagctagaagacctgatgatgataggtaagatcacagcatagtagatcggctaggaaatgtcacgagcaagccagctatataaatgcgatttggcagagtgatagtggcgtttgataatagtaacctctttggtttatttggggttattgagatatttgggtcaggtcatgcttacctgcttaacccatagcagttcgatcttggacagcccgctccaaaacctgtgtcggtggatcagataagtctagaaccagcccctacccggagtttgataactctgaagccgactttatattattgtagggatatcaagttgagcttcagtgtatgctatatagccagttatctcaagcttatgaagacgctctgctgccgctttaggatccttgagcactttttctgtagcaatatgcacttgagctctgagtgtttcccatgcattgagcaactcaattggctcaggttgagtactatgtgtcacttgagtacagtttcccaagatccatctgtgcccggtcatggtgtgcatgaccaagttaaagcagtgtctgacagactgtcacacaatgattttatctctcgggtagagtgcagatgccaccaggccaccatgatttccaagctcccggtcgtttcagctgctcatctctatttgttcattagacatgatcggctgggtaagcagccaatatttttcctgcagactccctaccaactgaaagactgacatctagacatcggcgttgaagtgtctactgttgttatatccagttaattaagttcggtcacacgttgggattgaagggtcgactgacccgccgtcagcccaacatgaatgttagtaaaagtaaactgagaccatgattgttgaactctgcgagccttgtgtctctgctctcaagactcaggtcctgtgagcactcataaccctataaccttttcgttgaattaaaaggatgaagcatgcaatacctcgtcagaactgtggttttgggccgttgcctaaaagcctgctcaatggaggtcgcagtaacgaaaacgagtcctactttcgtgttcatgattggagtaaggagtggatcccaggtcctcacctgagaggcattcttgatatgggaaggtattctacctctgtctattcaccatacctgcagcgcgacattgacctgagggataatggctacgctacatctcctcttcaatgatatattacaatggttactgtattctccctgactagctttcagtaacggtattcgcttcagtgtcagatctctcaccaactctttcgcgtatccttcctacactgcatgcacatcgtctcggaatatcgctctatgactgccagttcgactcagaaagtggtgatcgggtgccgattcctgatcaagttatcgatagtgtggttgcagcccttatcagattcaagctagtgtgcatggatctgggagtacaggaacagaacattcaggttgttgccactgaggcaactcgcgaggcaattaattcagcagggttttttcaagccatcgtatccagcactgggctccatctgcggctcttgaggaaggaagatgaaggccgtattgcaagcgggttttctgatatcgaagggctcatgatgaaccttggagaagacagtacccaaataacatagattatttcgcaaaacggttatgtgcgtaccagccctcaggttcgttcagcttttcgtataa

SEQ ID NO: 3776 - DNA, 6070 bp, Emericella nidulans
aagcagaaggtcaacaggtcggtgtatacctgctcattgccattgtcaccatactgaggtcgtgctagggacgactcccacagacccattctcatgagttcgtcgaataattagtcagggctaggcgttggtcagagcagaagttggcaatagtagtggattaatgcttggaggatgagaggaaaagcgtcaaaggaggacggaatgctcctcaggcgaagggaagcaccgggtgataaatagttcgcatactgcagctgtaggaatctcccatcctatagatagggctcttggtgggagtaattccagtttcctggtgatatgatttggaattttgcatttcgtaatttgctttggcgcgcggcgcaggccctcattcgccaacttgcttgcgttcaagaacatacggagcatgagcagcagttcaagcgccgaagagtcgaaacaagttcgctcaagccaaatccaatcgccgctaaacttgggctgctgatcttggttctgatccacagacgaggcttgcgtctaatcgcgagatcgcagtcggtgaccgcttcgattccgtctcggcatcttcagatcgcatggtggagtcactaaaaaggaccggctcacactactgagaacacgctccactctgaccccagccatgctggagtctctccagtctccttccaatccccatccgagcaaggattccagcgctttgggcagagggtgcttcgaccgatgcatcgagatcgccccattggttcgcttcctctggctcagatccgtctttccagcccgctcctccacttcttatgtgggcaagcaagctgatagagctcttgacaagttgacactttttcaatagtcgctatgatggatccagatgactggcaatatctcatgatgacaggcaatagagatgtctataaccttgaaggttggacttcacggcaatcctgcagagtaagtaggtactgcgattttggacccgcctgcacctgctcgcttaagcagctcattccatgatctgggtggtaaaggcagctctgatcgatgtacccgtttattcaggattgtattaaatgctgtatgtagggcgatttctgatattccaggtagtatgtcagcttgtacgaagcttccatattcgtaatttgggtctcgatttcttcgtctctcgcgcttgccttcgataatcaatgattgatccaatccttctcgatttcttcttctgattggccgtgagcttgactgattatccagtatcccaccccctgagcgcgatgtcggcgttggagtaacatcgcgatcaacatctgcttcgacagctgcctccgtagcttcctctagcgactcaagcagccaatgactaggcgagtctgctcgatctgggggttctgttactgtttctcgatctggaggttctgctgatgatgcggctgggttaaaatcccatgatcctggcattgctgtagaagtcgattctggcgttggcagttgacctggtggtggtgaggtagagccatttcctgcttctgattggacaatttcccgccccgcattttctggcgaatcagagactgcattaagatcacgtgacactaccttattttgacaatcatccacaccctcgtatgtcgtttctccatcagtattgggttgaacatcatcaatttcatcaatatctgtagccagtggctcccaatcatcattcctttcaatatctcgcgtttctataggcgcggatggcgatatttctgatatttcatcttctagaaacggctgctcggggtcataaaggcttgattcgtcaaatatgacgtccctcgccgcctcgatgcgctgcttgctggggatccagataagccatatattggaggctttgtatccgactaagtatccccctagcctccgaggtttcgatttcagcgtcttgttttgctggtttagtgactgatctcgtacataggctctgcagccaaatgtgtataggcttgccatattagggcgtttccccgtggccttttcaaatggcgttatccatcctaacatccttattagtgttcgattcaaaatatatgctgctgccttcatcgagactggccacatatcaagtggtaaccttgctttaatcatcatatgccgtgctcgagatgtcaaaacaccccctgagcgttctgcaaagccattctgctctggggtagcaaccacagagacctcatggataatgccttccagatcggtgaaggtacgaaatgctcctccaagtgtctgctcattatcggatttatagaacttcatttttgtcccaaattggcattcaatcagggcaactagatgtattgcagcatctacacagccattcttcttgccatgcgtatacacaaaatgcatatgggtgaattcatcatagaaatgcgtacaccaacgatctccgttccatgctttattaaactcaatgaggtcgaaatggaccctttcaaatgcctgagttgctcgatttgccggccttcgagatatctggcgcggtgcgctcgaatatttgcatgtctcacagctcctgggtggttcgacatcgtcgatttggatgcctttaacagcatttggtaggtgtcggatggcttcatgatttagatgaccaaattgtttgtgccaaatatctgtgttgcctgctaatattagtggtttgctggagtgttttatagatgtctttggtctaactgcatgagcattctcattggccggtgcataagcccgatttccgccgttctgctccaccacccaaagtccttgatattctgcaagtcgacagacctcatggccgtttttaaccaccctatcttctgcaaaatcccatataaagcctgcccgcttcatgcggcttgcagagatgatgttggtatgaaaacctggcacataggcagtttcttgcaatgatatcatgacatttgaggttcctcggcaatttggtgatatgtcaccaaccccagtaccctcaattggtacaacagcattaccagcgcgcagatatcctgctggctcctgtttcagctttttaaacctggttttgtcattgcatatatgcactgtggcaccagagtctagaataaagctctccttcagcattgaatactctgatgctgagaaccctaccattatagcagccatggcatgctgtacagtggtttccttgttttgtacagtggtttgcttgttcagttccattgcctttttcagcatattgcatttggcacctggaatcttcaggatatcatcaaatttcttcctgatctctggttcttccatgaaatctggcttccttattgatatgaccacatacgggcattctctgaagaaatgtttttgaccacacatgtaatatggtactcgatttgtccggtttgtctggtttgatattccagctccttggagcgtcgggctggcagcaaatgcaacatcaagcttggtatcttgatatagcatctcatcagacagatattctcgataggctgctatcgtatcagctattgtctggctcttatattctgactgatgcagcagattccgtctgatcatagcccattcttttgaggctttcatgactgcacctaggaagtctctgatcacatacatgtcctgggcttctgggagatcatgttgtttcatcccataataagcgctttcaaactcagtaagccatgcttcaggatttgactgtttgattggcattgacctagctttctgatagcgtcgaatggccatcatctgaagctcctgatctttgggagcaaactgctttttcaaggctctcagaaccttgtatggtgactcccgattgttgatatagaaatgctttagcggagcacttagtgagttatggattgcctcactaattgcagcaattcctcggtcgattcgttgatattggttatatttgatttcaaatatcttgatctctgcggatgtagcatcatctgcagggatctctggttctatagggatctcttctagctcgtcctcttgtttgctaggatcaacatatccccataccttgctgagcaaagcaactgacttaatatcttcaatccaactctgccaatcatcccttgtcctcaggatgactgagaccttcgcggcggagtggcgatccaacatcttgttggtaattcggctcgatttctggtaattcaacgtctggatgacgacaatatagcttcaaggggaaattatcaaagcttcaaataagaaagagttgatagaggaccgggctcataactatcggtaaaatataccgctaagccaaaaaggcgtcatgacttccaaattagtcttagacagtcatattttctagtcgacacaccccctcagtatgaaagacttgtatttccatactgaaagtaatacaaataatacccttgcattacacatgatccttatattacagacacccaaactgtatcatttctttatagcattcagctatcttggatgttttctggacactacccaatgcggtcatatcttctaacaccgacttatactaggtacaatgccacaaactggattcgaacgcttgatccttgggtgtggtatgaggaattttcactggtagtggagaaccgggctcataactatagagcatccggatcgacgtaattaccagcatcaactaacgaataatataaaagaatgaaggtctgattcttacaatctagctctatagagcagctttaaatacacaagaaataataatcaacctagcctaatacggcagttggaagagacataacttttgaaccgtggaaatagctgaagtctctgcataagcatcggcgagccggagcttgcagttccgatatcccaaacaggaaagttccatatatgactagccgtcacatacggtcgacatattgttattcttgtgttctctaaagctatcgctagtgatatcgtttattattctgccccagccgaccgcctgggttacgggcattgtccgggcatcgcaagcgtcgtctttgggatagggcaacaactagacttgttcaagcacgggttggggcgggtttccaggcctagctgatccgcccacgcggtttttggggtgggttacctgaacagtaaaccgcccatgggtttagcaaataattctaacccaacccaaataactaggggtgcactcggtgcgggttgggtacaacccgcagggttagaaatctgcctgcacaggtttgcaggttctagataagtaacccgcactgcactgcaacctgtactactagatctgcaggccaccgcgcgggtaaaaaaatacataaaattacataatcttcataatattcacaatattatacacgtttatgatattttatgcaattttgtgaatttttgtgaatttttatgtatttttttgtatttttgtgtattttttacccgcacgcgttcccctattagaacccgcaacccgcgcggactgccaattttgcaaccctgcggtgcggtgcgggctgacaaccctagatctccttcggttcctaaatacatttatgggggtgtacgtatgtaacctagaagcaacaatatgacgaagccttgcccggaaaccgtggctaatcaagatggttctgccaacgtagcgtctcccagagaaagtccctagatctcgattgtactcggtgtttccatcgttgtctgcctgaggcacctgacccttgatatcgaatcccaataggatccgtaacacatcttctgcaagctgtacccgtgcatcagccatagaccagcatctataaagctcaaagtcaacttcaatgcagctgactttttctaggaagaggcaaagaaattccggtcctgaccctgttcctccttcgacaactagttcttccatttcaaactcagacaccacgctgatgccaccgccaagtcggctccgacgaacttttacatacaaactcagaaactttagccccggccccggctctagtcctagctttagagacggccgtagtcgaagtcgcagtcgaagccgcgagaggaggagccttgtggttactgaacgtgagagcgggaggtggcg

SEQ ID NO: 3777 - DNA, 2934 bp, Emericella nidulans
acccgcttcgtacaccagcaccacctataaccggccaccaccgtaccgctgcgtggcctccacttcaacctaggcaaatggtgctggatccaccacactccctgggttgacggaaaagaacttgctctttatggtgagcaacggagcactcttactcgtgaccagtggccactgccaattcgtatatcgcggttgcctacggttctagctgctctacatgcaatttgaattgcttttcagaggtaccatggaatacttgtaacaacactttacggccgatttcaatacgattcgctatctgcattgctttttccttaggtgaggggcgttcgtgctacgctctcctgaatacaaccgggagctccggaacatagtgtatttcgtgcagaagaagccattcacagaatgagcccaggagtgaagtctaggcacagaaatgtctcgaccaccggcgcaattcggggtccaagttccaggtggacgggatccttggagacgtagtagtcgcgatcctctcggctctcgaactgggccacaaacgcatgcgtcatcccatgctgctgtatgttagtacattatgtggaatagattggagagctacctgggcgccttcaggggagtggtctttgccaccaacgtaggatttaatgtagggcttctgggtccgtggcaaaatgcacttctccttgagggctacaacctcacggcacacctatactttttttagcaaaggtcagatgttctaagtgcgtgtataaaagctcacctcttcgatcttctcgtcactcgttccatccttgaagcggaagacaacgatatgtgtcacagacatagtaagacgtatgttgcaagcttaggggttttctgggtacattgagaatatctcagaggggaattcgagtggcggaaatatactcgtaaatatacacaacctggagagatagcacaagcgcgagttccttcataggcactgcatggaggggtatccgttgtttcacctgggtacacggttgaggggagtttgggacactacctctacgagaaattctggactgatagcagctataacaacatcattctttcagcaggtaagccaattgtcacagtttctccagtatgtcgaggagtcaattctgaactggtccgcgtcaccaacaacacgggagtgctggtcagggttctagataaagcaaaagtggacagattggttccgtcacgcgatgcactgatactccatacacttctatctaaagtacctggaatgcgttcctacttgcagacgcacaaaagcgtttatcccagacccaggcaaccgagtggaccccttgatatgcagttcggggaactcgttatgtcttgcaagccatggcaggacaggtcgccagctgcgaagtatattccgcaacgatgctacctttagggagttctgcagcagggacaaaccacggcatcgtcgggctggcggagctgtccataagcggtacctgtcggtccccatctgctgacagagctgcactcgcagaacagatgtcacgatgattggatagctatctgtggtcctcaatgcaagctaccaatacccttctaggccagccgcaagactttctttcaagctaacccagcccttggtaccgaagaactcattcattaatgcctctgcctctggagcgtcttcgatctcgctgagatccctgccttcattcttgggacaaggcggcagatgtatattatctggtcggagctcatgaagaatggtaaggatatcggtccagttaaacgcctgcgcgaacgcgaagatgcgctttcctactgcagacgggctcaggagagcaacgacgtggagcctcgcggtgtcctcaacgtccacaaaccattctggcgaaagtcaaccatggaaagcaatgaggggatgcagggattttacggggcgggaaacggcgaatgacggagtcattgccatggagcaggttggcggtctcagtcatgctggttgcaggaatctccggacacagaatgcgcccgtagttggtattaggcacgatggagttgaacccaaaatggggctggttttgctgcacccagttccaagcctccttttcagccgaagtcttggaggcactgtacaccaggtaccccctctcgttctccggggtgtccttgtcccaagcggcatcaatacaagcatcatgccatgtttctagtggtgcgttagctgctttcaagttaaaggggtcgtcctacctcgtgtgattcgcaccccttctttattcggcaccgagatgtacgccgcggtcgacgaagaggtatacactaccctcttgacctgcggctgttgcattgcagccttcagcgcattctgcactccttgcaccatctggggcacgacctgttcggggttgggtttcattgacatgtcggaagccacatgcgcgattccctggaccccctcgacggcgacctgccatgccccccgctgtgtcaggtctggaaggataaaagactcaaaacggccagtcccatacttggcgtcgaagaaggcggttaaccagggctttggagagcgaagggtgcctcgaactcgataccccatggagagcagaatattgcagacatgcgaggcaatgtagccgttagcgccggtcacgagtatcgtggcgccaacaggaataacatagagactgctgttcatagctgcttgtaatttagacctataataagagtatgaaagtaacggcaacgggttcagggggttgcaatggctagatatatttccagtctggttagggcattaggtaaacctatctattgaggaccttttaaaatagctactcttttctgaaagtcgcagaacacgtccatttcctgcagggagaatcgacagttagctggtttgtgattaaggcctgttctgcctacctggtacagcttggtctg

SEQ ID NO: 3778 - DNA, 8747 bp, Emericella nidulans
gggcgcggaaggggaggccgatcaggaaggaggagttccggtacgggtggcaggatgaggaggagaatatggggaggagtgaggagtgggagggggccccggtgttcgtggctacgacgacgagtgggcttgctgcgggcatgtcgtatccagagaagcaggcgatttggaatgagttggggaggtgggttgttaatgagcgagcaaactcgcaaggacatgctcaggctcgagtccagaccgaggccgaggctgaagctgaagatcagggataaaactccgagtctgcattgcatacagcatttggactggtgctctgcatttgttttgcattgttcgttcagtagatcctacatagaataatgcgtgaaaactacacaatcaccgcaaagtattattttgtattatttcatttcatttctgtcgagttattgtagtaatataaagtacaaccccgtcatatcccgtcatcatcacggggtgcgaaccgtcatcatcgtaagaggaacccgctcggaaggtatagaaggtacttcaggttgggttgagtcggtaggtagaccaggtaggcatcagatttagccagaaggcaactggacctgaggtccgttcataatatttctgtcggcgcccttttcccgttgctgcaagaaacagaagtggtcagcattgatcaataacgctaagaggaggagaaaagtaaacatacagtgtatccctgcaactcgccgtgctcaaggattttcttcacgcattcctcgtcattgtacgtgccaaactcgttctcgagagaggacttctggcgccgtcgagaatgccttgagaaccgtgcctagttgtagatgttagccttgctttatttgggatatagtcatcgtctaggctaggtagaaatggtggtaaggcggagcgtacttgtgagtaacgaagatcttccacccgtttacgacatcagagaggggaatcgttcgatcgttcttccaattcttgagtgtcgctgggtcctcgacgaagacgataaagtcgtcggatttgcccctgtagaaaactttggaggagggatcgttggcgcgcattgtggttgatttgtgaggttcgtggatatcaaggagaaaagtagatggtagggttaagtatctagtaacgtgcgttgaatggttgaggtatgttcacaggagagagagatcgattgataggaagaaaaggaggaaaaaaaaggaagaagtcgtgtgagtaaagactatataagagatgggcaatcttgagggctggtgtgatgagtattggtgacgtcactcggtagcttggacttctggggcgggagcctcggtgagttcagcttgttcattcaacagagaataggcgggggacgatggtagaatcgatcgattttcaggggtcaattccggagttgattgggcaatgattggatccagaggcttgcttaggcttcctaaggcgtggatacgtagaaaggtggtaaggtaaataggtagagcttgacgctttgacgtcatcggtctctgagacccctccaaaggtttcgcgttgttgacagcttgaagcatgtcattttctaccctcctacgattattctggttcatctatctcggtggagtcagattgttacggaatcgattgcttttatcgtcactcattcagccgccttagcggaatgaaagcttcattacgtctcgccattctacctaagtaataatattcagatgccgcttcaactccacagtcatgtacgattacatacgaggtagaggtacggtgtcggacgagtaacggcccctctgtatatccttcgtgccgagcactcatgtttcaaatcttgttgcatcatcacgttccaccaagacctggacgaacattcttcttcgaccaccggaaaggcatggaattgaacactgaccagaaaccttttcgtagctgaacgttgggaatatccgagcctttgtctgtgttggatggcggctgtgatttcaagttgttgcttgatctggacctggttttcagtctcatcgtccttgaacggcccaagtgcagagcggagtctttgtgcagcgcccagcccttctcatggtcaaaactgtggctaaaatctgatgcttcccgtctcttccgctttgccgcagattgcaaggtacattcatagtcgtcgggcccttgtggttggccagaattctgtacactggttggcaaattgatggagctggaccgtttgtttcgtttgggccggcggtgagatgtctcataattgaacctggcccgaagaaaagctcacctgcgcccaggaacatgccagggtaagggagtatatctcgggtgtaaatagggtatattgtgcgctctaggcgaatcctatcctgccttctagccgtgatggtgaattgctgcgaaataggaggtggaactttgggacgttctagctcaccgtcgacctggtgtaactgactgtgtttatgtggacagtaagttttccggataattattggttggatattggagcgcacacgttgcatgcctatggttcctagcgtttgtagggacggtctgcgtgatagttgaggcgcgatatctgaaacctcctcctccggagcgatatccagaaccaagaatgagctccctcgtaattcggatgagactgcatcaggcacatccactgaggcagctgctgacttcaggatcccagttttccattgtttttcttccgctgcggaggaggcacttagaacgatctcatacttctcatcgttaagctgaaatagtaatttccacgagaatacgcagaaataatcgtagcctgcagactgttaggaaggaaaacctctaggtagcaccacatacccttcccatttgacaaactatctatcctcacgtcagatatgtatagacaagcaagtggttggagttttcggcattcgtcatgcattttggcgaggaagaaatgatgcttgaataagacgcacaccatgaaagtgcccttgacccgcctcggcggtgtcgacgctcgataggtaacatgcaggacgccgcagaggctcatgggacctaattgttgatatatatgaatgctagtgacctagaatagtatcgttagccgtacttgtgaggttcggaagcggcatatttaccgttttgtcaagcatatcctgaagtaaaaatgttttttcgacaatgcttctgctcaaagtgctggcggtagcttcattgatctccgcaagcacttcacgaacattctcaacaacttgccggattccgtcatgcgcagaaggatcatcctgtatatgagtccatttcagcagctcctgtagtagcagtggatatttgcaaaggcgttgggcgggctaaatgtgcattagcgcgagtaatcttctcgcatttacttgctagacacgcaccttgataaggatatcattcaggcacagcgacttgttatcgtacagcgagcgtgtctccattgatgcggcggactttgttagagcctctatgccttgttcgtatgcttgccagtttggaactgaattgcgaagaacggcaatgtcctcgaccagaagatcatagcgttcgcagaactccttataataaatgaaagactttgactgcaacagaacggtttagtcctgagtaagggtgtaggtactgagctcacctaccaagtacccaatctcccgagcgacaaccaaggcctcatttgcttctgacgccaattgcttcagacgacgatcgacgtatgccttcaggcttcgtgctcttagagatcggtgctggaaagctttgatactcagatcggggcgcttctgtgctccgtagttcatcattcgctcaagctgcattcgagggatgttggttgttggtatcaagctccgcgtccgctttagaaagctttcatggcactcgcgaattcgctgaacattgtgatatatttccggccgggcttgtatgatcagcagcaactacaaagacagaaacgcgtcagctgagaggacaattataggaaaaagcagcttagtcacagtgcatacgtccaaaagtgccttcaggtcgaagaggtagtccgattcagtcgtgatgatctcctgaagcacttgtcgtcgcttgatagcacggttttgagcttcctcatcaatacaagctgtcaaggttggtctcaggctatcaatggaagttcggaagtccgatttgctgcgattagttgtactctgcgtggttcttcttgacctggcgacactttggcttgtgatacttattgtcgctgtcttgatcgtacccagatgggaagacttcccagaaagtttctcccactgttgttccagtgatccacggggaagtgagaggtgaatttggtcaccactgcctcgtggtacgtgctgccagccttcaatatgtggctccggttcatatgtccttctgggtcgtaggctgtttacccatcgtttgaaggggccagaggtcggaactcggtcggaagtgagagctcgattgatagagatattagtggtcgtgcattctggcgactggagcttttggagcttttcttcttccagttcagctgagacaactggaacgacaccagactcactcatcacctcctttgactcatccactgtagcgagcgaatcgatggacgtcgccatcacaaattaaggcagagatcgttgagagcggccaaagcctttgctacgagttttcactctagaggatagaaagtggttgctcatatggcaggttggaagctacgatcaggacgagttcggcgggcacaatcgaacggaaggaagctggcatcaaattctctcagtcacggtcagccgtgaagtacgcaaacctcgaacacttgagatcctgaccagattattaacatctttgcagaatctttcattgtcgcatcaccagccagcaattgaacgccgaagaaccaataataatctgtgaacaactcagcttcaatgtctccgccgtactatgtgtacacgctctgtgtctcaattggccatagccgaatgcccgctgttccgactcttactctataagtaatacttgactgacctctctagccccaggtcagttttcctacgggtgagaacttcggaatggagagggtgattctcctagagaggcaacgagaaaggatatagtaagatagaacgtagcgtgccaagcctccgccccagattgtctttttcccactccgacggatctctccacccgccaccaatcgttcactaacccagatcgccaactaatcgtcgcttcaactgactaaataatgttctagttctttcagaatatgggaattcccatggccaataaccttcacgctccaactgtatcctccggatcaacctccggagggattccccgcgatctctcgaagctgtcaatggccgacttgataaaacacaaagaacgaatcgaagaggaactctcagctcttagcagcgtccttaactctgtgagtgtgataagccatcggctattagcccactgttactgacaatctctcgttacttagcacggtgttaatatgggaacttcgctgacgactttcgatggctttccccgcgatgatatcgacgttgcgcaaagtgagccgccgtcccttcatacataatacacccgcttatattggctcagttcgcacaattcgagcgcaaattattcgactccgttacgatcataaggaggtcatggctcacattgagaagggcattcacgctcatttcgccggtcttcagagtaacacagctggcagtacacccaccagcagtacaaatggcttatctatagagccttccgaaatccacccaccagccgcagggacgagtgtgttgaccccgtttgcgaaggtgaatagcgttgtacctgggagtcctgctgtccaagctgggttgcagcctggcgatttaatccgaagttttgggaccgtgaattggctcaaccacgagcgcctttccaaggtggctgagttggttcaacagaatgaaagcgtgagttaccgttggcttcttcagtggcatcccggcgtccggaccatacccgactgacttgaatcgtctagcgccccatcaccgtcaaaatctcacgtggcggagtaactcctggcgattctgccaacttagacttggaacttgtgccacgccgtaactggggtggccgtgggttgttgggttgccatcttctcccactttaatggtttccctccggttgagcagttccattgggtcggaaaaacggaagagtgcctgatatattgtttattatgaagaaataatgtggcaccaagacaggaatgtggcatgatttatgataagttttgcttgtatgggtaggcatggatggcgttgctcacatttcgggcattgggtatgttttaggtatcgacgggagactatcatgtaagaagtaaatacttttcattgagactgcccagagaaacaaagacaaaagatacaacgaatattgagatcttactgcaaagccccgcgttgcctgaggctctggcacgtgatcacaaagacagtgaccgactttgggcaaaccttggaaaattccatcaccaaaacttgaaccgcccactctgttttctccttgccctcatccttcatattccccacccctcccatccccatcgtctgtcgcgcattcgactgtcgatttcgaccctcctgtctcgcgttgagattggatttgaaactctctggttttctctcctttaattttctatagacaacaatggccgaacaacaagtcccaaccttcaagctcgtcctcgtcggtgacggtggtactggaaaggcaagtttctttgcacccctcgggatccaaaccatcctttagtcgttttcctattttcaatatctttcattattcgactcgtccgtgtggcttcttcccacatattcgcaacgactatcaacgaggcaaaactcggccccgcgcctttcagatcggcacgaagaacgtcgactaacctgagattttctcccttcgcagaccactttcgtcaagcgccacctcactggtgaattcgagaagaagtacatcgctactcttggtgtcgaggttcaccccatcaaattcaccacggtatgccccgctgttgaccccgcttcggcccttccgccgtctcttttgtcgccccgactaacgcaggtatcagaacctgggcacaatccaattcgacgtttgggacacagctggtcaggagaagttcggtggtctgcgagatggatattatatcaacggacagtgtggtatcatcatgttcgatgttacctcccgtatcacctacaagaacgttcccaactggcaccgtacgtgctctcatgcccttttagcagaacgtcactcacaaatacataggtgatctcgtccgtgtctgcgagaacattcctattgtcctttgcggtaacaaggtcgatgttaaggagcgtaaggtgaaggccaagaccatcaccttccaccgcaagaagaacctccagtactacgacatctccgccaagtccaactataacttcgagaagcccttcctgtggcttgccaggaagctggtcggcaacgcctctttggtcagtcgattcctgggtacccgctgcatcacaacgcatactgacagaaacttttgtaggaattcgttgctgctcccgcccttgctcctcctgaggtgcaggtcgatgccaccctcatgcagcagtacagcgacgagatggccgccgccgctaaccagcccctgcccgacgaggacgacgccgacctctaaattgtcccaggtctgaaggttttggatcggacaccggctcacgcccttattgctgtcgtccagctccattagaacgaacatacctaggaacgattatgcgcgcaaagtctcaaatcacgatacaacgatcagcagtcggtggattggtctgtggatggcatgatatttgctttgattttccctttttcccttccgttcaatatttaccactagtagtctagactcctttttatctctacacactaagttcgtatccaaaaaaaacgcagctatcttctgcaatagttgtccaggagaaaagtttccacatatatcaccgccttcaacacacaaactccggccagttctgcctgcctataaacgagatttttccttgggcaataatcgccagacaaaggaccttggcgctggtggacgtcaatgatcgagtctttgaccaccacgtcaattccctagcctatgtccaacttatgtagcctgctgtatcaattccaacagtcaaatacattatctagacgaccctcctctcgcttcgagttatcagccgagcctacgcctacacgtgacacggaacagcggctgcaatggaatttcgaagtaggcaatttggcaataaatgacgtcagcgttgggcgacaatgtctcccgctgcagacgcaaggtgaatatagaacagtacttggcgagggtttcgattgccaatctaggtttatgcagcgatgggtagatttgggtagtttcaggcgttaggcagaagtgggtgattctggctgcatcccgttctggctgcctgttatgataagtacaatcctggaacgtaggctcagtctctgcagacagacgtgagggatggtagcagtcagcctcggttaacctgggtctggacttggttcattcgacgggtaaaatctgagattttagaccttgttcaatcaaagatctgtttgctcgaaaggaggggtttcaatgtacctttatt

SEQ ID NO: 3779 - DNA, 6826 bp, Emericella nidulans
cgaagttttatttattttgaggttcacaaaggtgggttctttttttgaacagaaaaaaaaaatgcttggcgctataaatagaaagcttatcatgactattatatatggttggatattacgagtcgattgtccttcacaaatatataagtcacgggattcttgtccacaaacagttcacatacctctagcggctagaaagacgactctaagagtggaaaaagtacgggtcttgggtagaattgctactgctattcttcgaagattcgaaacaccaaaactgtttcaggacgatcccagtccttcatcaaaacccctgtatcttgtagagtatttatcccccacccttatacctatcggggaagctccgagaacatacaactcttggagccatcacagaagaaacactgtacgcccaatcgatcacttccggctaatatgcagaattccccacaatggctgcatcgacaatgtccccgtctctgtcatagcaattgaaatcctacctgcccgcccttgctggtgctttggccgcgctcgattgcatcgcgcagtgcattgtttgacgtgtagcctccttgaccaatgcggcagtcatcggcacagtatttattttgctcctccttgctcttccctcttcgatttcaggaccaatcgtacctatcttcttcaattccgttcatattgagaattgtagatagtcaacaccatgatctcctttctccgcacgctcacctttgggttgacgctatcctccgcactcgccaaatcgaccagcagcaccctctacgcaacgcactacagcacctcctctatttatactctgaccctcaaacagtccaacaacacgtacagcctagctgaggcctcgtcgctcaagacctgcggcaggtatccgtcttggatcacgctcgatgcctccacaaaaacactctactgttccgacgaatatggctggcgcaacgccggcggaacggttaacgggtcgttgactacggtcaatgtcggcgaggatggaagtttgagcgaggaagctgtgacggggactgcgccgggaagtggagtgcataatattgtttacgagggtgacggtggggagaaatatcttgccattgcgcattagtgagttcttccgttgttctttgcttttttttcttcttctttcattctacggtaatgaaagtcgggcaatctttaaactgaaacggttgctaatatggaagtgaaagctctggcgctgcggtctcaacttacgccctcccattggaaaacgatgccgacccgctacaggtctttgaattcgagctcgacacgcccggcgaggtccccgatcgccaggaggcgccacatccgcaccagaccttccttgatcccacgggctccttcgtgctggttccggatctcggcgcagacctaatccgcgtgttcgcaatcgacaaatctaacggggagttgaatgcttgccctagtctgaactacacgctgggaggtggtcctcgacatggggtcttccggactgcctcagactcggagcttcggattagaggacgcgctcctggaccggaaaccgtgctctacgtgaccggcgagttgaacggcgaagttgaagcctttgcggtctcgtacccgaagagcgggtgtctttcctttgagcagattgataccgagatcccctatccctcggatctgcccgacggtgcatcactgtcagaaatcaggctagtcgaagatgacctctatgtctctgtgcgcctggactctgcatttggcggggatgactcccttgcaaggctgagtctccgccaggatggaaaagttgagtttgaggagatcagcacgtcgggtggtgtgctgccgaggacgtttgcgatcaacaaggctggtgacttggtggctgtagggaatcagctttcttcgacagagacgattgtggagagggatcctgaaacgggagcacttggagaggctagtcgccgcgttgttggtttgcgaagcctgggagccaaacaatctagaatgtttgagccgctttatctggaacgaatgatcttcatggcaatgtcactgcaatggaatgtcgactgatatgggtgtgcggtaagaacaatgatatatatatatctatatatcactcaataaatgcaagtcttctcagaatcacatcttctcaaggcactgtcaaatcaaccaaaatgcggtaagtcttgcgcggtcaacatggatatcatgccgcaaaatcacacgaaatgtgacaaataccaccatggcgcatgtatattgttaaatcataaaaaccaacatgtgcgcctacaaatacaaagtccagcttatttacagtcaatcataccgttctcgagaccgctggttggttgggccagcccttccgttgtcatgttcgcaatgtcgatgccttcggcctgctgagtgatgccgtggaaacataatttttcagtaccgtaaccctctgccgtaattcgttaagtccataaagcataagcgcccttcttaagggtgaatgtgtgatgcgtgactcatttgatgtccagttggaatgctttccacttccctcccacggtgtggcagcgtgggcaaccacgtgggttcggactcggatagcttgtcgggccgtgtgacattgcgctcccagggctggatgtcacgttcttgaacgtcgcaggcggactgctcatgaaacttccgacgcaatcgcggcataccccgcagatacattcagtacaggcatagcattcattgagaggccatgcctgcttgcagctggcgcagaagatctgtatctccctgctacggaaagacgccggggtgggattagagaagcggtggtgttgtcgctgggctgcggaagatggaaataagtttaacactggactcgaatctggatttctggcggggttcaagtggttggagtaaaagtgctttccagatgttgtcgatgctgagtccaaagacgattcaatggaggggaaaggttctaggtcggcgtcacggttgcgggagaattcataaggcggcggggtcaaagatttgtgcaagggcgacgctgcatatgatgtgggtgggaacgggcgatgcgatgcaggtgggggtagcccaggggattggaaggcaggcggcatggatgatcggcttttgattgatggtgccgatgtgatcgaagcgatattcggaatggttggtggaatggttggtgaacgccccaactacataggttagataaaacttggtgaaatcaggactgatgagctcgcccacctctgactgtctgtcgtcatcaacctcggttgctgatgtggccgcctcaatgagatcctcccaacgcttgccctgcgcccaggcagcggtttgcggttctgctgatagagccttcctatcgcctatgctcgggcgcctaccaaactctttcgacctcgaccgttcatgcttggctttccgcgccccggttatcgatcctttgcgaggtcggggaagcttgttcgtccgctggatcggcggaagggtcgaagagcgaccgggaggagagtggttgagaatcgagggtaggagcgatctaggttgaggggacgaaaatggaggcaacgagtcccgtttgaagtgatcacggagagaaggcagctcaatcgacgatcgcatcggcgctctgtcgatgtcgttatcggagtgaatctcctgcgtctcattaatcatcttatctgtactgaatatgtatgcacccaccacgtccgtgtcccaacttggagtcaaatgattatgatgcagttgagccagtgcaaccgcagcagtagccgcagcaggatgggcttcgtcgataccgcgcggggttgcaggggagttggatccagcgtacaaatcccggtcaactataacaatcagcttcagccattacgttatctcgtggatactgaccattgcgccttctggcggtctgaggcggcgtaagattggcacgctgttccggaggggtggtaaccatcagaataaagctctcttccgtcgctgggagcttcgggatgtaatggttcggatgagctcgccggatatgctcctgcatcgagcgataacgtttctcctagcgagggagtatcatgttagtctcaagtcagatacttgcttagatcgatgcttgagcatctccaacacccatttctgaagctcgtggcgattgatgagcacaatcgataacgggcagagcttcgaagggagaagtttgtggcggaagtagagcactcacccccaagcatcttttgcgacaattcgagccatcattgttcttcaaaggacagaccacctcattattggtatcgctgacggagaacgagctcgtcaaggtcgatcggggcggcatggtctgcatgagtccgtcttattggcggggttggcgtgcgaggataccggcagacagaaagctgggaaaggcgattcagataggagtcgattcaagctgacggaatctgatgtcgcgacacatgctccggaaaatgcagatgcagataaagagccgaactagtcgcatgcaacaccgaactaccgaacaaagcgtcaatgggaggggtagctctagacgacgacggacggataacgataaataaagcagcaagccggcagaacgataactgaagaaagaccagcgagctcaagctgcagctccaaaggggtaacaagctctaataaggaagagagctaggagcagaatagtgcatcgaaagggcaaagaagaacaggtcaggctctggcaggggagggggaaggtaagaagctcctctgagcaggtgggaagctagactgcgaacaggctagcggcaaggcgaagaaaatggataagtgattagcagcacattgattggagggaaaagaactggagtaatgaaaattgatggaggcgaccgggtgggaggggagagaccaagaggtggagggcgcgggactgaacgggaatactctgtaggggctgcaggaggaggtatagctcggtgctacttacgagtgctttccaagctcagagatttgattatagtactgcttagctgtctaacgagtatcactattcgatgatcccggtgacacggggatctctacctaccagattgaccgagctgctcgaccacttacataccgagtacatcataccaaccgtcgacggccacggctgcattcctctccaggtacaaggatgccgctgattcattaaatatgtattttatagataactttcccagcttaagtatgattcagatttttttttttgctctgtcaagcaaggcttactattctagactagcaaaagtagattgaagcaaaaaaaggtggcgcactgccgcctatcgataactcgaaacgtgggacagcgcgatatccgctgcggtgggttcgccgaggtctatcccacgacgtcaaggctgaatgttcgaagctttcaactcacgtatacagacttcggtgaactccattagtgacaatccgttatggcacactttggatttttatttatgtggtttcctttttgcaaatcaatttctcaccgttggatggtgagctgatgagcttgtgcgtgcgacgttgcggacctcttcggtagcatcggcctcggatcgagcgttacaaaaccgtactgtaacgacagtgcgccagggccagcacaactgaagcaacgtcccgaatgtgatgttaaggattcgaacttatttccgacagctacaatgtgactcgatatctagtgcaacggagacacaaccgctcgagtctgagcagctcccgagcttggttgagcctggcagacagagaccattacagtgataccgtacagattagtcagcccttcaccaacgtttcgggaactccggtggggcagactcgacagtctgggcagcttcaatacggaggcgtgcaccaaaagtttttgcgcgacgctagtgtcacgccatgtaatactgttacgccctacataacaatttctatggcaaccccactaccatacatacatcaatattttgacatatattgcttcttcattgtttcagctgcctgcagcctcttgaagctattcacactgctcatatattctatttgactgatcaatttagtgttttagcacgcttagcacactttttatactaattcaacttatcctgccacagttgctctccttcctcaacaccagcttcatgatacctcgcggcggctttcatccagtagaactccgtgtccaagttcttactttatcagctatcggatttagtacagagaagatctcaaaatctttgaatctctctcctcgtacggtccagagcatcgtaaagaaaggcagagatcgtggctaccggccggaagtaagcctgcgcgtgcagcttgaatttgttgaggatagaaagcgatctggccggcctgttgagattactgaagctactcagaatactgttattacttcagtaactgcagatcgagcagggcgcgagaaatcatcagaaattcttgcttatgaagctggtatctcctattcttctgttcttcatatccttcattctcatggctttgttattgcaaaaccttcctggaagcctggtctgactgaagctgctcatcttaggcgtcttgaattctgccttgcccaccaacattggacattagaagactggaaacgcgtgatctttaccgacgagactggtattattcttggccaccgccgcggagcaatacgagtgtggaggactgtgaaagattcacatacaaggaattgtgtacggaggcgctggaaggcctgctctgacttcatggtatagggttgcttcttatatgataagaagggccctttacatat

SEQ ID NO: 3780 - DNA, 1906 bp, Emericella nidulans
tgtatcatcggcattttctctgttcagtcgcgcttcacgagccttatgcttcgagctcttcacgtgattctggtaggaattttcgctgtagaaggtcttttggcaggcgacacaggttttctcaaaagaggccttggcggccgcggcgttggaggaagctttggcggccagaaccttttcgttgaagatttcttgagacactgggggaagagacgcaacacgacgtttcatattgtacagactaaacaggcggagagttaggttattcttttaacaaatgcatgcgtcgctaaaaagaaaacttactgccaatctgtgcgcatatggtcgcgctggccatcgctgctgcgaaaggcaacaaagcaagtgttacaggtgtatggaaggtccgccattgttccggtgagtctctcgacgctttatagcgttatgtagcaatgtccttgttgaggtgatggtcgtggtggttgcggtggctgcggcggggtgtgtgggaaagagagaaaaaggatctgactcgctaagggacgcagcagactcagcaacaagaacggtaattatactgttctttgtcggcttcaactagtgcctattgggatccgaagagtagtagtcgccaccaaatcaagtgagtcttgataatcactttcgagtcaagagagaaattgaaatgctcagtaatcgtaccgccgttgcgataggccagccatgacgtttgcccctctttgttttcactaggctttttgcggttagtccatgcgtagaagccacgtgattataaacatccaatcaagagaaaccgaagtatatctgaaagcacctgcaagattatgggaacactcgaaataagacatcgagctgtgataccctagacgatcctttgtcctggaactggcgattcgacaaaggacaaagtgtgtctgcaccacggaaaccgtaagctgattcaggagagattatcttagagccgagcaacgacactaatgttataatgaacagctacacccaaatggtcacccaaaacaggatataatattaagcgagggggctcatatagcttgcgaaatctttcgaaacagccagtctctttaggtgtcgttggttcttgaaaatatcctgcccgtttgtatggagtcgcccaattcaaagacaagtgtttcgaccccgcagaccctaaagtgagaataaaacgaaaatcgacgtatgaagagtctcgcctcagttgtaatgttgaccaggagcatgactcggctgcgagaggaagtatcaacaccactctcagttcaggacataccgggcttcttcgatcaaaatctcaaatagaagcatccatcttgtccccgctgctagcaacccgtagcaaccctatctgacggtgtcaacagacttggagaggttgcggccatatgtgaaaagctctcgttgtgtcccttgacgtccccgtctgagctagtccaaatcctggcccctaccgcaccactgcaggctctcgtcatgtttcaaggcccaatatatgaaaagggaatcaactgtggaaaccgacgaccggagaagtttgatagagtggtagtcagtgagcccgggctggccaccttgtacatctttctgatggagaggctacctggagcactttgctaggtggtcgtcaagagcggggcctggacccgtttcaggggagttgaccaggaacaatggggccccgtgacatgactaggacgccaggagcgcgatatgtcccggcccagcgtaacgccccctaagtgaggctcctgcaagtgcgatttgctttcttctgacggtctctgcttcttgcttgttactaggctctgacccattctggttcccctaatactaggatccagcttctcttacatgtatcttcctagttaggtatagtaagtgtcgt

SEQ ID NO: 3781 - DNA, 3152 bp, Emericella nidulans
  unsure (1)..(3152): unsure at all n locations
taaaaaagaggtcaagagaataggggggggtgcatttgaaaaagcctcccgggaacccctttcgggggggggcaaaaccaaagcggaaatttaggcctgctaccgctacccaggggtttaaggcgcaatttggaaaacggattcccccacagaaaatatccaaaagggcggtcatggcctgttcaagtttctctggacccctttttccaaattcgaaaccatccccaaagggtcattggtgtcgtttcacaatgttatagcagctattgtaaagcgcaaaggccatactcaagacaagctctctagctggtggctttcaaagagctctgaaaactttaccagagcgaggtacatcaacaccggccatagctttgggtaattactaacttgatcgtgcttctagattcgatcgttgatgcatgattacctggcaaccgacggtgattcttccattagaccagatgagcaagcggatgcacgacgtcaattttactcaggctacagggacaagaacaaggcgcgtttacccccattagaaaaatggtccgttgtactgacagtctcagaaattgttcaaattatccgacgcaggccgcacgacacagatgaaggccgaacaaaacgagttggatgagatcctgaggtcttctgtccctggtcttatctccaagtcggaacagaagtccgatgaagacggtcccactgattccaggcaaggtacaggccacaagattcttattgaacctagtgtattcaacatgagcctgctactaccgccctcactctcatttattcaacgactgaaggacattgtgcctgttgattcggacatgtttaccggttctctaacctctttcttggatgacttcctcgtcaacgtcttcctaccgcagcttgacgagaccgtcaccgatctttgcactctcagctttattactcctgatgcttttacggaagatcctcagtggtcgatggtttcaccaaaaccagtgttcaaggttcgtagctactcttgttctgctcctatctctttctgacagcctagggaaccgtaaaattcatgtcggttgtgagggagttcagtagaatgctatccagtattccccatgatcaagcatttacgcagcttcttctcagccagatagtaacatattacgacaaatgctgtgggtggtacaagagtaggtatacattcgagttcttccactgacccctgctgactttctcaagccatcgttacgaaggtttctggaagaggggatgtccagctcaaagctggggcagcttttgctgaatcggggcctgtccatgatcttgttgtcgaattgtggcgagggacaaatcccaacatacaggagctcattgacaaggtaactgagatctcttgttttgagagagtagtttttgttaacatgaacaggaaaccagtcttttgatcaaggaaacggatagggtgccactagagccagttgatatcatatccgatgccaaatcagtggtctcgctatcgctgcttcacaatagcatggttagtccgctgtagtgattcattccgtaattgtactgacatgtttacagcaatggcttgctagcagtctctcgaaactgcggcaaccgtcgatagactctcgatcatctcagcccggatcagggcccacaaaccgtcgctggacattgatcagtgccatgaagcccaagcgcgatagtataaatcagtccatctaccttccattaaatcaggagacggccactgcatttgacaccacactccagtcattacgggaccttgcgctcaccgctatctttgctttgcatctagacatcagatgtggaataattcatatgttaacccgcactatggccggccctaatccccccgcagttcgcaactctgaacctgccacaccttctccgcctcccagtggtggttgttggcatctcttaacgagccagccaaccgcagcatcaccggctatccttgagttaaacaaagatctgattgcgtttgatacgaatatttcaacgtatctgggatccgctcagcgccacttcatcacatccggcctcgctcggtttgttgacagggtcttcgtcgccagcacccgctacatctgggctatgaatgagaacggcgcgttacgactccaacttgacgtccttgtcttgcagcanaatctcaagaacgtcatcatcgatcccactcagataccgccaccagatcaggctagaacgcctcaagcagaactatatcgtgaggttgttacccttcctcggagcgccaaattcctggactggttcctcgaaggggcagaaaaggcgctcgattacgccaaagaagaaaaggagcgtatggctgcgcatggcgatcaggctcttgcagacggcgacccttttagttatgaagaactcaaggtcctggttgatttatgtttctcggagaatctcagagggcccaggagcgaggataaccgggaagattttatggcgtcgaagaaggcgagtgcagatgcactcttgaggctgaacgaaatcatgtgggattccaagtaatacgtctttcgcgcgagaggcttttataccagcagtaatgatactcccttctggcccagtaaggattacttgtcttgtcagcaaccacccaaatctaagagtgtgatcagtaagccaaaaacatgcaagtgatagccccaattcatgcataaattcagtgctgctgcagggtctatcgccattggtggtaagaatatataactaaaccggttcgcactgcttgagaacaggtatatagttccattactgtgatagggcaacgagtgcgatcagataatcaaagttatgctgtgcaactgttctacggatctattctgtaatctggacctgtttacctggacatccccctctggacgagtgtggagagctggtcgaatgtgtaagcatttagttgtaagcaatgctggatgctggactgtaaagtggaccattacatcattgcccagtcagaatcttaacagcagctcctaaagcaattttggagcttacggatggctggatactgtgaatctggtctcttcggccggatattagtgactcacaattttagaacagcctaaattacggtgtagcaagctagtagaattcggatttgctcgggc

SEQ ID NO: 3782 - DNA, 2588 bp, Emericella nidulans
  unsure (1)..(2588): unsure at all n locations
agggacaaagatcaggaaagcgcatcggatccattacacgaacagtgcaggaccggatcggaaatagacgatgcgcacgttgggccggggcggtcggtttaacaacgtaagaacgaattatgaagatggccgatcgggcccttcagagctcagcctcgaggaacccacggacgtggcggcaccccatcatgggcaggtatcggagtacacccataggaggggcacaagcaagagtgatatagcgggcggttctcagcactcgtcgatcgatttggacgccggccaagccgtcactaagccgtcaaacgcaaagctccctccttcgaatgactcattggatggccaaccgtctcttcgacacacattcccccatctatatcactcctctggaacctcccggtcgccatccactagaacctcgtccagttctcttcaagcattgaacgaggataccgtggtcgatgctcggtcggaacgcagcgtctttgcacggatctcgctgtcgcgaaggacgtcctacaaccaccaatccgacggcggactcngagataccctgtatatcctgatcagtcctatgccgttcttcaatctcaaatacacccaacctatcaacctccatttctacgctcccgaagctcttatcccatcgacactgttcacaaacctacttactcccgtggcgctcgtaccgctggcaatactcctatatccagtccaggtctgttctctgtccgaacccctggcctgacatcgtcgccgggatcggacggtgatgaccgttctggcaattcctaccttcatccgtcacatcttcagccaccaaaggagtaagtttataacgacctgatcctagggacatctactatagtacacaatatactgaccactggtgtaggacacatactgtcgaagtagacagggactccgtaactggaaacaaagtcatcaaccagtatgagatcctctcagagctaggtcgtggcgaacatgggaaagtgaaacttggtcgccacgtgacaaccggccaaaaggttgcgattaagattgtccagcggtactcgaaacggcggcgcttggggagactggggaatgccgaggacaaggtcaaaaaggaggtcgccatcctgaaaaaggcccgccatccgaacgtggttagcctgctagaagtaatcgacgatccgaaccgccagaaggtttacatagtactcgagtacgtcgaaaatggagagattatttggcgacaaaaaggacttcgcgagattgtggaagttgacaagctccgacttgaacgcgagaaaatcggtgctcctgacacaccagcattttgggaagagagcaagcagtacatcatggcagcgcagcgttggcgggagcaacgcttgagagcaatggaacggcgccaagcgcaagcagagcatgcgcagcagggacccattcctgcttggagtttggaacatggtgcagaatcggatgatgaactgggagctgagatcgcagcgacagagtctcattcctcttcgagccacgcctcttccgcgcctcaagaggctgcattggccgcaatggaaggcaccatgttcggggcctatactgattacccatctgatagacggcggttcagtaccgcatccagcagttttggctacgcaccttcagagacagatctgtcccctgaagaggacgacatgtcctatgtgccttgtttaactttcgcggaagcacgcaacgcttttcgagattcgcttttcggtctcgaatatctccaatatcagggaatcatcaccgcgatatcaagcgagcaaaccttctggttaccagtggtcatcgcgtcaagatatccgatttcggtgtttcttacctgggacgacctattcgagacgaggaggaggagcaactggatgagacagatgttgcaactgagctggacgatgcgcgggagttgtctaaaaccgttggcacaccggctttctacgcccccgagctttgctacactggtgacgacttcgttgaaagccttggtggcgtgccccgtatcaccggagccattgatatctggtcccttggtgtgacgctctacgggatgatatttggtcggttgccgtttgtctcggatgacgagtatagcatgtatcagacgatcgtgaagcaggatgtctttattccacgcaaacgtctaaaacccgtccaggtgaagaccagcgcccagtggcctcgttatgcgccagatagtattcgagcggacaacgagctggtttatgaagaagttgatgaagaattgtgggatttgttgaaacgactactcactaaagacccggtgaggcgcatcacattaaaagagatcaagcatcatccatgggttcttcatggccttccgaatcctagagcttgggtggaagagaccgatcccggctacctaagcaagggcaagaagattgaagtttccaatgaggaagttaccactgccgtcagcaaggtgccgtttattcaacgtgtgcggtccaatgtggcaaaatggtcgcattatttgactggaaggtcgaaagacagagacagtcgcaaacgcactcctagtgcaagccctcggttga

SEQ ID NO: 3783 - DNA, 4770 bp, Emericella nidulans
  unsure (1)..(4770): unsure at all n locations
taccctgcattgatggctcatatatgtgcgactatctagcatacatagcgtcagttctgtctcatcagtctccatgtgtcctttctctcataaatatccaagcggtccatctcgctgctcaataccaatattttagtcgaaacaatgctttcggagaagattctttgcccttcttgtgagtagggtagatggctgttgagtacggtagggtcctccctctgctagtaccacccaagcctaaagctatacaatatatcgactgtagacagcggtataaacggtacctcccggcaccaagtccagataccagcagcgcggaattgtcgacatgtttggcctttgcggcatgtaggtcagctactagatttccgcttcacagtcaaacctgtccgtctaggccggcatgatgaactctccagtggtgaaaggagataaaagggaggtctcactgtcaagtatctatgaaagggacgacgcagctttacggttgtgaattagaactccttctaccagagatcaggcgactagacctgatatgcttcatagagcattaaacactgactcagtgggctctgacaatatgtcgctgatctctcttttatcattttgctgcagagtatcgtccgcactctgagtttggttcagttggaaggtgggagctgctgctatcctttagtccatgtctgtaccaacaagaaccgattatcgaggctcaactgggaaggtatagccgccgcttactctgaagctgttgatgtagatgtttcagcaattcagcagtgtgattcttaatgtcgaatagagtgcaccaacaattcttccttcaaggtccaaggtcaatctgtggtcaagcgaaggacaaccttccaggccatctgtaattatgagctgaccacaatctaaaccggccaagacccacagattgggtttcaacagcggggcgcgtctttttactcctgggtgcataagggatggatcttatgtcagtggacaccgagtaccctgaatgcaggtacatgcttgtcagatccagccgagtggcaggacaggaattatactccgtaccgcagaacggacgcattcgcgcttgttagcggtgccactattgaggatcagacccttgaagcccatgcaggaagtacattccgggcgggaccaggaatcacgactcgccgtccatataagaccacctctgcaacccaggcatccccaggtctcaatacgtctctaattcaacaacacaggccgattgataatgaagtacttcctcgtccttgcagccttggctgctggtgtcatggcttatgaagctgtgagcagtccgccatgcaatgaatatgtacgcaccgttaccagagtccaatcttcttctacggcaagttttcgcacttgtctgctaaccatcaatacaggaagtccacaaagactgcgggtccgcctgccacccaacgtgcgagacattcgaagacgatgtcaatatctgcaccctgcaatgcgtcatcgggtgctattgtaaagatggactgtataggacagaggtagccaacgtaccttgacagcttagaagcactagatactaacgagtgcagagcggtgcttgcgtaccaggggataagtgtaagcaggggcaaggcgatggccggagtgagagcgactatggggacgagggcggggacgaagacgcgggcgaagatgcggatgaagatacgtggtcctactactagttgaactggcgttctgataatgggcggttgtgggacgtttgttggcaatgcataagaggtgggtgggatgagtgtaacaggcactgggctcgaccggttgataccaatccctcgctgttagtagcacttgaaaagtatgatagtaaattaaaacaaaaaaaatttaatgcatttgcttcagtttcttgaaggaggcaccgttgagaatcggtataagtaggagatctgcccagaatggagataatgtctgcgggcatccggggatgcatcggcgtctatcgacatgcatttgatgtcgcatgtagcacaaatgacggcaaggatgcaatcaatgtctggaccaggcgatccaggtctagaaaaatgcctaataggcagtgaatggaatgcggcgttcttgcgggacggcattccacgaagcataagctctctggaagtcactcctgttctgctgtagctgatatgagttggcatcttgaaatctgacgtgggatgaagggcccttcagtataatacaggaattgatagagcatgaacgacccggcattcctaccagaatgaacaactctgacatctgtacttggtatatactcatttgtactcatgatgaggtttaaacttcaagaattgagccgcgggtcgtatatttagttcttaccgctggacatgacacaatgacacagctagagagctgtctgacagctttttgcaagttgacttagggcacgggctccacagaagatgcaaggggtctgtgaggcaaggcattagtgatgccctgatattatgcaaatctaggcgcaagggctagtccactcagacggagaaggtcgagttagcatagccaacgtatcaatctcgcgttcttaacgtcataccaaggacggccccggtacatatacaattcacccaccacagccaaaaggcccacgttctatcatccaatatgaggatactgcttcttcagccactccttcgtacgtctcctaaagttaatgacaaagcattcgcaaaccccggatgagccgccttccatgatcagcgggccaagagaagcggacaggctcgcaaatacgcggataccttctattcgaaacataggcctcagaggttggaagtcccgagccgtctgtatagtaagatcagaggttattcgctctaagaggaagcaagtgactggtatcatctaatggttcctgactccactggaactcatgctagtactttcgtacatcaaagttcaaatagtcgccgtgttgaattgctctcaaagtgaacgtggccgcaaggtcaaaacttttgtcagcggcgaataaaccatcttacggccgggtttgacgttcttgtagacttggtgaattgagattggagacagtgcgtccatgggcttcccctaattatgtgatgaacatacagtagcatgcgagattcacaattggcactaggttctcattgctttacatcttgtaagcatgcaacaatgtattgggcaccaacactttcagttaattcggagcactgcctacagattgagagatgagtgatgcctaagttaggctccggcatagctacaaccgcggtcacaagatcggcaaccatcacctacagagtagactcatcatacccgcctcgcctgtaacggagcaggttggatcttctggtgatctacggtgtatagtttgcatattcttggctgaaaataaccgtaataagcttgcattgactaccgcaaccgcggcttgtaccttttaaacatgagagcctctcccgaattaggcgcactcaacaaacctggccaccagtcaaggacattccttgggctcaaagtcctgaaggccagagtcgacgctgtcgtcggggaacataccaatagaagcatacccgaacgtcgcgttgtaaccctcaaggggcataagtgcttcatgttagaataaccagtccagtgcggattatagcccgacgctcagtgttcaagaaccaatggtatgttttgacggccttgaacggagctctctcactcccttgtgagttccaacctgtgtcaaaggatatccctggtatacgctatcccacgaacctgtgttatttgactcagtcccaatcaagtgacgattgccaacctgttatgacccttgtgttgcaacctttcacataaatcacggccatacagataacattgcgagagttggatctgcagggctgaaaagacagcgacgattacttccagagctaaacgcatgatattcgctaacttgctagcgcaggttgtggatgcacagagagcagatggcgttaacgagctctcttcaagtcctagagccgaggtatctctagatgaaggccaaacccgatagaagaagtaccgtacataggcaattaatccaagagctttctgtttcttcgccgtccaaatatgtatatgggatggtattgtcagatctatagatctataactcaaataagccggcaaacatatgcaagcatcaccattgcaattgttttaattctcactttgtagatagcggcttgcaaacgtattgatataagtagtgtccttacagttgaagcaagatcagttccccctccagctggcttcacaatgtattgacccaaggagccttacatattcatgtcccgcgtcctgcaggctgcactttgataacatgacaaaattggcatgggattatcatgatggctcagagattctttctattgagtgcttccggtgtcttaaacagacagatgtgccgtggacgacacggcgcggcaaaggcctggcagataacggattcttgcaattatgccaatggtgcaagttcatcctgcggagagacgctcttcttgtccagaagctccggcgggttttacaactgctgttcgaggaaaatgtcccattgcccgggacatgctggagtattgagggtggacatggtactttcactcccaacaaagctaccaatgagataatgcgacggctgccaataaaaatattgctggaggaagtatgcccgcccaatgnatccccagataatactcagagagcctt

SEQ ID NO: 3784 - DNA, 4286 bp, Emericella nidulans
ggagtaatgaaggtacaggaaggtgatggtgtaatcgggtttaagtctagtatggatgaagttgaaaaataggtatcctgattcaacgtgccatctggcctatataaaagactgctgtcttgagcgttatccccggtagtatgatctttagacttatgcatttgcaatgactatatggatagcggtatagttcctatgacattaactgtacgctctacgaggtcaagactcagtcaaggcaaacccccccttctcaagcgcagcatccatcatccgatctccattaatgattcccgtagtacaaatcacaatgttccgcctcggcgcctcctgtgccgcaatgaaccgcaatgccgcgatttccgtaaatgtgatccctccgaggaagaacacatacacggtcttagccgcattgttaccactcagtgtctgccgcgcacgaaccgctttatcgtcgcccttttggacaatactgaacgtcgatccacgcgcactcttcaccacatcttcatatccaagccagcctggggatgcggtattcgcgtgcgcagccgggccacctttcataagcgacatgacgtatgatttctgcaagacgcactgcacaaggcgaatgctgagaggggcgaaaccgctgtagacataagcgatatcttcaggttccttctcgctaacttcttcgacgaccaggcgaagatttttgcgaaagtaggcgtagtttgttttcgatcccgtttgggtgcccgtgccgggaattagcattgtggttgcagacgaccggggctggagaagctccatcttctccaaagcactgaatgttagcaggcgttggtgcccgtatgcgtggacgacttggcgtttaaaactctcgaggtctttaggccgtaggccaccggacatgcatgattcgagacaaagcaaacggaggattgtcttcagtggaatatcccgggcgatgagttcctcaatgagaggatgttggtaagttgggtcggcgcctgcagcgtcgctctgttgcacttcgcggatcttgcggaaagtgtctgagcgcgtgtttttcatgatttccttagcgaggttggtgtgaactctcaagctttgatgttcgagttgatatgatggtagtttattcacaaactcgcgaagttcagttgtcgtttttgctgtatgacggctctcataatctgttgctaatcgacgtgctaccttattcaggatatcgccgactatagcaaaattcgcgtcacggagttgactgaacagttggtcagacgaatccaactgaatcttccgcttttgaccttgcttagcctgttgagatgctttggaagactcctgggcctggggagttgagctggcccctgcaattgtcgtatcaatgtccgcttggttgtgcttgattcctaccaactcatcgatgagaccctcatacgttagctgtgtaagcagaggggtgccgaagtccacctctcggtcaatgatgatcaaactctcaatgcttgagctgggtaaaagtccccggaaagacagtcctgtcagtcctgagctttcctctgcgtcaatctccttcctcatccgcagcaggaggtcagcgagtcgtcgagcatgatcgcctttgcctactatccgaggaaaatagccatgtctctgttgaatagccataagagcctttgcggaatggaagatgcacccaggatccttgtgctacaaaatgaatcagcactgatcactatctccaggagaaagatctcaccaggtacaagtccgcaaaagagtcatccagttccaaagaaagaacgtcctgctctagaggaaaaaagtaaagaggcagctcagcgatgctcacatctccaatgatgcctgcgctctctaggatgttattgcttacgagggtccgtcttggaacccaaaagatggaaaattcatggtctatactgctgttgcgttgaagcctttggatctgctctgtaaaacttgtcagcttattctgatggcattcagtcatacgaggcagagaaagaaagccttagggataagctgctaaacgaagtttcaatatagggagcttgactgattacgcagagtggagaagaagtctgcgtaactttaatgctcccagcaagcgcgatagcaaggagccttcgcatttacagtcatttgggtatgtaaatcaaaggtggataaagatcatgacatacctgccactgcccgcacctggcggatcttttcggcgtacgctagaaataccacattgcgctgagaagagtcgacatttccattttcaagcaagaatacccggtctacgccatactcctgaagctgcgaaaacttgacaaaaagcccgacgggcccagcaagcccctggctaatcaccaggttcttcttcccacggacctagatcgaggtaatgaatcaggctagaaccagaaacagtgccaactaggagccttactcacgccttcgagaagattcagcaagcctttacgggccttgtccttgatattgtcggcatcagacccagggaatggtgccatggctaccttatacgaagcatggggtgggagcagttgacgtatgactgcggcaccgccctcagttgaggcttagaagggtccagccatccccgctagcttctttcggcttagtggagtcgaattggtgagtaatcatacggtaaaatactcactgatagccagaattgcagcacaactatgtgtatcatgattacatagctgcctttgagtctcaggagcgtcttgacacttttgccgctgctgctcccctgacacttaacatcttcgctcccctccctccttcccttcccctctcttcaattctcagtcaatcataaatagcctctcaatttattattttcactctatattcctacgctgtttcggcgaagtatctagctaaaatacgctatgaagcgattcggcctcaaaaagtcgtcagacgccggcgacgacgattcctccaaccgccgcgccctctttggatcgaggtcgaagaacaagagccctcctgccgaagcgaatccttacgcgaaaccgattcctgctgacccttacacgagggcaaaagcgcagcacggtatagcacccccaccacctggcgtggacctcggcggccctcccaaccatgcatcaggcaacgcaattcctggtgatcacaagtcccaaatacccggcgacaacaaataccagggctatgcacccaatgcatatggcagtcagggcgggtacggcgcaaatcgatacggtggcggcgcgggcgctgctcccacttcacgatacggaggctacggcgggttgggtaatgccgaccctaatgatccggcggctgccgatgacaaccgagccgctctctttggaaacgccagcgagagagctgcggcacaaccaacaaccgcaccacctccttactccgaggggcagcctgcccaggccggcgctacggtgccagcggcaattcgtatagcgccgctacttaccaggaacgacatctcacagcagaagaggaggaggagcaggaagttcaggcagtcaaacaagatatccggttcatgaaacagggcgatgtcgctccactcgcaacgccctccgcattgccgcacaagccgaggaaacctctcgagagacgctcgctcgccttggtgctcagggtgagatgatccacaacacagagaagaacctcgatgtggccggagtggaagggcgtatcgcggatgaaaaggctcgcgagctgaagacattgaacaagagcatgttcgccgtgcatgtgtccaacccattcacgagtgctcagcgaaagagggatcgcgaccagcgaatcatggacaatcaccgacaggtgcgcgaagctcaagcaggaactcggagcgaggcctacaagaccaaccagcgcatggagcaaacgttccgggaaattgaacgagaggacaggaagaccaacaaaccatacaaggcatccgtaaccgagcgtgcgaaatatcaattcgaggcggacagtgaagacgaagccatggaagacgagatcgaacagaacttgaacttgattgctggcgcaagtggtcgactgaatcttctggccaaggcgacgggtcgcgagctagacgaacagaacagacacttggaacgtatcatgggcaaggtaaaaacttcctctcctattccagtaatcctgatgctaacgatagttcagagcgaatccgtcgacgatcagctcgccatgaaccgcgccaggcttgaccgcatccgctaagcttacacattgcgattggtatg

SEQ ID NO: 3785 - DNA, 2810 bp, Emericella nidulans
tcggaaattttatatgaaccccaccggcatcctgaacccagtgctggctcagataacccaggtagtatggttgttgaaaagggtccgggtcgaagtgcgcgatgtgataatagcctcgtccagagaacagtgggtaagggccttccacgttgttgctgcagtacctgtccgctgcctgccaggctgcattcacggtcttgttgttgccatacatgcgagggtccccttcggccgcaagctggcggcatcggactatttggtccttgcagccaccgggtttgctccatgcattcatcgcaaactcatagatggtttcgttaattgcctcgattccgtaggtgttgttgtacgcaatctcagggtacgacggagcctgcacaagcaggtcgatacagtcgtttatgatcccgagagtgtccagatgaatgtagtgtgattcaccaggcgtggtaagcgagccattggcgatcttctcgttttgctcttggaagaacgcagagaaagacggaccatagcggcctccataggactcggtccaaatactgacccggtcatcacggggcttgtaggcggggaactccgtgaaccaggtttgcgcaaacgaccagagcgcgcgggctgcgttctcagtggtatttgcagtagcagaggcgttgagactggggaacgtgcccacgtagaacgtattgttctgctccgggaccgtcgaccattcagaaacgtcacgcacacctgtcaattgattgtacgttccattagtaggaacatcataactgaacccgacctggttcggttggtcgatgtagagcatgttgacgtaattgttccatgaccacgggttcagctcggtggaattcgagtcgatatttaccccgcatgggccgttcttctgcatgagcccgatcatagaggagcttcccgggccgccattcatccagatcgagagcggcgcattgacgggatcatttcgggactcgaagaaccagaagaaagtgttgataggatactgctgatccaaaccaagatcgttgagagtgccagggggcagatggacataacccgagtaagattttacgcctggggttgtctcgcaaatttcaggctaagacggttagacatcctacccatcacataatgggtagagaaacacacttctttgtaggatatcgtgacgcccttctggtgcttggaatgaatgaccttgacgccctcgggagtagggggaaagtactggccggcgacgaggccgaccagactggccgagaggccaacgaccgatgttagcgagggcatggagagactcggcagcactcttgtaacccagcttgctagcagagatgaaagaacggactcatcgctggggcttaccatgcttcttatccagctctttcctagctaaagtggataactcgctaatctgtgtaataggggtcaataagcaacgggtagcgggggaggtgccgatcaatgtaacaataactggggcaaagagcagcgactggctaagctcgctctagagaacgcttagtgctcgattggccccactgcagtgtaactcgatgacctgatatttgataagagattgttggaattttgtcaattcttgtttctcactcgttctcaaccttgaaagccgcgaatctaccgtggttgggagttgcggcttaccgtacgggtagccggccggccagcggaacagtacctgtcatcgccactgaatgaaagctaaggtgtattggtagacttggtagaactaatagctcatgcagagcctaggggatatataactgaaacatgaagggtgctatcatacaatctagccatttcaaacagaatcaccgaccaggtagtgtacccatgttgtccccagtatccgccaacgcccagtacgctttgaacatgcagaaatgctgacaggaaaaaaaagaaaaaaaaagaaaagaaaagagaagagaagaggaagagaaagagaaataaaagatgtcgctgaagccaggctcaatgccctcagttggcgccactgccggagggcaagtggaccttaacacaaagctattcacagaagggtcaaagccggagcctatatatacaggaagccagaatataaaaggtgagcgaatagagggtatcagtgaatgttgaaagcgggattagggctaacagtaggtttgtggtttgttcaggagtgcgttgctgctggagtaacctcatcttgcgggggtttcttgttctcgatctcggtagtggtttcgccaacggaagaaaggtcggtagcgacatttcggatgttcgggctggaagcctcatgctgcacattaaggccgttttccggcaccggatctgttgacttgacactggatacagagtggaaatcgtcgtctctgagcgacgatgctttgtttgactccgaggtcgcgtcgataggcgacgcgtccgcactcgagcctttcttcgtgttgtcagtggaagtggcgggtccgctcgtagaggcatgggtagaaacagaggtcacggaacggttgtcgtcggatgatgcatatgggttgggagaaaccggggtagctgtcgacgcagtcgacgctcgttgagggttccgtggtggaagagacggaggctgtcttttaggaatagttacgaggcgagcacgggtgaaagttggcgactggcgtttaacctccacaggcgctgtcggaacctccacagataggggcacattggagctggtagaactatcgcgcttcgagatcctggcactactaacctcgtgtacctcgaggtcctcatcgttgatgaacttgtccagcatacct

SEQ ID NO: 3786 - DNA, 3265 bp, Emericella nidulans
tgggttgcgctgacggggcgggctctaatatgggcatgagcatgagagcaaatctgccgggcttgcatcaccggtacggcccgattccgagctatagtggacgtgggacgccgagtcagagtgggttctttgtggcgcagggtcagcctttgggaacccctgcgggcacgcctccagctgagcaagagcaagcgcaactggaggcgcaggtgcataatcaaggcgagggtgttatgctgtcccagactcaggctcgggcgcacaatgaaacggtataaatgaggtgaaaaaaacagatcagtgttgcgatcagggctcggctccagcataatctggaactctcaatgacggaataccctgatgttggacccgtggtgccggtatgatatcggagagttaccccaaagagtatcgtttgtactgccataccggtgtattctgttcatttctgtaattttgcaaagcgatagatatggcttggtatgggcggcgtcttggtaatctctagcataatatagacaagggcaatgttatcagtacttgtggtacttgtgctcataggttcgttgaacaacagtagaacaattcttacaatcgtaacttcggctccatatctgcatattttcttatgcaaagaataccttgcaattcagaccgacacaggagttcagccctggcgtattcacaactggctattctgggtccctgtatagggcacataacctgagtatatgagaaaccctatttgcgcaaaggctagcatccagctcgttcaggttaaggtttacgaatgacacctttcctgttgttcccaatctccaatattggttatgatatataatccaaaaaacctttcctttccatcttcatgctacatgaattgcacgcatcaattgaaggtatgcgcggaaagcacctcggtgcgaagctgacttcctcagagcgtcgaagactcaatactcgtacccagctgaacgaaaggtaaagttggttgagattcagtcctaatatttgacgccccattcagatcccgcaagaatggttgagggttgaggtagtcggtcgcaggagtcatcagaggttgtggacatggtgctgaaagttacatatatgggaacgttgccattgtatatgaggatgaaactctccagcactgcgcggagaaaggccaaaatcatgcacaagtcagggaggtgggccgtatttgaccgattgactgatggctagatctaaacaccatctctatataatatacttcagaattttgcccgtttcattaatctatatatccgtctccgcagcattcgatctctggccttgattcgatgtcaagcttgcttttctgcatacggcgccaatctactcatcatcctcagtcgcgggccataaatcaaaaacaggaccggaattggaatcataaccacggcaatacaaccaagaagggtccctgcccactggatacccatgttattgaacatctgccgcgtgaagagcgggaagacgccaccaaccattgagcgcatcattgtgtttgcggcgaatgcggaggcggcactaaccagtgaccggattgattaggtggaaagacaaaacggggtggataaagggaagagcgtacaagtttaaataagagtccaggatatagttaaatccttgcataaagatggacgtcagaccaaagccgacgaagactccagatgcggtcggggccatccagtggatagatatgctgaagccggtccagccgaacctgttctcattcttagtaactgttgtaagaagcacaaaggttgactataccagaagagtcctcctgcaaacgcaataccaccagcaatacacggcggtagccgccattccgggacgggaacattattattcgcgatcaacttccgcgtatacgacttgtagaaagagagcacaaacgctgcacccaggatctcgccgatgatgagtccaataaacggtagtccgctaacaccgagcgacatcccatgtacgccttgaaagacgagcgggaatgcttgcagcatggcgtaggtcagcccatagaggaaagacatgtacagggtcatgaggaaggcaatgggttcggtgaagaggatcctgaacggccgcgtaaagttcttggtaagaagttcacggatgtcgatttcgagttcttcctggcgagcgtgaatgccccagttgcgggtctggcggcgaaggatggctgctttctgcaccaggatggtgggggcgtatgtttcttgcgcgaagatgacaagtaatcctaaagcgaagaagcctactatcgcaggaacatacagtgtccacctccagccgagatagctttctgctgtgtatcctccaatgaatggtgccgtgtacggccctaggaacacggacatggtatataccgcgatagcaatgccgcggtggtgactgttgaagagatccgacaggctagctggtactaaagcaataagactggcagcgaacagtccagagaagaaccgtgtgagcatgaccgtttgcgtatcctttgcggtagccgtggcgataatgaagatatcgaacccgagcatccctaccagcaacggcacccgtcggccgatgagctcagacatgggcgcccatatcgtcggtccagcagcaaagccaagcacatacagcgtcgtcccgagcgcagcaacttctcgtccgtaaccaaactcactcatagtgcccggagtagcagtagcaaagaccgagctgccataggcggcaactagcgcggcaaacgttaagatgcaacctagggccacactgctttcatcagcaccaagccggttgaataggtaacaggatacctaccgccttgtcattggccaattttgagggtgcatcaggtcgtccggcccctcaaactcaacgatatatgcctcgacattaggtaggtccgggggataaggtttgccagcgccgagaggcagccattgctctcgaggaatccgacttcggctcgacccgactgtctcctgctgttggagtcgataggtgttgatgcgctccagctcgatttcgtcttctccatggctcgggaggtggcccgactcggcatcaaaatcagcggagctgtcgtccccggtcttctcggccgacaccatcctgaatcttgactccctgctgcagacgcaaaacttcagcacagataagcgccatcgcccttcatataaaatcttcagctgtagcgggtcccaaattcttagaggagtttgctggtgggtcagtggcccatggatac

SEQ ID NO: 3787 - DNA, 7064 bp, Emericella nidulans
aattgcaagaacttggctactattcaactccttccatactttacttgacatttcaattgctgatgacggcatgttgatccccagggcaatgggacctacctttcaaaagatgggtaacacagtgcccagacacttgtcactgccgaagctgggctagtcaaatgtgtgtgttgctgctgttgttcatatgctggagcatcccaagatacatgcttccaagggtgcctctgagcccttacagaatctacggctaggccttgctgggaggagagcgggctctagtgaccatctacacgtcaggcatatgacttttcgcttctaaagccaaggggcctggtcaaatacttcactctccactctttttttctggggattggcccagccacgaatgctatctaggaccccttgtatcaagtacacggtccagcggtcttggtttgcatagcggccggtagtgtgagcctcttggcgaattttttcttcaattctaccagcagtacgcaatcaatatgctcagggagtaaccacgacctccctaaaagcacccatacacagttcagcaagccgaaatcgaaatgaatttgcatgcacacggacgatgtagaattatgactgtccttttcatctattctcgcggtgtattccttgtctaaggaaagcaagtaggaactatgttgggtattgtgtatctaataacatcaagctgacacgtagacatcaggtctacatgctcatagctctatcaggaaaccaaagctacgtccagcccgccaaaagcaataagcttttcttcggcgccagggaggcctttctataggctagaaaatgcgccgtcctgatgccagacacgctggaatgatgctgaaggggtcccgtgagtcatgatctacattatacatgcatggctgtgctactctggtagcctgctgacctgcaaacaaccaatcccattcttcaaccagcagaatatagacaattttcaccctggatttcccagctgcagcccctgagcccaaaataatatctccgagcctgatgacttgtacgagcaccgcaaatccccctaaatatcttcagcttccaactacctaagcacataagaccccgaatcacactacaggatgcatgtgcgggctcagcttcgaaccataggtgatctcagaaaggctaattgtggccatcacagtagttgctacgacagtgaggaccgatagctacagagttttagtatttgctgtttatgctcgtttttcctttcgttgtatgttgtcaggtccctctattgccaatttaatcactgaatctgaagtgtaactagcaggcattacccagctggcccctggttgctatgccgcccttgtccgtcctccatcgtagctttaggtagccttgaccatggctataagcgtaggggtagacttggctcgagtacgctccattcataccctccgcatctatacttcttaagaataatttggcgaaagtaacgcgatatcagactcactgcttaccataaagccttctcctgctttgaatatcgcgctgttctgggccactgttcagaagctcaaaagcctagtctgacaaataaagtgatatgtttctgtataggcaactactacgtctactaatacatttgtagcttgattcctaacctcaaggaagttttatctccaatgcggggatcccaaacaaggcgaattgtgcatataggaaggacagcgcgtcgggattgcttgcgcacctgttggcgccgagactgagggtaaggatctgcgagcatgggcattgaacactttccaggcggccataacaggaaggtctgggtaatattgttggatccagcattattgcttttaagataatggccattggaactcactcaatagtctgtacctgtttactgctcgggatgggcattgctttttacatctctatagattgtatgaagaggctagtcatgggtgacttttctcctcctagtgctcttacaatgcaatatactagaggacacgagtattgcgtccagagaacttgctagacactagccgtgatcataaggaagaagaaaatacggacagatcatcgaacagattccaacggaggcagttagagtagtcttcaatcaatgctcagggaccaggaaccccgctttatccatagcttctgaaatttcgactcttggaacaacctgaatattgaacattatgtgctttctcaggctgtctttgacttcatgattgacgagtgagatcgcggagtccagttgcctggaaactgcagcctcatttgcaacttgcaacatgtaagtagtctatccttgacctcttgcgatcaactacccgccggaaatctcggtattgttgctatagggtccatttctagccccactctgtaaattttatactggcctgatctgacctaatttcttcagctggactggggctttctgtgttgaacctgtgctcctgacagcgtaatgtgacctggacaaggcatgattgtgtaccctgataattcaatgacagcaagtaaaggagtgggatttatgtacctggatcaaatttcaatggtctccgcaacttggtatctgagaggcgactggacacatcacctgcactccgctttgttgtacatgttctatgagcgcatgtttttgctcggggattcccgatcttaataccctagggcgttctgcaatacgtacgattctattcttgtcccaaccgcaaagatattcctgaagcctgtctcgattaacagagaggcgagttgtccaaggccgctgctccctgcctgctcatgctggctataagtacggccatctacccttgtgaactctgatcttccttcaatccattccaactcaacatcatttcacatctctcagtctatcctcactaaaaggaaatcaccagctacaagtatcaaccttcaagatgaagttttcctttcttctcccatcgcgctattctttgctgccgctcacgctgggcacccagagccataacctgttgaatgttccggtgttggcagtgtaagcagtccaattccttcattcattcttccatatcccttttgagaaaattccatggaagttaagacgccaatgttacaaatccagatcaccgccgccgctgatgagaacggcgattactacgaaatctgcacgtgccccgaaggtgtaagttcattctcattctatccttccacaagaaatggccagatggccctcgtactatatgcactctgctgaggccggaagctgacgattgaatgcatgaacatagactgagagagccctgctctacactctggtacgttccactactctacaatcgcgcagagcaaggtctatcttcgagttcggatgcgcgtccatagtgtcgcaccttgtcgcactgcagcaagtgactgacggcgaacaacaataatacaggccggtcccccaggcggatatttctgtgccccgatctagtctatcaggctcttttccgcggcaatgctctactgcggctttagttgaagaactaggggtattgacacacagttgaggaagcattaacgtgcctttggggaagcagtgactagctatacctttagtgcaatgggtttctcctaggcgactttttgaatacctaaagtgcacgctctccacgctctccacgatctatctagaacttctatctccgtcttgtagagatactgtacagattcctagaactcaaatgcgcgttctctgcgcaggcacactcctcacatactggccttgagtcagctacaaacactcccctgatctgcttcattgagcatgccgtccggacttattgactatctgcatgcagcgcaacatattggccgaatgtttccgacaggtcgactcaatgctgctaaaaatgagaagcctagcgtcaggattataggtatcgtgtctcattgggtgggcagaagggctgcttaccaagatatgtacttaataagcaatggctaagggaactgtactacggctccgcagacaggttacaggtctaaccgagctgcaacctgcgttaaccacgttaacctgcctgctcctgaaacccttctgaatcgtcacatacaaattttgcgtgggaaattcacattcagctcttggggcgccgctcctgggatcttggctttaagttctgtactacgtacgcatagcacttgaaatcatataaatactttttgcttgcctaatcatgatatctgattgccattagccgcggccgcctgccaaactgcgacgacgtactgagataaacagctatctcttaaaacaaccgaagtctacgaataatcgctaccaggttgttgcttaggttaaggtaaattaagaaggccatgcgaggcaaagaagcaggagccggcaggagttactcaccctagctattgtggcactcaccctaatctcacctgagtcgcacgatcgtaaagcggcctcaccctggttcacaatgattctgttgatatatataatctccttgtgtccaaaacaagcacatacgaccatagggtgtggaaaacagggcttcccgtccgctcagccgtacttaagccacacgccggctggttagtagtatggtgggtgaccacatgcgaatcccagctgttgtatgtttttgacaattttttatgcctccatacgcttggccggtggatggtttgctagtttccagatctatcatattgctcggggctttatatttaaggtcatctggaatatatcgacctcatggtaatgtctaccaagatgattgaaacagatacatctcacgaagaagactttccgttaccactcgaaacacatatacaagccagtaagatagtacccaaagactaagaaacaagacagtagcttaggcattgtcagtcgcacacgaaaagctctttccagcggggtcgtcatggatcgctttgcccgttgcatacagaccaattgcacactggcgcatatgtgattagttgtggattcgctttttgtgagatagagaacgaaaacataccataacaacacccatcccgaaaacaaggcagttaaagatggtgattccagttttccttgggctcgagaaccacaggccacggttcatgaacagccagaacgcagcaggaagactgaagctgaaccagctggcgaagagcgcagtctgtctcttatcagtctctgcatcagacggaagacgggttagggtgagtataccataagactaagaaggttactgaaaaccggaatcgcagtcgcaaccacccaggcgatgacccaaagtcccaccgcaataccgatccaggatcccacggcccggaaatcctgcttgtgcatgtgggaggtgccggcgaagacgcgtgtgtagatggacttacacgcgatgtgcccgttaatcacgccggcgatgataatctaccgtagagttcacagtgagctaggtctagaggaagtgctaaggagagctgaggcgggcttactgttggtagagccaccccgtaagcaaccttagacaccaatgggtttattgagccgagtgctggggacttgacgtcgtccccggcgaagtagtagatcacgacaccggaaacaagataaagggtaatgtcaatgcactgcagcagggtgagggctttggggaagtctctgggctctttcaactcagcgatgacgttgaagaaggcgttatggctcgctgtaagacttagacggatatatcactgacaggaagagaatgaggagtcttaccgtatgacaggatgatattcagcgcagctgtaaagccagtgacaagatttgtctcggctgtggctttgactgggcctccagggtgctcgacaccgatggcgaccatggcgatcatgaccgctgtgaaaatactgataaatgctggataaaagtgatagaattagcctcatatctcattgtggtaggctattactcacaagcaagcgacagccacgacatatttttcattgtcctgggcagggaaaacacaagagaaaccagcagcccaataaccccaaagacaagagaacatgtcccgtggttggtcagtctgttcattgccactgtgaatgtcaagatatggctggccatgaggaagatcaagaagagcatctggccgccgaagagaacctctcgcccgaaccggcccatcaggacctcacctgcatcagccatgctgacgacatgcggataccgccacttgaattgcccgatcacgtagcccgtatatgaagcaatgagccccatgacgagaaggatcacgatggccgggacgaggccaagacctgcgattgcggctgggatggagagaatgcccagggatattgtttcggcgaccatgaggagtccgcattgcctgaatcatgacagagcacttagtagggagcatgaatgggttagggccgggttgcattcataccaccatttgaggactttgtacttgacttcggcgtgctcctcgtcgccaaagacgtcctgtcggtatggaacgctctcagccttttgctcgtcgacggccatcgtgggggtttccttgtgcttcttctccgcttgagtgcgctcgatatcgtcatttgttggttggaattgggggatgtcggcgtggaagggcatggtgtaggaactgctgaatgtggcacagcgaagaacgcgaataggcggcaattcgctggaaatggagtagcaaaagagcttgtatctgacgcagacgaaaaaagaatgatgagatatgatgcaagaacccctaaactgtgcagggacgaggaatgcgagaaaacaggttccgatatagcaccgccagggtgccagatttaaaggggaggacagaggtaggctaggggggcagtggaatctgcagccttaggaagtagtcagcgtagctacaagagcggcaccaaatcatgtctccttatctatgggtccaggattgagagatatacctcctgctagctcgctggtcttctgcgagcactggagatttattagatcgcctgatggagatatacgttcaacattgactatagtaggttccgtttttatacctttgttc

SEQ ID NO: 3788 - DNA, 2100 bp, Emericella nidulans
taacgggggtttcgttgggataccagattggggcagctcaggtagcaaagcccgctgagatggaacaagatgttgaggaagaagaagaagaagaaagtgaagaagaggaaagctccgactaggaaagtagctccgaagacgaagcgccccggcgtgtcctcctccgcccaacctttatcaaaaaagacaaacgcaccaacggcgcaacagaccaccaaggcgccgcagccgcagactccatagccgaagccgaagcgcgcaaagctcagcggcaggagaaagcagatgcgctggttcgagagcaaattgagaaagatgccatcgcgcggagctctgcgaataaagcctgggatgacgatgaagcaatggcaaacgaggaggcggctattgacgatacagatggaaaggatccggaagctgaatacgcagcttggaaactgcgagagttgaaacgcatcaaacgtgagcgtgaggctattgaagcggcagagaaggaacgcgaggaggtcgagcgccggcggaacctaacagcagaagagcgcgagcgagaggatcaagaatttctcgctaaacagaaagaggagcgtgaggcttcgcgcggccagactggatatatgcagcggtacttccacaagggtgcatttttccgccccgatctcgagaaggaaggtcttgataaacgtaatgtcatgggcgcgcgattcgcagacgatgttgctcgggagacattaccgcagtatatgcaaattcgagacatgacgaaactcggaaagaagggccgcacgcgatacaaagatctccggactgaggatacggggaggttcggtgagggttttggtaatcgacgaagacaggaagctccagtaggggttacggatgaacggttcttgcctgatcgaggctttgataagaagggtcccactggtgcaaatgcttctgttgtaagggagaggcgcagatcacggtcgagctcgaggtcgagctcgaggtcgccgagaagagatcgaataggtgagcggagagacagtcgggatcgctccggggataggtatcggccagatacgagcagtcgcagaaagaggagtccttcgccttatgagaatcgagacaagaggaggcgcatgaggagtgtctcctaagtagttcgctaccatgtatttctacggcgtttgaggtgaagaaaatgaagcatgggcagccaggttgcatggcatatattgtgtataaaaggcctttgatcatagttcactaatgtttacatatgatttactgaggaaagcatgatattgctttgggtatctcttgctataatctgcgctagtggacaactcttgttcgtcttaagagcatcggatcacttgcttgttcactcttgattctcatttacgcgggatagaatcctttcccaatatttcctgggcggctctatcccatatggactgccgtatcgaaaatcgatacgaggccccagaagctaccattcccgcccctctgtgcggagcgtatcgttatagctcctccaaaaactttagcattcaccccatcgtcagacctcttatttgacacccgcccgctccaacaccttttctcgctccatgacactctccccaaaacgtaataggaagatagtccggctgggccacatttccgtcggctgattatgcgccgtaaccttcgcctcaaacccacatccatcacaaacaccctcaatgatccccgcgacaaacgcggcacagttcagctggttcatctcctttggtacactgatatacgtattaacaagcgggtcattatctgtaatcatgtactcgttcggcgtatctggtgacactgagtgctcaagggcgtccgcaggacggttgaataggagtcgcaaaggggtccgtgaatgagatgtagaaggggtaggatgcgaagcggtcgattaggcggtgatgcggacgttgaggagctggatagggcggtagaggagctgctggacattgtgcggtggaagaggtggtctaggagacgacaggccggcggttcgacttggacgtgtaccgtggcggaattgacgtatcatgagactgagatcaagtggagagctggcacgtagct

SEQ ID NO: 3789 - DNA, 4443 bp, Emericella nidulans
agaagtggagtttgcattgggcgcgcaggtggaggcctgggagcgcgcaccaatcacatttgtcaggtcggccagccgcgcgccaatgccacccaaatccagataaggccggatgcggagccaggagtcaggaccacaagtgagagctgaggtaaacattgctaaaacaagagctcggcagccctgtaactcaggcaacgactcgagagctggagcacagatcatatttagatcttgaacccccaacagaagctgcgacggagcagctactgtatatgaagtatgagagtcaagcactatgccgcacctgggttccaaatcgaatcttaaaatgcttaaaatgctcagtaaagtcgctacctgagaagaattgttgcaggtcatcgctgtctatgcacgcaaatcctttggcccagtctttcattgacatgcgatttcaaggacaatggcgaaaggccatgacacaggtatctcaaattacaaccaaaacagctttatataatggctttgtgcatattcttgactgttctgacaaggtgggcttatttgtataaatgttgtgataggtaattgactagttaacataaatgaggggttctcagaccgccatggcaatccggccatccggtattccatgtaaatagccctctttttcaaaccctggtcattttagtcagcgataaacaccccgacagcttgaagatcgcccgatcacgcatgctaactatttttggttgatagtcccttcttctcattattgaaaggcgcccctggagcgctaggaggtctgcgcgcagtggattttcttcttcttttcctttttagctattctctattgtatcctaagtttttctaagagctttgtgcccgattgtcttctatcgctagcccccccagagcaccatgggactgccctgaaatatccgcgacaaagtgccccccttgcaaattgacacaatggatcaaaccaaaacgccgacacgtccaagtggaattcctcgtctagtttctagaatcccgttgcctacttcaaccacgagctccgcttcactcagaccatctccatcgcgcgagaaattacgcatcgatcccgggctaaaggccaccaggcttagacgaccatcagaagaaccagaattcaagaagccgcttccacgaacattacagccgagaaatacccagaatggcaacccacaaaaacgacttgtatcacaggccaggagtgacggggtaggatcggagaacgagaaagtgccggacactatggacacccgctctgaagatacggcattacaggatgcggaacctcggggccgtatacgcgttcgctgtcagaaagaacaattgaaactctgtctcagatcccgccgtctccagcatcatctcggaggccatcgtctttcttcaatgcgactagtccgattcgatcaccatctcgcccaccatcttctatgaccagctactcaaggtctccctctcgatcctccacctctcgtcaactgagtggtaatgatttcctatctggtcccccgtccagcatacggctaccgtcacggccccgcacttcagtgcataaaaccgggcccgctaatgaacatgcttcggttgacagtgcggacagcacaccaaagttaacgaaaccagcgcctctaaagacccttcgttcggctggttcgcaatccaaagccccggagtcgcgcctggccttaaatagagccccggcagacagcggagttgcaccgccagctcttgaggtgaaaaaaaccagaagggctcagcagaaggcgtcaaactcgaggctcaattcgacagctccaaagtcacctgcagtatctgagccggcggaaactacctcgccggagctgaaaaaaacatcgaaatcgtctagtgccctaagggaaagtattgcaaaagccaaagctgcacgaaaagcagcagcacaccagccgtctcctcttgatgcgtggaccgaggctgatatcaaagatccattcaaccaacagcccaaggaccagaacaaagtgctccggaagaagttagatgcaggcaggaccacgggtcacctcaatattgcggccatgtccttgactactttccctgacgaggtcttgacaatgtatgactttgatcctaatgccactacagattggtacgagagcgtagatctggtcaagtttatcgctgcagacaatgagttcactgaactccctgacgcggcctttccagatgtcgactcggagcaactggacccggactcggaggagagaggaaatcagtttggcggtctagaggtcctggatgtccacggaaacctgctagaacgccttccgatagggtttaggcggctgcaaaggcttcacacactcaacctctcgaacaacaaattgactatggaggatatcgatgtgattttcgagatggcgagcctccgggacctgaagctggctaaaaatcaactgcaagggcctttctcacagaagattggtcagcttgacaaattggaagttcttgatattcacgagaataccattaccgctcttcctgagacagttgaaggcctcaagcgccttcgagttttgaatgttggccaaaaccagctaacggaattgccgttcgagatcctatgcacgcttcctctgagggagattatcgcccctaaaaacaagctacagggcgtattgattccagccactgtggacaagctggactctctgcaagagctggacgtggtcggcaatgcgctcacgagtctcggagagaagttgacgttgcccgctttaaagactctagcaatcagtatgaaccgtatcaagaatctgcctaatgtctcatcttggcaagcgcttctcaaactttcagccgaggacaacagtatatctgaatttccactgggctttaccgaacttaaaaatgttcgaaacgtcgatctgactggtaacaatatttccagattagacgaaaaaattgggttgatggacaatctctttactttccgcatagcaaacaaccctcttcgcgagcgcaaattcctcaacatgaccgtggaggatatcaagcgtgatttgagaagccgatgcgaaccggaaccacaagagaccgatgatgaggaaggatctgtcgccacacagttcactcttgctccagagacaccggctcagaactcaggctggctgctaaagcctggaggcgtactcgataggtcctatactgatatgcaagagttcgatgtggaacaactggaagctatcaacccgagcgatgtcagatatttatacttgcaacacaatagcctgcgctcttttcctgtaccagcactcagcgtgcttgcggccaatctgacagatctcgacttatcacacaacccactagatatctcttcgcttaccgctaccccagtgatgcttgctagtcttcagacgctgaatctgagtgctacgggcattaccacccttgaaccactcatgaccggtctaaaagctccctcactaacctttcttgatgtttcgtcaaataacctctctgggtctctcccctatattcgacgggcatattccaaattgacaacattccttatcgcagagaaccagctggatagcttggattttgaagccgttcagggtctacaggtgctcgatgtgggaaacaatagcattagctcccttccaccacgaatcggcttgctgcgagcagctggaaacagtgccaactggggtggcggttcggctttacggcggttcgaggttgctggtaatagctttcgtgttccccggtggcagatagtggccaaaggaaccgactctatcctagagtggctgaaagaccgtatgcctgcggaagaactgcaagaatatgagtcgggcggcgaaggagactagcagcttgttctctatcgcagttgtagcttatgggttgcaagtgtatatattcatacgtttctaggttcgtgttttagtcgtcattttctggggcatccaccccatacccaattcacatattaatcctatcagctctagaccacgtattatacgtcgatagacttgctgacttcctcgataactttggtccacgtttttgaccatgcggtaaacttatccccctggttttcctgatcgttggcagtctgcttcagatcccaaggcagaacgaccaactcgatagcattgaaggcactttctttggttttccgaagttgccgcgtaaatttgtcaaaatctgcctcgtataacgctccagccacctcgtcgatatgatccggaatctgctgtaaacttttcaacattgagtctagaattccaatattcgacggtgctaatggaacgggcactctctccagacggttcgcaatgagagcggggtagatttgggcaataggcttcaagattcgaagcgcactctttttccgtgcatgtagcgcagcactgctttctccgtcgtcacttccct

SEQ ID NO: 3790 - DNA, 5269 bp, Emericella nidulans
  unsure (1)..(5269): unsure at all n locations
ctttctcgtccaccacatttgctttagtgacaccacctggtgcaggtgcatcggataacgagccttcttccgggatgcggtctgattctgagattgcgggcgccaattgtgcagagccgaagatgtacgggatgaatgagtggtcgtctagaccccagacgccgtgcgaaccggcgggttccagggtataacgcttaataatggttcggacaagttccagatatctgtggaagactgctttcagtttcgatagcccaacaagaatgtttgaaagatacccacggctgtatcacacccaagacgatcgccctctcctccacacctgggctattctcgggaaaaccatgcagtttccaaatacccgccaggaaggcgagaaagctcagttcatgccccgttccatagtccagcctttgtggactcccccaactccctaaaaagtatgccagcagctcaacctgcccgtcggcgcaccaggatcagatgaaggcatctgtagaatttcctttgacagacactcctccaagagacttgcagcacgactctcaaccatctcgtaccatcttcggaaactaatattgccgaacctgcgcggaccagtgtcggggggcgcttcgtcgaggatcgcttcgagtttggagagcagttgctggactgacgcacaggcgcagagtattcaacgcgttcgctgttcagctcccaagttaggacccgcccatcgggtagttttgtcggaaatagagagcggttgagctggaggaggaaggtcatgagatcgacgtaagcttttgacgatagaaattcagctacatcttgactttcgttgatccgcttgctgggtttagtgaagttgtgccctgctgagatgtcgagcttggggagtatgcggacttgcgaggtgtccatatcatccaatggctcttgaatgtgttcggataatcgatgggatcaaaagaagataaaagctcttgaacaatagcagactgtggaggtgcggggttgttcctgcttggtctccatgacgccatgaggtaccagccagcactaaaaaggcttaggcgcgatttggtgggcttcatgagctttggggagctttggtgattgcttgatgaatcaatcctttaaacacctatcaaccaatcgcaactttcgctttgcaggtggtgctccaaatgcagcaagcgcaaatcaatgctctttaacagagcgtcaacctgctcgttatgctactgaatgccagctaagacgaggctcttccgtgaagatgaccttgacgcgctccgcagcgtcacgaaaacggaactccacaactaatgctctggatattctaaatcgcttgaataaaagagccaaagctatagacgatcgcgaaatcggaagtgcccggccagttcgtcaattacgcaatgtccctagaaccccgcgaagggatatcttcgacataccgggatccgaatctcctgaacactcacgacgcgcgactattcaatcattaccgatcgctgctactcggccaataaactaccgggagaacactgttctggaggatatctggacgggctatgcgtcatcgagtttctctgaacacccgcaaagcccagataacgggtcatcgcgttcgaccgctgagccagcctcgcagcgtcgatctacgcgtttaagaagtgtacgaaagcaacctgagatatcgagcagtccgcatcgggcgtcaacggacgttaaacgcagagaagctgaccacgaagatgaagaggtcatagaggaatattcttggcggttatcccacgaagcaacggataacgaatctgcgagcgagaccggagaccaaaatagccttgcgggcgaggaaaacgagctttacccagtcgatctctttccggatgatgacaggtccctgtcaccttccgcgcaacagcttgatcagactctcgaacagagccggcagtttgggtcggctcaatctactcctattaaagggagcacgccccggcgagcttcgaatcctgacactcgaagtcaaagagtcgtgcagggttcccccaaatcttatagacctaccctgcgagctgcagtaccgagcccgtcggccgtcgcccacaacagcccagataggatccatagaacgcggcgtgcaacacggagtcggccaagtgcattccaaacacaagatgacgacggcgatggcgtgactgatggaaatactgccaaatcaatagccccagacggcgatgtgggcatgtacgaggatgaacacagcgcaaaagataggggcgacgatgataccgggtccgatcatgaaactgcggaattgtcaaatctaaatgtcggttcggactccagtgtctctggtcaggactcttcgacacacccttctttgccggctacacaatctggcgaaccctcccatccctccacgagtcatgagcgtcggttgggtgcgtcagttacgccgccgccgtcagtgtctcgagagtcttcggaagcttcagaagctttggggcccgcgaagacacagccatccccacgggatgcaaccagtagaagacggcagtcaggtcgactaaatacagtgtccgctgccaatgccgtattagtggctcaggaatccccggcatcaaggcctcgcttcccagatgcaccgaatagacgaggatctactgacgatgcttggatggttagaccaagccagccatctccggaacgcctcacgagcgaatcttcctctgaagagtccgccagagctttagcaagtcgaccgatacgaggaaggcgcagtcgcatagtcttcaattacgaagctcaccaaacgcccgaactggaaagcagctaccctcaatgcaaagaagctatggaactaggacagcaacagcgtaactggaaagccttaatcctcgaagcccacaagatgggaaaacgtctaaacccggcatctacggggcgttttaaggatgtgatagatttgattgagtacttacaccaatggtacgagagtatacatcagcaccccaggccggcccagagcctctggtcaaaagattcacggaaacacgagatactaggctgtatcttggacgagggcaatctaatactggatcacgtctatgatacaatcatcaagcgtggaaaccgagaacgaggccataggctgttcgaaaaattcgaagcctgcgtcatcccgaaaataatcgagctgatttttactatatttgacgcgtatcattcacgccccaagcgctcgcccagtatctatcaccacctgcaccgtgcgataaccctgctgcgggatctttgcgagcggatgacaattctgaccaaggagggatatgtgcaaaccagcacgcggaccgaaaatctgctgcgccccctgcagaagctcatcaaagcttccgaatcaggcttgcttcagaatgatgaaactgattcgctcggccaagatgtcgatgtaatcgagtcgactgatgaggacacgccaacagttctgtctgggaggccatggacagacactgaaggtattgctcttatggatggcttaatcaaacatcagggtatgttgcagactgtaaaagtggtttgacgaactaaactaactgccatattaggtccagggagatacgccctgatcaggagggatttcgccgatagactcaaggggagaacgataagcgagctacgggacaaggcacgacaggtgtataccctgtataaaccgcagattcaagaggaattgcgcacaagggaggggcgggagaagtggcagtggctggtcagtgtactagagtagaaggcttacagtaagtccatatacatctgtggattatgacgaagacagcgaccaaggggtgggagtacatatttaggagcacaaacgcaccgaaccatggatccaaataaggaaccacacaatctcgtcgcaattacccctggcagtgttatttactcctcctcctcctcctcctactaccacgcctggagcactcttagcacttctgtatctcaataatttacatatttgtattttcaggttcatgttgcgattcccattataaccgcccgtacctgacctccagccagtgtaggttattgcccaaagtggactagcgcacaggtgacttgttccttcccctctttccaccttcctttcgctccttactcttttgcgttgtcggtctctgtctccagctgcgagtctgcgttgttcctgctgttcaagttgaccatacatctcccattcttcttcttcttcttcttcttttgcctaataatattcccttagtacttgctaatttccctgttgcctaatcatttaactccgtttgttgtgcttcgcagctccagtacgtgtttgggcggctgtttagtttccgtccccaacttatgacctgaaactcaccactaacgactcattcttcgtcctgtgcagtatacaattcaatagccccgtgcatctacctgattgagcgcctcagaattgcaattggacgtttgcaacgtggtacgggtgagttgtcaactccaagcttccctgcagttgcttctctacccgacccggaaaggagtcgtgtctggcgcttcctaaggcactaggggtaatccctgctttagccttcagtcatgatattaccacccgggcaaagcctctcctcgaagtttgcttctctactccttttcctctttttcgcatgcttttcgcatgccggatggctgtcttcgcggcggtgtgcctccgcccatatttttgtttttttggagctaaccaggattgttgttaagctctaggaacctttttttccgcaagaccgacaagctccctgatctcctcaataccgcataaccattctattcatctaccctagatagctataggcgaaatgtcgtccgtagatgatgctgttgcctccgttcctccggccgaggtcgatgcggaggatgtgcccccggctacccccgtggaatcaagtgctatatctggcagcgaggagccagccacaagccctgatacttccaaggataaggaaaatgtgagggcgtctccggtgaagaagacgacaacaaccacaacgaagcgccccgtatcgtccggaacatctgccacgaaacggcctagcttaaattttggcctaagacgacttattcaacactcgcactccaggncaactggaagcacgttgggaaacccccgacgcgaccgctactttggcactgttcgaaggccgtagcacgttactacttctccaaccgttcgccgaactaatttgccatagaatcggct

SEQ ID NO: 3791 - DNA, 6053 bp, Emericella nidulans
tttatctaagggctggtatttttcccataaaggaaaacgcggcggttgaattgggttgttccatgtctttaaacggcttaaaattggccgaaataatggctgatgggtctggaattattggatttcggggtagattggttcctggtaaaggatggaagaccgaagtcggggagtaaacctgtctatgttttctagacttgagtgcaggtaatgaagggcaaagggctaatgtgatccggaatgctgtacgttcaccagtcaattgcccttaagaggatagtcctatctcatgacatatcctgatagggtcgtatcttcatgataagggggaccaccgggttggagacatcctgacaattagtgatccttggctttctattatcttccaacacctattatgaggcagtttggctgatttatacgcctgaatatcattcacgcattctaaggctccataatcagttccaaccatactgagcgtctatgtcatgccaaacataagaaaagccaaacaaagccaaccgtcattcgaatcgattaggatattatgctgtcctcaaaacttccacaacaaaaggtatactgtaaaacgacatatactccagagcttcaaaagccaaggaggggaatattaaaaattctatcatacgacaaaagacgccagcgctcatgcgttctcggactgaagggtttgctgcgtggattttagtacaagctacgtcgaagaaagagatgaacttaccaccagccaatccatgccctcgttcagacctttaccgtcaatggctgagcaagccacaatgctccagttcctatcccgcagctcaccaagctttagtgcttccgaaatttctcctgcgcccttcgcaccaggttgatcttgtttgttggcaaatactaggagagctgcctcgcggagttcctcttcattcaacatggcggcgagctcgtctgcggccgtaccaagtctttcgacgtctgtagaatcgatcacaaaaacaaccgcagcggtattggcatagtaacatcgccagtatggacggatagatgtctgacctccaagatcctgaacaaataatatgagcggagctcattaacccgaacagtggcttgaagtacgtacccagacgttgaagttgagatttcggtacgtcaccgattccacgttgaatccgatggtcggtatcgtagtcacgacttcgccgatctatgtattcgagtgttagcggcgaagttgaagtcatgtatactatacacagagactgcggaaacatacctttaatctgtagagaagagtggtctttccagcattgtcctgcgaagaagaggtctcagctccttgaccccagaaatggcgattgcaacagaaatcattgacgcacaagtccaagaatgagaatccgaatttccttcttagaccaaaatagggaccaaagccgcgatagtgatcctcccatggctgtgtttgttttgtagtagatgcggcgatactctgtagagctttcaacggagaccgatcgttagaaagggttcgcgtctcggcgggaaatagtcaagcggatcagtacagcgtgttagatggagatatccgcgtaagctagtcgaccttaagagggagagcggatttttatctcagcggaggatgatcgatgaaagtgatccaaaccccagaacttcgaggaagctgactaaatcgcaggggcggctgatcagatggtcaaagctttctactcaatatcccagaccctgaggtttcgaagtcgggatttggatagctattgggaatgtaaagtctgtattttctgatgaagatagtgtctttttctgtaatgttatggcttttttggtgtcaaacaactatgctgtttgaaaatacttgtatagtgcatctttatactgccttcacgctagactgtttagagcgattcgcctctgccggaaagtatggagaacggtcggtgccgtagtttgtctggatgaccgcaagcgcgctctttctctatctgcacctctttcaatactcaactctttgtcaccccaccatctgttctctggattcgctctgtatcccccatttcacaggaattgatttggtgtttccattaagcgtgacggacctcttgacctgtcctgatcccaacaaggtgattcggtctttggcgcaactctgagaagattattctgtgcagaccacgagccacacacaatggtgggcaagaaatccggaaaggcgctcctacgggatgagggtcagtatcccaaataatttctgtctacggcactgagctgcatgccctaaccttactcaggcctcgaaaggacggataacaatatggacctctccagctggcctgtgattcccgccataaatcagaaaaactactacacgtacgtcatataattcctttattctttacagcccttctggatcctgactgactggttatttcgtctatagcgactacctcaagcgcgacgatcagtacctagcgttcagactgcaaaatgaagagaatcggaatcggatggccaaaaaagccaaagatcgtgatcgcgccatggcaatggaaaaggccaatgactcagggatagcggaaccggaggcggagatggacggtgatacaaatatggaagaagccgaagaggctgctacggaagcgataggctcaaaggtcgtcgttattcatgtcggcagccagaatctgcgcattggtttatcgagtgacgcactgccgaaaaccgtccctatggtgatagcgcgaaagtcaactaccaacgaagccgaagaccaagaggagcctcgcccaaagaggttgaagctggatgacggttccgagatggagccggagaagaagttcggcccagaggtatgtcttgatgtttgatctggtgatataaacctttggccttaaccggttgtagttctcttcgcaatatacgaccatgatggccgacctcaaaacgcacatgcgtcaaaacaagcgtcggactctgccgaactccaaggaaatggtgatcaactataaccgacggacagtaccagagacaatttcagaacacaacgatccaatgcgagtcgaatggactgaaattccagacccggcacccgaatacatcgtgggacaaccggctttacggataccggatgagtcaaagccccgctacaagctttactggccgataaaacatgggtggtgtaatgaggaagactatgataacaagagacttctgtttcttgacatctcgattatcctggaggatgcgattaagacccagctgggtctcacaagcaagaaagattggccgcaatactcctgtgtgtttgtgattccagacctcttcgacaagtcatacgtcacccagattcttgagatgctcatgagagagttctcgttcgctcgggtgtgcttcattcaggagagcttggcggctacctttggcgctggatttacctcggcctgtgtcgttgacattggcgcgcaaaagacatcaatatgttgcgtggaggaagggatgtgtgtcgaaaactcacgagtgaacctgaaatatggtggagccgatgtgaccgagctgtttatcaaaatgatgctttacgatcacttcccctatgaagagataaacctctggcgcaggtatgacttcctgctagccgaggagttgaaaaagaacgtatgcactatgaacgaagccagtgtttcagtgcaggtttttgatttccaccttcgagttgccggccaagacactcgtaagtacacgtttaaagcatacgatgaggtgcacctcgctccaatgggcattttccagccgtcgttgttcgacaactcgcggaactgaatggacggagaaagttgattgcgcgctctgtggacatctatgacggccagccgaatgacccaacatccgccgcccagtccgaaatcctaacggcacttgccccggcgtcgtctgccaaccaggtcaacggcgagtctcaaacgagtatccgggatgtgcaagctactccgagccgctcgcaacaactgaatgctctcagccgcgtgcaggaagccgaggccacccctcgctcgtctgttgcaggctctcctgggcccgaaagtaccccgcaggctggaggcgccgcaacccctgcgcccgctggacagggccaaaacacgtctcaaccccgtgctcccacgattgaggagcgagatgatatcctcccggtgtacccattagacaaggcaattctcacctcgatcatgcatgctgctcgttcagacgagcgcaagatgcgagacttcctcggtggaatcatggtcgtcggtgggggaagcctggttagtaacttccacttgtttgtagaggaacgtcttcagcttctacagccgagctttgccaaggagatcatgatcggtacgcctccaagagaccttgatccgcaagtagttgtgtggaagggcgccagcgtgttcgggaaactcagtgggacgaacgatagttggatcagccagctagagtacgaccgtctaggacaccgtctgcttgcatacaaatgcatgtgggcttactgattttaaattgattacttttacgggcgttcctgggcatgtcgggtactgaataatagaaggtgcctattcatgattctatatagcttaatacacttttggttattctcagacctttacaggttattccgatatatgggtttcacaaaatgctcccaagtttaaaataggttatattagcagaaagcaaaacatctttgggggctaacattcctccactgcacctgagcaattgcgcacttagccttaaacaccaggcggtcaagcagtgcaaaatagctcctctcaccccccagtaagtttgcgctgtgtttcgccttattggtaatgggagcaatcaataacttgctcattttcccctacagcacttagatccgccgaattcgctgctcaggacgctgaggagggtgttgtatgagaatctggattcctttaattgacctgtcagcttgaagtacatccttgcgcaaactaagttcggagcatcgtgtacctagcgctgctaacgccgcattgacagtttgcacatcaccttgctccttgacaaatctgtcgctccgagtagcaacattgacgagtacgaaccaacatgtcgaagtcaaaggatagcagctcctctggaggcttccaccaggaatatatcgcctctttgcgctaccgaaatgacctccctcctcccgatatgcccccgaagttcctcgacatcccccacgagggccttgagagattcctcactcccggttttgcttctaatctaggacgacgcgaagagctaaacattgatgttgatgccgaaggtggtatgccaattgacctagtcggtatcccggggttgcacctaggcgacgagagtggtacgtgaacaacgccaggcatttgcgcgaaactctgcggactgacctgttttctgcttcagcaatcatgctaccagagaacccagacccggttgacccggctgacctgccgctactcttgactctcgatcaattgaaaaatccggcgcccaagaacgccaacgtcagttttctgcgtcggacacaatatatctccgccggcattcgcgcccccgatggtccgaaggttaatacgcccatccgtcccaagcgccttgacaaaaagtcccaggatgaccctacatatatcaagaaatatatcatgaaaggatttgatattgcataccctgatagcaaacacgtgggcgaagatacctccagccgtataaaaggtcacgttccaacgaagctcgagatggacgcatgggcccaacccgtccatccagataatccaaagctgaagcccattggattcttcccgcttgttccagatttacaaggatttcccgaccctggaggtttcgtgcagttcaaattcgacaaggcgcctgttcagaactctggcggcaagcgggacgagcgtatggatgttgcagttctgctcccctctgagccagaggacgcgttgcgcaggagtatgctacaaagaaagccttgcacaagtccaatccta

SEQ ID NO: 3792 - DNA, 5427 bp, Emericella nidulans
catacgatttaggcgacactatagaatactaggatctccatctgatccttcctcgccatcccttttatcctctgaagaggaccgcagtagcctaaatcgccgcagttgggcactccaccacaagcataagcgtcaccatggtcgtatcactctcgccgttcctattcgctgtcgtcagtcttcgcctaggcgtaggccaattcacctgagttcaatacatcttccttgttcctgaagaaattctaccatggtatataccaaacgtctacagcaattggagcatcagtatgataaccaggcagttctggacgtcttcctaatttgtctgaatagaaaagcctgcaattgatatgcccacttatctaatgatgttactgatgggatgcggtgctccatggccgagtgtatcttactagttcagcgacggttcaaggacatcttgaagctcgggttgcgcatccgaatataatcatcgttcttttctcgctccttacagatttacgactgatgagacaacaacgctcagttcatgcctcaattttcagcttcgttaccaaaatagaaatgagtatgtcaatgagaaaacccattcgcaatcagacttaaaactgaagaatcctataatttagcttaggtaaggattctgaatcgaatacaatcgatctgcctgtccaagctggttaggtgcaaccgcgcagttaatcagaattactgcgccatcaccaaccaatcgcagtgcagtattttctcaccccgccgtccctgcattaataagaaagctgatgccatctccaggctgtcaacaattgaagcctgattacaatttcttcataattttgtgaatcagactcaaaactcaatcgctaatcataatgaaggcctactggtacgacaacaagcccgtacgttatgtcccgccgagacctaaaaatcggaacagaccgaactaacaaaaatgcatgatgtatatagggcgaccagcgcgaaccccacgactccggccgccccgtctcagaagactaccttgcctctctcggcgtaatctaccgccacttcccagagctttcggatgtcgacgcgctcgccaaggaacgcggctacaagaaccgcgatgagatcaccgtctcccccgcaacaatgggcgaggcttacgaggataaggtgaagatgttcttcgccgagcatctgcacgaggacgaggaaatccggtatatccgtgacggagagggatattttgatgtgcgggggaaagaagacgagtgggtgcgcattcgacttgtcaaggatgatctgattatcctccccgcgggtatttatcaccgatttacgaccgataataaaaatgtaagttttttggccttattgagggtatcatgatgctgacgtttggtgtgcagtacatcaaggcgatgcgactgttccaggaggagcctaagtggacgccattgaaccgtgcaccggagcttgatgagaaccagcaccggaagtcttacctagagggactcactgctacctcaattgctgcgaactaggtgcttcttcatgttcgttcagtatctaagccgcctggtatcgaagtttcatggttgtttaatggtgtttcagttggtcaacaatacataaacgacatagtaacgaaactggcctatgttctattacatctttttattatattctatcccacggcatatggtacaagtagaactcatctcactgagcgcctggcgcttcaggcatagaaccaggcatatggaaatcatcccccagactccgctcgcgcgtcaaactaggactacgaggagccccagtctcaacttggtaactgcttgtccgggaaacggcatcaaacggtaatggcggccgtggacctaatccacgaaatcgcagctcttcctcatggttaccgccatcgccctgaaggtggccgggactgctcatatctacggacatagctggtcgtgaggccgtattagagccggtttcagactcgtcacctgttcgcacaccagttctgcccatacgtggccataggtccggtagccccacgacttgtactcggggctcgacaaccctctcttcaaaccacgcatgaacccgtgcttctaccagctgcgcaaccttgggcacatcttggagtctacttcgggagccaatcagcgatcgcactgacaggtcgagtcggtagtctggtaagaatgaaaacgcgatgttgcttttcgatgaagatttcggtgggatatcaccgccgtcagtgggttgtgccccggcggctggctgcgctcctgctgtcggtggcgacggcataggtgacggagtatgaagaggcggggtggatgcggggacaagcgagatgcagagtgtccccgaaaatcttacgacggatattgacaacgcaacaggtagaatcgcggagcatggcttagggtagttgaggactagtgaggtttcgacagcgatggagaggttgtcgtcgctcatgtcaacgtccagcaaggcttgaagcctgccaccgtcggacatagggtcatcaacggcaatgatacggcaattgctaaaaatcggaaactcttcaccgagcgatatgtctgtgaccgtgattttatcgatgaaggacggtttcttctcgggattattcaaagctgccgtcaacgaatggaggatcgacgatgtgggggagtctttcaaaagataggctgtctgcctatactgtgctattgtctgtgcgatcaggacattgaaccaatccaacgactctggttgatgtgaggagtgatgaattcggtgtttcgacgacgggttcggagggattgcgctatagtaggttttccgcaaaatcgaccttgtgttagtcgcggacgacgggacgggacgaaggacattcgaagtagagggcttttctctcaatgatctgggaggaggcgcatcttgtgaaaagatcgaattggagcgtcgatgcgtggaagctcgaagaccgcgagacggtggtggtggtgcttcgccaaaaataaagaacttgatgaaggcaccaatcagcagcacaactgatagctgacccagcaggaacccttgcgtaaaagatagactgcgatacacaattagcagactattgagacgtcgagaagaggtgcacgaacgaggactgggtcgatacaggcgcggcttcacctagagacggtttcgtcatggtcagtgaatgtagagcagagttcgacgggaggaccgggggtaccttgctgaaaagccattgtcagccgctgtatgaagtcaccgtctgcccatatctcttatgtgcgcagtaggcgaacagatcagacaagggaagagggtgtgaagacttccgagtgtgggagcagccgagttcgaacaatgaatgacgccaaggtcggagcggacggggttctcgcggcaagctagacgacgatccaaagaacagcctccaagtgtcttaaagctcgatctggatctttccaaacactatttcatatggccacttcagctgattgtagtctaagcctagactgcagctttgattcaaccgtctcacgatctatattcttacctcctcctagaccctttccatctaacctccaaacacacactatataaatcgcagctatgcgatcaacaattctgcagctcttactgttccttatcagccttccctcctcatctctctccgcaagctactcaaagaaagaacctccaggcaaagatgccatcctcctctcccgagtccactccctcacgctgcgtggtggcggcagactcactagagctcggcgcgtgtcgcccatcccccaactgaaatgcgtcggtccgtccaagcgcatatgcaatatgtacgagatagattcaatgagatgcatcaacgacggctacggttacgacgaggaggacgtccagtggacctgcacggcatcactccccggtgagttcaagcttggttctacagacgtcgtgtgcgaaggttaccgaaacgccgatgatccctatgtcctgaagggaagttgtggcgtagaataccggctgctcctgaccgagctgggcgagcagaaatttggacaaggatcgtttgatgaggataactggtggcgaagcctgaagcatgggtgggaaaacaaggattcagagtcgaccctgacgctgtttggcaaccttgtcttctggggtattttcctcgtcgtctttctgtacattgtagttgggctggtaaggcagtgtcttgggtggcggcgaggccagccgcaacctggtcgtcgttggggttggggtggtgacggcggcgatgatggagggccgtatcctggtggacctccccccccttacagcagcaacccgttctacagttttggtacgtctggatcaggctggaggccagggttctggacgggggctatggccggtactggacttgggtatgagctgggaaggagaagtacgagcaatcgatacagctcgccgtatccgcggggccgcagatatggttccagcgaagggagctcgtcatcgtcccctgcccgtttctcaacgccgtccacaagcacaggattcggttcgacaaggcgcagatgatcgcctacttcgctaacatggttctcattttgtacgtctgaatcatatgtgcaatgtgcaaatgactaggtttgctcgctgagttgctcgctgagaatgataacgatttgaaccaattcgccatcatttgaaattttttgtgagttgaaattccgttgactcaagaaccaggcagcatgaagctcatggttgcttcactgtcaacattaaaagaacgccgtgaaacgcctaaccctaaccgtatatgccgccctagaactccaattgattacccataaagaatcaatcatctatagaacccaaaatttcttcagtcccgcccccgaaatctctcgcgctctgttttttattgttgcgcttgcccttgatggcaactttatcgacacccaaagcgttattgcctgccacgccatccgggttgcgaagcaaatcttcctgagctttcttatccttctcatactgctcctcgatacgcttcttctcctcatctagctcttgctgaattaatcgagggtcgtcgtatactgtattggtcatctcagaatacgtgttaatgtcaatggactcccggggcccaagaagcgtctccctgattctttgaggatcacgtcgctcttcgttgttgaatttcagtttaatctgacgcctcgagcgtccaggaaacattttgctgatcaccatgaaatcagttccgaacatccgcaggccgcgatagaatagctctgtcatgtcctcatcccaagactcggttttggaacgcttcccgtatgtagcctgattgcccttccgggtgagtgaattttcaaaaaagacctccagatcgtccccgtttctctcagcatctgcatcacggtc

SEQ ID NO: 3793 - DNA, 5864 bp, Emericella nidulans
acacgaaatctgtcgtctactctgattcccctgaatcagcaccttgttggtgataatagacccctttatctttgtgtaagtccctgaactagggtttattgtctgctgttaatgccagtatggtatatatattaaggaggctgaggcctatctctacaagaaatatcacctctcaagctcaatgattcagcctattatccagactatccaataatggcatgatatctatcttgatactactactatctatatcccctgtgagcttgatcacctagttcctatgatccctatatatactaatagtatgcagtgctagcaagatctattatatctatatattagcagctgtcttaagactatgcaaaagtactggtaccaggcccatggctggatatagcacctataccaaggctatattactgctgatatcaaagtacagggtttataagaggtttagcagttatattatattgttgcctggcagcaggtattccccacgcgcaagaacttgcaccttgtgcacatccaatcatgtgaccccgagcccaacaagccctgacccccatcaactgattacaagcagatcactgctaagatcaaagcatgtgtgactgacaacaagcagcaggcggcctgccagacggccaagagcaatatactgtataatatgaacccgtggctgcgcatgacctgatgggcataataccttgccaatatgtacttccaagaccttctcaatattgtcatgcccctgactgcaatgagaacaatgccaccctgcatgaataaggagatcctgtcagccaggcaatgcagcatgtataggatgctatgaggcagctggctcagcatagtcagtgcatagtacagcactgtgggaatagtatttgtataatagctgcgagcacagtgcctaactagatcccacactgtctactgcacgcatatatggataagacaagtattgcaaagtatatatagctatggcagcagatcctgctgttccttatttacatgcagactaagtagccataataataaaaaaagctaagctatgttatgactgtataatagcagtagacctggcagcaactatagcagcttgcctgtagatctgataaggtaggtaggttgccagcatcatgccagagccctgatctgatcttggataccaaccaacttgaggcatttatgatgaccctgttggagacagcctgccttgatttctgcattgagctgcttaaccagaagactaagatatataagtataagagcctgttagtatatataatggctgtccttagttacagcaagcagggctggcacaatgctgatagctatctactaatcctcttatatatgctgaaggtggcatgctttcttgttatgcagaaggcattgtggcttgacccctagtactgggatattatccagatataggcagcagctgctaagcagggcttgtgggtgggcaaggcagcagaccaggagctggcatggctgttcaatgacaaagggtatgccgaggccttgtccctgtcaagtctgtcaagcctagagaccatatctgcatcccaaggccgcatgattggctgtattcgatcgtggttgtttcaggccggtgttgactggatggtacagtgatttatggtctatggccagtacagccctgtcaaagtactgctcaactggcatatatataggctgaaggtacactacaacaccatagcaccaggatatgtgatatggatgggccaggagcagctgctgtacaagcagatggactttactatgggccagtttcgcggttttgtgcatggcatggttgtggctgcgcgagagctgatggcaggcctgctgtgccagcctgattgctagtaatagccagccatcctatgggattacctgtttaataatccaactaaaggcactgcaggctggagcttcctgcaggatgcttgtacactatggcctgtagcagggaagacatggctggttgactggatcagtactgaactggctgttgcttgagccttcattacccagggcgctgtcagtataaacaaggtgcagaagtactttcagcaggtcacatgattcaaagagaagctggcggtggctgtgtaccttactggtagggtgccagtatatgtgcctgagctgctgagcatccagtatatcaatactaacaataactggcatcacaacatcttcattgaggacggccttgtcgtgtttgtgacggcatactacaaggggttttatgcgagcaatgacgtcaagatcatctaccagtacctgcctcgcgaagtgggcgagcttgttgtgtggtacttgtggctggtgctgctatttgtgtgccagcttgcagtaatatggcgccaggtaatatttagcagtaccagccagggtagtaataccagcaagctgacaatgtaccacagcctgtatctgtgggggccagatattggcatgggttgtgaatggtccagcaagtgcctgcgcaaggtgctgaagtaggagagtgagactagtatcagtacccagtatctgctgaacattgctaattattataatattactattggcatcagctgtcaattcctgtgcatattaagtatgttcctaaataatatccaggccaagtacaagcaggtgatggccgccctggaggcagacaaggaccttaataagataagtaatattgtggataagcaggcagggcacttgccctatatagcagtgatggtatatgggtgcaaaagcagtgagcttgctggcagtataataatatactggctgtggttttaagtattgagcactgactggcattgttttctggggtttccagacctgctactagtcaacatagtactaggcaagcacaccaacctgtaggaggagcaggctattaactatcaggaataatagcaatagtagctggcctagatagacatagtacaggtattatagtgcatgataggacagcctatactgcagttgtatagggtgcaggtactagtactgaaggtaatctaggacagtgccagccctgtagttgcaatcatgcctacaggtagtagcaagaatatactatttatattgcctgtatatacagccccagggggatgcataattatggtagtacccctactattgctgtatatagacctgataatacactatcaggccctgggcatcttatatatgttgtaggagagctaccagccccccaacaagacagtaattatacttataatacctgagtcaaccaagaacccagatttctatatattcctaaactgccaacagcagatgcaacagcttgactgcattattattaacaagtataatattatcctcaataattagaaggatttctggctggtaatagtacgccttgggcgtcttgtcagtgcccagatgcagctggtatttttgacagtgacactgcccctgacagaggaagtataattcctgcaatatattaagcatcaacacagcaaggttggcatctatcatatacagacaagttggcacaatatcgcatattatgtggtttggctgttgctgccctgaggtgtccctcgcgagctataccagtagttaacacagcctaatatatagggatttatccagcagtacatccagcaggccagtaatagccaggtaattatatatactaatatcaagagctaggttgatgctatcagctataagctgggctgtgaggtatactatagtactattctggactagacaggcataatataatagttccagagcagccagacctgtattattgccgcaacaagtaccttatacataggcattgatatccctgatatctagtacatgatctatctaggttagctataaatactgcttaactacagctaggagagtaggtgtgcagggcatgatagcttagcaagcaaggctgtcattatgtacccccagggctgggataaccttgatctataggttgactaggtattagatgccaagttcaagcgcgtgcaggcgtacatggaggttgtggagggggtagggtgtcattagtatgtccttgaccagtatctggataggatagtcaatagatacacgcgccagcagtgccaggatcaggatcctaataagctaccatacaatgcctgctagctggataggcagggtaagcaaaccccaatactattactattactgttgccagcagtatcagcagcagaatacaatatcaatataagtaaccagcctaacaatccccctaatatacaaaataggcctattctgcttaattattaatctcaatctatgtccaaaaccttagctatattaatcctgtcctaagtactgtgatctatagcagtagtatccttatttaaagcactggcacctcctgcagctgttttaatagtcctagtagatagtataatactagtataataccagtatactgctatctagtagtagatagctactatatagtagggcttagatcacaagttccttgagcaagaggcctggcaatggctgtactaatactatatctgtatagtagccaggcatgatggcaactataagctgtacaactactgttaccctgatagctagactgctaaatagtagatggtacagctataatcccagattaactatgcactattctgctattatttctggtataggatgccatagttagtctgccagggctggcaggccaggcaggagtatctatagtatagggtgctgatcttgactattgcagggatgctgtacaggccttacagggctcaggtatagtctgcctagcagtactatttagccagatagatagttgagcagtagatagtatatatatagaaggcgcggtgccaggtcaacacctatatagtagatgtgcaggaggtcaccttggtggcggccttccttgggcaggcaatagctgatagatagggtatagagatacaggctatattctgctggttacagcaggtttgtcaggagtacaaagcagcataatctaacagcaatatatcaagaatcaggtatatagagagtcatagcagatttgatactttattatgtatgtaggcggatagcagaatagaattataggtaagagaaacatagaccaagcttgcaagtacaggctgccagctaaactataaaagctgattaatactatatacagtgccggcaatgtattggctatatatccaggtcatgcaaacctggtcagacaaactcaagccagcttggtcttgtacaagccagttatcagtataaacagtatcatgactaatagatagtaccaggcttgatacaggcattgcactgcatgacctatattatactactagacagtcagctcaggctgtgctgtacctcaaagcttggctatacctgtagtattaatattagtatcataccagcagtataatagtatcaagccagtacttaggagatatatatattataagtaggcaaagattatagttaactatattattattgcataactatacaggagtattattaattattataaataactacccagggtgctataaagaaataaaatctatgctgtattcacctaagtacagtatcatgaccttactcattattattattactgtctctattattgtcattgttattattatcattgtcatcctcctctatattatggttgtcattgttgtcctcctccaggaagtcaagattattgtcagcaccagcagccaggtattgttgaacttgtccaggcccaccagtatctcagatgctaggactagagcaaagttcttgagcaagcagatcttattctgcagctaaaaggtgtgatacagcactgatag

SEQ ID NO: 3794 - DNA, 4505 bp, Emericella nidulans
ctttactggccatggttacccgtcatggcaaactctaggtaaaacggggtggttgattatgtggtctatagcctagaagcatggctccgtcttcgctgcagtatacgacctatcgacgaatgataactgtctgttttaagccaaaccaatcccatgcggcccagtatagtgctcccgatcacacaagcatccagccttgcatgaaacaaacccgaactccaaagcgccaagcaccaaacacttgaaagaaaactcaaggatctcacaataaccgcaacagttccaagtccttcgccacagcaggactatacaacgcgcaatcctccagaaaccgcaacatctcctggttccaccgctcccagccagcgggtaatgtacctcgaacgcgaggatcaggggactgcgcaatacagtagaaaaggagtatttggccgaagaactgcgagcagaaggcgaattttataggtatgcagctcttcatgtcgcggaagatgccatgaataatcggccaatccatggcgttttgtagtcctcggcggatctgttcgaggtcgtcttctgttaagagagacgggatgcggagcgccttgtataaatatggacggccgatgtggaacttggcaatcatgtagcggccccggagcatggcttcagcgacggctacagcgggggtgagggggcgggtggtcgtggtcgtgttggtagttgaggagaggggatgcggagagatcggatttgggttcggcgaggcggtagttgtttgtggtgaggtggtatttaatgctggtgttgctgcggttgccgcggttgctgttgggggtatatcggagaactgcagaccagatgggaggtttaggcgccattgctcgagttggtggtggagttcggcgttgacggcgggtttagggaatgttccggagtcggagtagaagtagagggagtgtcggatgcgagtaaggatgatgcggtgggcaacctgtgctaggaagtgatactggaagaatgaatcgtcgatctcgtcggctggggagaaacgcgcagggacaaagcctagggtttcaaaaccgatgaatttgggtattggtacaacttcttcgaagcgggagagaccgctaggagggaggtggagttcctgtacaaggatcgtttcgttcatgaggcagttccagaagacgcgcgatttcatatcaccttcccactcgtcgaagttaacgtcgtggctgggctgttagcgtaagaagaagacatcagcagagtactcactttgttaagatcgagagacagccggtagcagcgcggtggatcatagcccatgaatccatagggcggagaatttgctgataatagactctggacgcggttagccctggccgagaaacaatgctaagcacgtacgatgataataggtagaattgacaactctggatatcgttgtcacacatcaaaaacccgatgcgccgccgcgcctcgttgaaaaaacgcagcccgggcggttcttcttgcacgacccccaaccactccggaggctcgaaatgattccctctcgatccaggcagtggataatcaccctcgtggtgggcatgaactgccaaacagcccaaggccatgataatgagaaccaagcagctctccatggtataaccaaacccactttcaatggctgcgccaagcgtgaaggcaaaatagaagttcttgtccatgatcggcgtgaatgggttgatggtcgcgaaaaatgcagtcgacaatcccttgatcattgccagcggtagcgtctccagccagtcatcgccggcttgtgaaggaaatgggtaaatgtacatcggcagaggcggcctgttcatctcagtgtcgatcacatagttctttccgagcttctcatgcgcctcgagaaatcgctgcggaaggatcttccgcgcgccgggccataaaacaaccccgtgctggctaaacgagatagaaaccaatccatttgcaagaaccgcatttggacgctcgtcaaattcaaacacttccggctcacccgctgggatgagagttcgcggtgtccctgcagagacttgtctgtcatgccgaggagccgcagtcgcctggccaggggtgttcatgtccgtctggccatcaggaggccgagacatctgtgtctgtagagcctgaatctcattgcgcacattgacagggacattctccagcttggtttccagtcgatggagagtgctcataatgagcgtgagcgaatggtcacgcctgtaggagtcagcagcaggcatttgaacaagtcaaaggcgcatacttggaggtcttgcgctcattgtagacacattcctgacccaaagacttgcacaagccacatttgggccgcgactcgtcgcatctcgtctttttgagtctacaagtttcacaggcctgcactaggtcagagaggtataatatatggaaaacggagacttactactgtagcgataaaattacgaggtttcttggaccccgtagactgctgttctggcgttggggagagaaggtcgttgataggtagcaggctgttatgggtgagctgctctgatggcggagagccactgtgagctggagactcgtcgagagggcgcttgctcattgtgcatattgagtgtcgaccgttgtgttataattaataattgctcattattcttgttctgaaaacgaatcaatacccaactaagatgtatggtggagagattgaggacgtccagttcccgaaggtgataaattgcagtcaccttttttcagccacgggcgggtccgcgcgcccattccgatcccggccatcaacagccttttcagcctcgacattatcatttattttcatcgacctatacgctatggtaatcaatagtcgtcgatagaataacatatggatagtatacccatggttcaccgatttagtccgtctccttatgccacgcgactcgttctaaaggatcggcccttaagcttcatgaagatagataagataagatagttaactctagagatgaccatcttaagcattgatataggcattgttaaaatcaggggcagaggatagccaattgaacatgagagggactatttgatggaggtaaaataataaatacgtttactctaaatggggtattatatacaaatctaatcgactacccataacatcgtcggctgcacgagaggcacagaaaaaaaaatctttacagcttggccttctcactgaacctcggagcctgaagagggtcgtaagcacccaggctcagcgtatcggctggcacagacgcactgtgaccaccaaccagaccgcgcacgtcaaccatactagggttgaggtctgcgatcttctgggcaccgatcaagcgcatgttcatctcgagttcgtctttcaggagctgcatggctcggttgacaccaggctggccgtatgcagacatggcaaacaggaaaggacggccgataccaacgcccttggcgcctaggcagagagctttgagaatatcagttgcacggcggataccgccgtcaatgaagatctcgatgcggttctcccagccgcgctcgcgcaagatcggcatgacctgggcgaggacttcaatgcccgatggggcagtgtcgagttggcgaccaccgtggttggagagaacgacaccctggactccggcctcgacggcgcggaggacatcttcaacacactggacgcctttgaggacaatgggcatcttggtgacagactggaaccaaggaatgtccttccacgatagcgagggatcgatgaatgatgagatggcgcgggcggcaccctgggagcggtcgacttcatcgcctccggttgcctgaacattggagccaacatccgagaacttggatcgcatgtccttttcacggcggccaagttgaggggcgtcaacggtgatgaagagtcccttgcagccgcgggcctcggcgtgctcgatgatccgcttggtgatggcgcggtctttgttcacgtacagctgcagccattgcacctgatcgcctcggcgcgcgtcgacaatctcgtcgaaagagcacgaggcaagggtggggatcatctgaatgacatcatggtcgtgtgccgcgcgagtcagaacaacttcgccctcaggattacctagctttccaagagcagttgccgtgacatagaacgggatcgagcacttggtgcccagcatcttggtcgagaagtccacgttctcgacatcaactagaactcggggccggaaccagatcttctggaaggcttggtggttctcgcgcatagtctgtcggagagattagtttcctaccagaaccaaagaaaacaaacgcggccgtacgtacaatttcatcatccgcaccgctagaataataagcccaagcagtcttcttcatcacgctccgcgcaacagtctcgaaatctagcagattgtagcatgccgagagagggggcatgcgctcgatgcgctcttggcgagcatcttcttcggggtcatgagccttctcctcctgct

SEQ ID NO: 3795 - DNA, 2466 bp, Emericella nidulans
cacacattttaaaacctctaagagagctaatttttgaataaaatagactgttcaacaaagggccttcttgaaaccggaaaactggggttaaaaagtgcggccctttacctcaaaatggcccaatccttccacctttctgtgaccatttttaaccgccggtatggacgtcccctaggccgagcagacgccgtttaccgcagtctccgcgcagacctcgaaagcttgctagggtatgtaccaatgcccctctacgtgatgggatcgggcatcttggaggaggaaaatgagaaatgaacgtttagctaatggctcatagcaataccaaacctacctcgacgcctcgacccctttcacagcctatcgctggataggcactgccgtgctccttttcatcttcttcttgcgcatcatcctcgcccagggctggtacattggtacgtccgttttctacaactaaattcaagtacaaaccaaaataggtatcacagtaactaacgggaccacagtcgcatacaccgtcgggatctacctcctaaacctcttcctccttttcctacagcccaaatttgacccctctctcacacaagacgagggcctcgaagatggcgacgcgggtgcccccagcctcccgacaaagcaggacgacgagtttcgcccttttatccgccgtctccccgagttcaaattctggcactcggctacccgcgccctggccatcgggttcctctgcacctggttctatggctttgatatccccgtcttttggcctgtacttgtggtgtactggattctgttgttcgttttgacgagtaagtccagtctctattttccaaaccgaaccctggctttcgtgtgtggacaatttggaaagataaatagtatgatcgctaacgcggcttgtcctgtccagtgcgccgacaaattcaacacatgatcaagtaccgatacgtgcctttctcctttggaaaggccagatatggccgctcatgaaagctgactaaacgatttaccacttttctccctctttatctcatgagatgacggcacggagtatttgccatcccccgttggggatgtgcttggacattttgttaattctctcttttctcgcttctctcccatgagttgtttgcaagcatcgatgcgcttcgttggattcctcggaagttcagcatggcctatctatttggtttgcgatagaggaaaggatgaggattgtagcttctaatgcatacttttacttttcttctcttcggctcttacgttttcctcctgacgatgaatttgtttcgctgtacagagagtgtcgtgcgcacgctgctcgcttttcactcaccctaacacctaatgttgatgtcgcctctgcttatgccctatgcgagagccttgtatctttacgtgcatgattggcaggactgaatagacaaaattgctgaaatacgccctctatgtgcagacagcgtgtcttttctcgtatgcatagaaaacgtcttattatatctatgtttcatctgtatttctagaagacatgtcacatataacggcggcatcatgcagcctgtctttcataataccctgtgtacgacaggcgaactatcagagatggggctaagtagggaacatttaatcagacttagcgaaacaaggtggaaataattcctgtaggtactgtagggtaggtcgtataacatcaaggtatataacggattcggattcgcctgcgaaactcaaatgtactgatgatagaggacttggactagatctcaagatactcgacgctattcgaccgcctatcttgcgttgggcgttggagttccctggtctttgtgcagatccaggttgaggcgtacatgttcacactttgcaggtcgttattagatcatgatctcttcactgatgcggcgggaagaaagtaaaacataccggtcaatgcaagtacccgagaagcgagcgccaacacgcctcgccgagaagccgttctcttcgaagttcttgatgtaccagggctcgatactagcggacggatggaggatgcggccatccatcttgagggcttggttaaatttctgggcttgcgcggtggcttcggtgccctctgggtcgaaccagtccattgagtccataatctgcaagattacagttagtacagaaagagagcgggcaaaagcagcggcaaggggacgttagaggagcgtaccacggcgatagtgagacttcgaggcgtgatacgcccaataacttcgttgatctcgtccgtatggatgcgcaggccgtcgaaggcgcccggcgatgatagtttgacgtgggcttggggtgagaggtaggcgggagcgcatctgtccgattgtttagtctcggtctgtataatcagacaaggagtaatcaccttttggagaattgacctttcaggcaaaggtagtagaagtagttgtcgttgctgatccctatagtgagtcgtattatcgg

SEQ ID NO: 3796 - DNA, 1443 bp, Emericella nidulans
gatccgtttgtatccagtgcatggcgtgcgaggggtcctgcatcttctcggcctcctgaccaaggcggacagcttcggaggagaagtcggcattctaagcaaaagcagttagccaaccgctcacggccgtcccaattgaagcaaaagaccctaccacaatcccatttgctttccatccccgcgcaacaaacgcatcccgagctctacttccaagtttcgatatcccagggccgaggtggaggacttttggcgtgttgggctgcgctgcggtcggtgcgggctcgctttcgaggaaagagagaagagcgtccaggaggacttcgcccgggttcagccattcgccaacatcctggccagtcgcaaatttcgtgtcccagaaggacgggtcatcgtaatccggtgcgccagttcgtcgaggccgggcagcgtcagctcgcattctcttgtgatcctggaaaggtgccgaaaagaccggggacgactttcgggacgcgacctcggccgatttcacgtgacgtcttgtgttctggagggattactgacccacgccagccctaactcttcagtcttgtgatcgaccactaccttagtcaatggctacacggtgtgcaccgaacccgtagctgcgagtcatttctttgcaaacgtagacgttgttttaccttcgcccagagctcgaaagacgtcctgaaagctttcagaagagacactaaagaaataagtggaaaaataatgtactgaatatagaagcctaggatgattactattccaaaggaacacaagatgtgcttaatgtataggccatgtccaattacgaagcagagttatcaggcactgcactatttctctggacaaggatgattgtaaatgctcagataaacccctgtcttctccgaataagtgtacgacacccacatcagtagatgtgatgtcttggacagatcgaggccaggactagacaagtaagcagcagcgttagcatagcttgttatgtttgacacgaaaggcagagaatgaagacatactagaacgactgaatagtctccgggtacttggccgcgagatccttccaccccattaactcaaagaacttgacgagcttctggatacagcctgcatcgttgagcccttgcagcggaaagtagcccttgccgaacggaagggattgcccgccgtcatttcatagttccaaaccatgggcgctgcatcctctgggatctgaggcgcatcggccgggaggtctctcttgccgacgttcttcaggtcgataatatcccagagctctttgagatgtcgtagacctcttgatgagcggggctggtggcgcggccattcaatgtccagagctcctcgagcttagtcttgtctacgacatccatgacgaaggaataaaacttgagacgcgatttcgcaggcgagacgtaatcccatcccagaggttgt

SEQ ID NO: 3797 - DNA, 2702 bp, Emericella nidulans
  unsure (1)..(2702): unsure at all n locations
tcctctgtatacggcaaccatctcctcgggcatgatcatgctacaaagttagttttttgcacaaatattgcactttctgccatctctagtgcactgagtagtttggaaggacccataacaaaaggagtaaagagttagaatcataacaggtattaagaatagaggattaatcagatatagtagagagctattataacaaattaggtttttataatataatgcattatatttattttctttctggtcaaagtgttacaaaaggtctcgcaagcctcttgcacttcccaaccctgattgactacttaccttgatcacagccatgatccaccaagtgagtgtacagaggaaagcagggacaaggtacaacccacgactcgtatgccttgtagagttaagtgttgacgagttattgctaaacttaacactggaataataatttgcattgattgcgaagatagaaagtcaggtacagaggcaatgagtgtccttataaaaccctctacgtccctatgcggatcctgcctttcctgtagttttgtagattatctacatttgtagataatctaccattctaccagttccatacttactagtcgcactcatcctcttatcaaattttgtcataaagccatggtaaaaactactaaattactaattttacgttatatagccctttctttatataaattacattgaatataacacatataacagcgacagttgtactaaagaaagatgcctggggatattgaggattttaatgtgccatagcttgatagcacacatatctactggggccttgaaacaagcttgtcactcagattcactgccgtgaatgattttgggagcttgacactagcaaggcctgtcagcttatctggatctaagacgctaaagaacctcaacttacgtattgaattttgccttcaaagtctcaataacctccttccaatcctggtgtgcagtaaggctacgcccgggcgcacaaccgattgcatgtctagaatcaaggtgcacatccagggggtcgtaagcatgacagccggggctgatggagattcggatcgagtaagagctggtagaggattcgctatccctggcttcataaagttcgaagcatatctgggagagataatccaactctggaatagcagagcgtgctatttttgtctggacaccaccctcaagtatacagttcaggagcgtgtaaatgtgggactccttagtaaaataaaacacggacttcgcgtctgaggaagcttgtacctcttccagatctctcactatctcctgcaaaagaggtaaggaagtcaacaggccaatctccagcttctccgtatccgtgataccatattcctggggagtcacataatcgaagagaactttcgctagcttgtacagctctcgcaacttcgaaagcctagagtctaatttggtctttgacggattagaactcgggtaaagcttaaaataatggtcgtatgaatcgtcaagtgcccttagatgcggtatcgatgtctcgaaagcatgcatccgcctcttcaaaccgagacgatgtgccagagtctgactctcggagtattgctcatcgaccctctggtggccgctcccatcaaagccattgccccttgactccgcagcagaggcatgatttcgagaagatccacggcggtacatatctgccgtctcctcatcgctgtcttcagcatccggaggggtgaacacccattcgaggaattgtcgattgtggagcgcatcgaatttcatactgtcatacagctcagaaagcttgcttgggtcaaccttttctgtatcgcaaaactcggcaaagagtttctcccatctctctttaaagagcatgggatcttcacctgtgcaccatcgaccctggatagcggagaatgctggattttcgttcgaagtatcagcagctcgtgaggaggttagttcatcagatttctcggctgcatctggagctaacgtgtaagagcggtcgagtttctcatagttgtgcctcattatatctcgatggaacttcatcagttcgacgactgtcgctaagaccactgatggctcaggtatgtttccttaggccatgtgaattgtgaaggggcatacccttctcgtggaggcaatccaagcttgttcttgaccttatccattaaatattgagccggactggagcgctgtaccagatcctttctgacctgactgaacccctcagggatctccttctggtccaggaaagaacaagcccagatttgagctttgtgcttcaagttagccataatccctcaataatcggcagtatgcatgacttaccgctagtacttactctacgctctgagctggtgaatactcgaacgttgttcaaagcctccttattcattagtttcaaatcgtcacgcatattgagaccaagatcctgggattgataacgtgctgcatgtgttggctcccctccccatttgatgacaagttgaagtttgtcgaggatgaggtcattctcaacagcggagaacctggaaaatgttgcaccagatattgaatcgcttcgggtctgggacctccctatgttctcaccctcttgaggcgcgtcaatgggcaaagaattcggctccttttcgacagtatcagataatgctgacgttttcacattgccttcctcgagatctcgtctnctgaacattggttntatctgc

SEQ ID NO: 3798 - DNA, 3070 bp, Emericella nidulans
tacttgctcggactttcgggttgcattccctacgtccatgttgagaacggttttaccgtccatactgtctcggttaggggcgccggctattgcaaggaacgtaggcgcaaggtctgtgtggctggtggcagaatcgactgttcccttgggaactccgggacctcgcacaatgagtggaacattaatatccgtctctgctggcagttagtaaggaatgccgaaaggtgaaagacaacactcaccgtatccacagttttttcctggccgaaaagcgtgttggccgaggtggtatccgttgtcggtagagaagaagatatacgtattgtcaaggacaccagcctcatcaagtctggagataagtcggtcgaccatctcatccacagcctgaagtgcccgaagacgacaacgctggaactcatcaatatagtccacttccttctggcttagttgtgatatatccttgacccagccgactgcaccttcaatgactgtgttaaaactcttgtctctagggactttgtagtccttgaagaggtttgcatggcggggcgcgtattctggctccccaaaccaatgcgtaccatccgccgtggccgaaccattagaatggggggcgttcggggccacggtcagcatccaaggacgatctgggttcttcagagtctcattcaggaagccaattgctttctctgtgagcacatctgtcacatattggccggagtaatcgaccggctccgctccattgcgcgtcatttttgcattatagtagcgatatgtaaatggatccaatagaaactcagacccgttaaaccccttcgcatagggcttattgtagttgtctggagtgtgtgaattccacagtttcccgacatagtaggtgtcatatccggcctcttgcatccagatcggcaggtaattgtcgttccaccctgcctctaccacctttgggtatccaccataaggtaagccgacgtcagtgacgtttgtgttgtgcggcatacggccagtccagatattggcccgggaaggacagcagacggctgtggaacagaaatgttttgagtacgttgtgcctttctggactaagagatcctgtaggcataagtcaatagtggaacgttcaccccgggacagaactaatcacctggagccggggcatatgatctaggccccccatgtattttccttggtcatcggtgaggatgaagagaatattcggcttcgcagctgtctgaatgctccataggagcaataaaggcagagtgaacttcattgtaaagatgtggaagaaatgttctcagggtataattcctgattaagcccaggaaagatataccctgaaccccgtggtagggaacagtgaagcacatactttgcgtaggatgtagatctgatggtgccattgccccaaaaattgcattatggatgattcgcaaccctggcctataaacaattgccactgtcttgatcggcaagctagataaaagcttggctacaaagtatccaatgaccattctctcaaagagcagggtgaaggggttagttgattgcgggataaagacgatctatttgcaatatcattgagcaaggacgcagattgctgaatggaagtcgcacgatgccggtatactcggaacatttcccttactcatctaaaagaaataaccatctgaaacgtatgcagcttgaaaggatctgcttataatgccgtggaatatatagtctcagaattagccgggctccctattcgggcacgcaggcataggatggaagagctgtggtggtgaaggcttgccaaacacttcaaacgtatctgaaggatcttgcaacatttagcttgatagtcacgtaacgtaacggcattttcataggacaacatagcctcagaagcaccacagatcggcgactagccgaagcgcgcgtgtggagagagctttgatctgcgccggaggtgactccatcgccaacgttgacgtaaacaagggacgatcagcagatgcgcgagcggccagagtatttccgaattgacaccaagtaggaagttattccgtgtttgatcctatattaggatgcttcggcttgataaatgtgctttgatatagctgctttgggttcgtccatgcaaaagagcgttagatgttctcgtcattggccgatttgggtggtctattgctttcccacagctggtccctaggagtttgcccagacattgggagcatcaatgagggatccaacttttgagctccccaagggcatgatggaaaagtttggtatttcattcaacctggattgttgcacgatttggaatgttcaaggtcatttgaccctaccaggatttgacctcgttccaagctcgccctccgagtatttccccttatcttatactcgggctgcttgctaatttctcaccacactttgcctcctgcctgccgtctacccatgacccctcttgccttatcttatccgcacgtttcggtgaggggcgttttacggctttcattccccttttaaacccttccctccttgacggcatccaaagaccctgtagtccaatattggtccttgtcggccaatatcctattccaattccacaggtcaactttgtaattgcctcaccgaatcaggcaatcttcttcgagtcccttccccataatcccgttttttaggtacatcgcctcggaaagccttcttcatcttaccccctcgaaggcctccttgtgccacaccgggttcctgggcctacctacccccttcgtggacatcttccacctatagaaccaaccaatgctttaatctggtgtacccgcacctcccagtgtgttctataacccctattatctttcttaataccgctcctgattgctttcctctttagctctatatctacgcgcgtctccgcactgtctttcttttcttcttagtcttgtatctttcacaatcacctctctttatatctaattttgcttcttcaactctttctctcccatcttcgcttctacatttcttctttcccatctcctccttacttcccatctctttctctactcactacttagtcccatctcctccc

SEQ ID NO: 3799 - DNA, 2373 bp, Emericella nidulans
  unsure (1)..(2373): unsure at all n locations
gctttttctcgacaagattttcgtgctcagcacttcgctactttaagagcgggcttgaagccactctcaatgctttccggacggtcaacaccgaattggaaacttccaatagcaaaacgcaagaggaacttcggaaatcgaccaaacggaaacgtacagcagacggacctgaaatcgcaagcagcttcaacccaaagtacttgactagtcgggagcttttcgatcttgaggtattctctaagaatattctagttttcttccaacgactgacactagccttaggtcaacgacacggctttcagacgacatgttttggtccaggccttgatacttttggatttcatgctctcgcttacgtcaaagtcaaaagctaagcttgctgacttgactaacaagtctgtgctatatggttttgttctaaacgatgaagatgtaaggtgccctaacacggcgctgtctcgtcagagctaacagcattaggcacaatgggcggtaaaaatgagaaagtcaattgagggataccttcaggaaggtgctggcggaaagttctactatcggatggtagatactgttctgtcacgggacaagaactgggttcgctggaaggctgaaggttgccctccgattgagaagcctgcggtctctgttgatgagtatcttggggctcgtgataaagcaatcaagacatatgccaacaagcgccttcgtgcttctcctatgaactcacttaatcttaagttcctgtcagagagcgagtcatcatctggatttgacaggctcaaagagcccgaaaggtgggcatttcctaggtggttaagaagttgtctgacatgagtctaggttcaatgttcctacttcagaatccctgatgcgagtgatagaggacgtcgaattcgacattgatacggcgcaaaccagtgaggataaagaagcggcagtccaagcaaaagctagtaaaacctggctgttgttgcggctttcagccaagagcaagctcgcagcctttgacaagattgaagatggaaagaatctaaagacccttttcgagaccccacaaagcgctgaaagtacaacccaagccgccggaagcacaccgcaagagcctccgacaaagacttctcaggagaccgaagcaattaataatgggccctcacaggatgagaaaatggagaccgaaacaggaagttctgccgctgttgctgaggcgaacaaagtcgaagggagcgatgcagcgactattgatgcgccggggtcatgacaaggcccaccgtcccaaaaatacagcaatccaggagagtcattgtttcaataggctctgctcgcgctgtcttggccgatcacttggccgatgcagcaatatacgcaacttgaactgcaattaaacgtaagaattgcgaagggatgatatgctgagtcgatgcccttctcgtgtggagctctgacgaacggggggcattgggcaaggggtgcgtaaccaaatgttcctgcaatctttgacagtttgattgcagcctggccgccgccgttttgacagacgccaccaatccccgtgctcagtaggcatcggtattgtcagtgatagctgcgcagcgttcattttctgcacgaggagcgttatctctagcatgggtattggttgagcatctgtacaggttgcaggagatgatttagttccttgcatttcggcgctgcctacgggcggctagcgattggaaacgaatgcagaatagccggctcacaggaccacgctacaggtccttgtaaccaatttttggagctgtcagaattctagtccaactttcaccgcaaagtcttcattcgtgaaatttacgtctgcctgtcattggacggaaacacgtgcttatgtcaagcaatggactcttccaggcatgggtgccaaaatacagggtcatcagaggatccgttgattctttcagtttatctacccaggtctcgacagggaaatgactagacgccttagcagtttacaatcaaggtcaaccatgttaatctacctgcaaagtcctccgtacctgcataatttagaagcccggaccttaccttgtatggttgaagaaacggtatgcataagcttcaatttaaccgaaatagctccggcctggaaggtggcgagtggtcaaacaacctgacagcacgacaggccgcaacaagagcacgacagcttgacggaaacgtgggggaacatggcattccaggcgcttggaatcttggaagatagaggagcggaagtcctgatcactggaggcgagattaaagggtgcctgtcatgtttcacggtgaaccaggtgcaatccctactggaggataacggnagctgccacttgagtctcttcacgactcgcgcgacctgtc

SEQ ID NO: 3800 - DNA, 2266 bp, Emericella nidulans
cgtgggacccgcatgctaccctagttagtggtctgggtgtctatggtcttactcttttctgagcaggctagcgtttctggtgccttgcgatgccctttgaatagcgagggttcaaaaaccctgcaaaattcaataccaaatcagtatgtcccgcaggctgagcagacggagatgttattgttcactgaactgccggcaaagcctagtaaagcctggtgggatggggataacttgatggacatggtcacggaactgatattgaccgaaataataggatatccgtcacagacggcactgctgtgacggcactggagctggcccgtcgttgagaaagtctggagcttgtctttcagctgatggctacccattttcttgtacatgggatatagactagcaatggggccgcacggttgagaacctcctggcgcagccaccaaattagctttacgaacgactgtgcatcctcttgttggttgttacgctgaagcccatcgagtcatggtagctcgatgaagaagagattccgtggagcccgaggcctggctatatctatgcggaattgggtgtactgcgcgattctagaatacaagaacaagatataaaagctcgccgtggctggccctcgtacctcccttgcaccctttagtttcttcgtgcgcatcaaatcctatccatcctcacgaaggaatctctcttcaggaaggaggaatgtgttttcatgctagcgcttactatggggcatctgaactcgccaaaatttttgttatctgtaggggccataaaatggagattggctctaactccgaccggagatatatccgcgtactcttcttgaacgctttaaaaggcccctccccgtctctcgcttcagtaacacgaccagcagccaattgagccaattgagcttgcacttcaccgactcacatcaagatgcctcaactgaacggaaaagaagttggccctatcggccttggcctgatgggcttcacctggcgtcccaacccgtgccctcaggagcaggcttttgagacgatgcgggcagcgctgcgaaatggctgtaggtggaatacttgcttctgtccagatacggtcgaatgtatattgacggagtcttttggtaggcaccttttggaacggcggcgagttctacggtccgcagtcctacaatagtcttgtcctgctcgagcgctacttcgagaagtaccccgaagacgccgaaaaggtcgttctgaacatcaagggcgggttcaacacgtcgactttccagcccgacggctccgagtccggctcgcgacggacactcgatgacagtatcgcccagctcaagggccgcaagaagattgaccagtttgagtttgcgcggcgcgaccaaaccgtgcctatggaggtgacctttggcgtgatgaacgagtacacccaggcaggaaagatcgggggcgtcgccctgtctgaggtccgtgccgagacgatccacgaagccgtcaagcatacgaaggtccttgctgtggaggtcgagctgtccatgtacgtctgcctccgtaatggaccgctgggcccagctaattagcacataggttctccaccgaccccctcgagaacggggtcgccgccgcatgccatcaatatggcatccccctagtcgcatactcgcccctcggacacggcctgctcacgggccagatcaagaagctggaggatctccctgaagactcgtttctgcgcacgtacccgcggttccagcctgacaccttcgagatcaacatccagctcgtccacaaggtcgaggaactcgccgccaagaagggatgcacgcccgcgcagtttgccatcaactgggtgcgctgtctctcgcgccgaccagggatgccgaccatcatccccatcccaggggcgaccaccgtcgcgagggtcgaggagaacagcaaggtgatcgagctcactgacagtgacatggacgagatcgatgctatcctaaccaaatttgaacctgcgggcgagcgatacccggagggggtgccgacccatacatagaagccagcgagccgccagccagctagagccagatatagaagcaaaatagaccgtactagtatttttcggatgaccatcgtacgatgccgtccggtaccataatattgcaaattctgattccacgtggttccttgtcgtcatgatatcatagcgcctgtactgaagcagtatgataccatagcagagtcacatcccctctacacgccctctcagcctgcccctacacatccgttac

SEQ ID NO: 3801 - DNA, 2180 bp, Emericella nidulans
aaaagaaaaaaagagttgatggaaagagaaggagaaatataatagcgtagagtaataaagtttaagaattaaggagagtaaggctaggaatattaaaaaggtggagttagattagggctatagagtgatagatggtgatagaaagagtgatataggagaataaagtaggaagagatgcagaatgagatggaaaaggaacaagttctagagagaatgagaatgaagagagaagaaaaacgacagaggggtaaaattgggtattgaaccgtacgaggggagccaagcggaagaggggccgaacgaggagctaaaccgtggcctttagtgagggaaggtcaatccatgcccaggagcccaaaacgagggaccctgtccccagaatcaacatgtttgtttccggagtgttttaactgtccataatgagattctagataacagattgcacgagaaaaaatagttgagacagacagaaccaaaaggagtcaccccatgagtaccgtcccccccgactgaggcacaccaagtacagcctagcggcactgcagcgccatcagcatcggagactgagaagcctgatccttaccaagccaagctagagcgactaaagcagcggcccacgtataccaaggatggaaagaagcgtattgctcctttgttggtgtctggcgccgggggtgccgagtcatcgctaccacaagcacggttaatggcgtccgtgagcagccaggtcaaggctgatacgccgcaatccatcgtcgatctctccaagccgtttgatgggttaccgaagggtggcctcgctacattgcttttcggaaacaagaggaagttggcacagttagaagacgaagaggatggccacaccgaaaaacgtgtggctttggcaagccagaatggcgcgactcctatacttaccagcgcacctgaaggcctcctcccggcgcagccccaggaccctcccacaggacaacaaccgactccagagtttatccggcctgcggtggtgaacccatgtatgtccgtgagccaacttcgattagccgtaccgaaagttcgcacccacattgtacgcgctatcgactctgcaggcaagccgacagaacctcctagcacgtccggagaatcgaacaaatcgcgggtagatgttgttttcgaagctcgaaatccgtctggggctagcttaacaggacgagctgctgaccgtgagccggtccgactcactctatttcgcggcgagcagcctctttggcaggactttctcccaagaactgttctcctcgttacaggaaatcaaaatatgtggtcagccgcctgcgaagacggatcagtgtacatctggaccccggcgggccgtcgtctagtcagcgctctcgtcctcgaagcacaacccgttatcctagaatgcaacggtccttggatcctctccatatctgcagtaggcatgtgctacgtctggaacgtcgagcacctctcgtcgccacatcctccagtctctcttcagcccgtccttgatgccgccattcacaccctaggcgctcaccccagcgccgccccctccatcaccaacgcccgaatcaactccgaaggtcgcatcatcatcgccctttccaacggcgaaggatacgcctactccccatccctctacacctggcagcggctctcggaagcttggtgggccgtcggcagccaatactggaactcgaccgaagcccccgttggtaacctgcaatctgcgtcaaacacacagcagaaggacaaagatgcccgagcagccgtctcagctggcatcatcccgttcttagaacgcaacaccacaaacgagacactcctccgtggccgcgcttacttcctacaacgactcatcaaaacccttctgtcaagagaaggatacgaaagcttcgaatccagtgtttcaatcgcgcatttggagaacagactcgctggtgcgctctctcttggtgcaaaggaggaattcaggctatatctgtccatgtacgcgaaacggatcggggccgagggtctgaggggtaaagtggaggaactacttaagggtttgttaggcgggctttttgaaaacgatgagggccatgtcgaggatggcaattcacgaatggccatccagcaccgcgccgaacatgccgaccgtaactggaaggaaagcaccgagacgctctgtggct

SEQ ID NO: 3802 - DNA, 2368 bp, Emericella nidulans
aggcgttgccccgaaggaagaccgtgtcgctggacgaattatctcgtatatctggcatatcttattccctgatgtgactggttctagtggctctgacgctgctgatgcgatggacctggacgtccttaatcgggctgcctgtccgagcgcgcaggactgctattgtcggctttatggacggtgcgatctgcagtgccggtcgccgggtagttgtgccggtcagtatacgattccgcctgggtataaggtccctggccatggacgtaaggatcctgcctgatgggttatgactagtatgctttggttatgatggcgtattgggttacgatgggtttattggtagtggttatgttaaaagggatatagaatagaatgaatatatagtttatagataagagttcactcagagaagaagttgtctattgctgtaatgccgtaacttgcttatggtggagagtatggttctatattttctgacccagcgtttccacgctcatacaagtgacctccaccggccctccttaccgcaaagtcccagccacatcgttctggtggcatcgtcgggggttacgacaatattttacgttgctttcaagtaagccagctgttccttcaattctggtgccgattctcaactgacaacgccagtatataactgagctttgcaataaatgcatgcaggatatgaagcgagctcgcaatgtggcttagtcagatatcttagtcaccgatgaagtccacatcgagccgcgcatacaacgagccgcgcaccccgctctacctttcactgatgttattcaaaatgtcaccatgactccaaaaaataaaatgattgagtccaaacttggctaagcagggaggagcatgacccttgcaatctattttgtaatagactgaagttcccttgcatttgccaagcagcagcagttttcgatgtcccagagtcaactctccgtggccgactacgaggatgccactatcgcaaagaacaacgcgcaaatagcaataagccatctgaaacccaggaggcatcagtacgatggatacaatcacttgatagccgtagagcgcccccaaaacatgctcaagtcaaggagatggcagatctacttcttcgggaggctgatcctacgagatgtacaccagtaggtgtaaattgggttggcaactttgttaaacgccataaggacttgtaatcctgctttgcgcgaaaagtcagctacaagcgggcagaatgtgagaatccaaaagttatcaaggcctattttgaccagttacaggaggcccgaatgcaatatggcattgtagttgatgatatctacaattttgatgaaacaggatttgccatgggggttgtggccactgcaaaggttatatcacgacgcgaagaaattggcaaaccgcgtcttggacagccaggcaatcaagaccattacgcagggctggagctcgggctcctcaggaacgcgcaaggttcaccggtcatgaatagctactgtacatcgtcgtcttttcgagctacacacgcactattgtcatgcgggattcttctttcccagagatagaaccgtgagagggatcatggttaaggttgaatgagggtcccccttagtctcgtgctggctatgaacttatggtccctggcttcaatattgcacggccacgtcgaattacaagatttggagaaaagcagatccagtttctctacgagtttcatttctgtcagattttatattgattttcagataatgcggcttaaaatcgcggtggtaatatccaagacttggttgggaatgagaaaagaatgtcctagtattcaagtttcgaaataaaaacagtgataaggcgcttaagggtgtcaagataggtgagcagaggagatggcattctggacaatgtgaagacccaaataactaggcctaattgacgctgtgcgtactaggacagttacggagctagggtgccctatgtgcccggctgagcaacccaggtcaagccatcatccaagcgaacgccagtgcctagcagtatgcagccttggtgccagccgttctggccgatgcaactcttttagtgccaacggagtcgcctatacaatggcgaaactgaacctagaaagaagaatactgacatctcctggtcctcttgatttctagtttgttataactgggttgatatctatagtaactaaggtgtcagtctataaacaaccctccggacgcaaccaagtgcgccccattaatccatcgcgctcgctcctcacacaggaaagctaccgcgtacgcaatctcgtcgggctgcgccattcgtggcgccaccggcgtctgatcgatgatcggctggaggatcttcatctgctcttcgcttg

SEQ ID NO: 3803 - DNA, 6306 bp, Emericella nidulans
gcgctcgctgccaatgttccgtttgagaataagaaacaacccgacaaaacaggccccgtggaagatgtccctgccattgtcagagaatcaatctctaaagcacacagggacccagaagcagctgcacagcaggaagttgttgatgaaaagaaggagctggagcatgagcttcaacaaaaggttcaggtcgcaaactcggtcggtgaaccggcgcccaccaccaccgcagccactacagaaactgcacccagagctagcgttgcggaacccagctcagcagagatgtcaccgcggacaggaaccccgtcgggtgctaaagcctccaccactggagcgcaacagcccggggagtcgaccacaggagcgcctgttacaggagcatcaaccactggaggggagactaagaagagtacaactcctgccaacgactcgaaaatctcggaagtgccctcttccggttcacccgggaaggaagataagaagaagaagcgctccagtatttttgccaagctgaaggagaagttcaaatgaatgggtaaccttagcccccgctctaggatgacttgtcgggccgtgatgttattgatgatttatctggataccttttacgcatattatacgtgattaccccgcatgttttgtctcgaacattgaatagtgaacagccgagttaagtgtataattgagtaataacctttgtgaattgcacaaccttctatataggtatagcattggccacttgaccattcagcttaaccgggtatcctagcatactagctcttgttaatgcatttcttctttcaaaatcgatgtaaactcactctttccccgtcttcgtacaaccacatccgcagaatatcgaggcaggccagcagatcacagctgcaacaattgtaaccacgaaccctaactcatcagtacgctatttcgtttgaggtgaacagatgggttgaatgaaatacctagcgtcggacccacgatcttacaccggcacgggttctggtccgtcccgcactggatacagacagggaagaaaaagaagggcatgtcgcacatagtgaaggcttagcgtaagccctagtctggagtatagttgatcaagtaatggtggaggcgacgtgcttcaagggaatatacgcagtaagttaataggtattaatgaatttaaaagatgttacccatcaaagaggtgaaatcttaatgagttggaatagatatgattcatcatgacgacaatgtgtgattgggtgactgggactcaatgaaagcactgctgcaatcggaagtttgttgatcttcgagacatgcattgagtggttcctttgaaattatcgcactcaaacaacactgactgatagatattatgatagtcatatctactgacttgatttgaggcaatgcacttgccttttgcaagacctgagtgcgccgttcaatccgtcaagtccacctacccagtgcagctgaatcgaaaatcaaattcacaaagctgtccacaatctataattaacatttctagcatatcacagccacccccgcgcatttcgcttcccaatggggcgcgtagagaattccagattccatagaagccacaataaaagcgcttcagatgcgcgcataccagccagggctgccaggcaccaggattttcttgccgcggagccgaaacgcagggctgtcgtttccttatgttccctttttatgaaaaattctcttctttgttcttttgcagttaaatgaatataaatagggataagatcccctcgtttactgaaactcataacattctgacaaggtaaaaagcccttggatcaacaattagtgtggtgagtaaccgatcacatcgatcatcgccgacgtcacccgctcagccctactgcacgatcgggcgtctcgtctccatctttgcacctcacgaacccctctcacctactcgaccatccaaccaactactgagactcatttttcattcgttcagacattatcaggcacactaacttttccaacgtgcgtgacagaatcaaagcaagaatcagcaccacctccttcccattcataatccaatcgccatggcaaaccgcctgatcccgctggtcgtcctcctcatcgtggtcgtcgtgctcgcagtgattggcttcgtcgcatatagcatcattcaagaagtctcagacaagacaaggagcaagatggagaagcggaacgtcatgtttacaaaagacgggatgaaggttggtgttcgtgaggttggggaagaggagtatgtggatcggagtcagaggtacgtacccagttatctcataccttcttgatatgagggtcggcagtctggagtgggcaagtggctaacgcgccgtgtagtatcctcgtcaacatttggaaccatacttcattcccggcgtacaagagcagactctggaatatgacgggctctactgggtctgcgagcgggactgggaatggcgagttcagggctgagcataggaaggggtgagttgtgtaacctcttttgcctgtcttaactggaagggtactttgactaactcgagcaatctgcagacgttccaattgactatcgaaacgtctcctgagacaaaggtggtctaagacatcgatctcggttgaaggactcctgggagagtcttaatagggttatataagaatcagtgatcctatacatggctgcagcacagagctactctcactcttctagcagtaacgattgacgaatgatgaatcaggtgaagtcattctttgctaccagctcccaactttatgtatcgagtaagagggatagctacatactactcatttatcagaaagctttcacttcctggtatttatattctgtggtggggtgagtgccctgatcatcagtgccgcctgacatgcatactccgtaagtagtagagctttgatcagttccaccgctgcggacattagatcagatctagtatacgtacctaatacctacaactctgtcatcgagcctggaccgaaacctggtctgtattcaacaacgagagctcctattggttttgatctagactcaactggtctgtccagcagcctccagcgaagtcacgaactcatgcctgcgtaccaccacgcactgagacgccgcaaagtcagcaatatgtgcatttcaggctgtagttggcaatgctatttgtatatatctttctcctgtaagtgatattcccaagcctaccaccgaggtctgcagtgggtgaaataatagtactaactgtcctccacgtatggggctggcttccagaagcttgagatgtcaattcagtctctccaacttttgacacccaacgaggcccgcgacttcatcagctttagtcgattgtatcttgaagagaatggagccgagtaggcggatatatgctgtaaaattgccccgtggaacaatgttcgtgttggagacacaacagtattatcggagtcctccgtcccagatcaagagtaccttgcgacttccgagccatctccaattccagctctccctggatccaccaatcgtccaatccctaatcccgcttaacaataggttgtattcataccgcacagagtcacatcggctcttcacgcctgcaaggattaagcccgcccgtgcaacgccaagccgtccctttcaaagcttgggcccagtcactgctttctcattggctatcaccccgcatgacggtctcgcccagcaaataaaacaagtcagatcgccacgtgccaagagtagcccctcatgaccggcgatcgcccagcacgttgctggtcatccgctcgttataggcccttgcgtcgtggacctcggggcagctgataagctccatggcagccggactggacgttgccaggcacgagggcagtttgtctattgtctttcgtgcagcgatgctctttcaaatagacgccgtctggtaggtggatctgtctggctaagcttgtcttctagagacggaacccaaggtgctggagacgggaagaacctgagcctggtataagttgctctgatagtcggttttctggcctttttcgggttttatcgtctgcgagtctcagttgttcaaattcagtccttggacagcacgcaccgcacgcaatatgtcgttgtcctcgctgagttccctcaagggcctcctctccccgaccacagaatcggagtacgatgtggaaaaagactctcatgacctttcacgttcagaagatgtagggagcacaaatggcgaaatcaagccccgcgaagccaaagagagcaagctcattgacggacgagtaatatctgacgccatcatcggtctttcggatgggatgacggtccccttcgcccttacagcaggtctctcggcgctgggagacaccaaagtcgtcgtctttggcggatttgccgaactcattgctggcgccatatctatgggactaggtggctatctcggtgcgaagagtgaagagtactgcccctcgtcttcgtatctttagactccttcactaacctttagttagggaatcctaccatgcgactctcaaagaaaccaccaagcaaacactcacgtcccccgccaccgtctcggacacgattcacgaaatcttcactccctacgacctccccgaccacctgcttgctcaattaacaactcacctgacatcttccccgcaccttccctccttcctcatgacattccaccacaccctccccgagccctctggctcccgagccctaacctgcgccctcaccattgccctttcttacttcctcggcggtttcgtcccgctcctcccgtactttttcgtcggcccagaccaggcgttcctggcgttgaagtggagcattgcaacgatggcgattgcattgtttgtttttgggtatggcaagacttgctttgtgtctggatgggcggggtcgaagaatataaagaagggagcatgggggggtctgcaaatggttattgtgggcggggttgcagcgggatgtgccatgggactcgttagagggtttcaggcgttgggggagtctgatccgggacaaaatacctaaagttctggaggtgactgatagatggtatggatattcgacatataattgcatttatgatcatggatcatgggtctgggttggggtaaatgtgttatgttcatacttatatatatatggacaaacggcgtcggattgcatcattggatctcatggatactcagtctaggctttctaggcttacagcatcatactgtgaagccagtaagcttctcgttttcgacatctatggtttcatatatatcatggtctctacctgtacatacataccaagaggctactgcatcgactttgatgtttccctgctctggctgagttgaagaatgctttggacgacagactttctaaaatccatcttgaatctcagcgggcactggtactcctgggagccaaaggatggctttactttgcggttaactcctcgtattgcagctttgtccaagtgcgctctaattacttgcatttcgtccgaaccaagacaacgtcgcggcagtccaggcatatccaaaactgggcataactcagactgttatagatctcgtagcgcgctgtcctttggtcatcgccgggcatcgtttgcctgcgtagcaaaaagcatctcctgaacatcctaggcacctgaggtatccatatcctccattcttcaggagaagtttttcaggatcctaacaacctgccttatccatatccacatcgcaaagtacatagatcgacatcagtaagtacggtgtactgtaccctcagcccctctgccagtacaaacgcatacatacagagaaataagggagacggagaaacaacctaggcagccgagttctacatatacccatttctttaacattctagtaagagaagcaaagtaaaacaatacggtcatgccccatatggagaatctatatttatgacgaccgggtcttgaggctgagtatactcctctacagaccaaccttggttagttgacacatcctaccccgctccaagtgtactttactggcaactgtacctttcccaagtggactattggatgtggatgggcctcgcaacaaaataacctgctgcctagcgtagccaggggccagaagaggagtcttaaacggccaggtgacatgaaacaatagtcggatagtttaattaaacggccaagatccacagctgcggcggcagtgctggagccttgatatgatggtggttacgaattacgggcgctagacgcagtatcggtatgcacctcgccagtcgctgtaaccgacaacgcaagggctttgattgatatg

SEQ ID NO: 3804 - DNA, 3545 bp, Emericella nidulans
gcctcgctcagctggctttatcacgctcgtcagagaccgagaccctggacgtgtataccccgacccgaacgacggccgagtgcgaattgactatgacgtttccggatttgaccgtaatcacatggttgaggggttagtcgctaccgccaagatttcttatatttcaggagccagagagattcacacatcataccgggacatgccgccattcattcgaccagccgaagacaagggtggctctcccctgggaatcaacgatccagtgttccaggcgtggattgaggaacttcgtcgcaaggcaccgaagacgtcggaccgggtcatgtgggcaagcgcgcaccagatgggaagttgccggatgggtacatcaccacgtcacagcgttgtcgatccagatggtcaggtttggggcaccaagggcctatatgtgattgatgcatcgatcttccccagcgccagcggtgtcaatcccatgattaccaacatggccattgcggaccacctgagtcgaaagatcgccaagtcgatggagtttcaaagcgcacatctatgagggttcgtgtgctgtatgctttatgcttggtgatcgagctcgctgttgatatcctactattaatacctgtacttattcttcatgtgactatcattacatgaactgtttagatactcactctaattgtactgatcaataatccaacctcccaagacaaagttgcagcgtgtaatgtcagccggtgctggtagctgacagtgccggggaaagcttggatgagacacaagcatgcgcgcgacttggagcttgaatggatcacgtattaggggccagatgcgatgcttactggcaaaatcatagccgctgttcttgccggggcttctcatgcatgtatggtacagcctttatgtcagcctttggcgatatacacatatacaaaaggtatagcgaccgacaaattgctagcatcgccaaatcatgcccctagaaaggttgattcaacctagctaactaaaacccttttccatggcctcacctatcgcctcaggctctcaaattggattgaagcgagagacgaatggcaccaattcaacggactatagtactgtgaccacatgaaatattgaaacatctccggctgttgctaacttcctttctttgattgcctctaagatgcaatctcactcgacatattcccaccagaggcttatagcctggttcgttatgattcccagggtattcggctccagcctttctttcatatctggccagggcttataacgtatacctgaacgagggtatctgactgcccgtgcgatctataaactccacctttgtgacatagtcagtcgtctctgtctcttgatgccgacttgtcgctggaacaggaccatatttcctatctcgccgccgattctcgcactcgtagtagatataaagccggacgaggaagaggatggcgagggcaaagccaacaaggacgcctcgtagccaagtctatgcagtctgtcagccaggtatgaaaatccaccgacgatatgctacttacgggatatttgggagccttcttgtcaagaacagctgaggaccgacgatgttcctcgtgcaatatgcaaggaaaagcaccgtagagacaatcgccttcttcgccaagccgccaacattcgatgtatttagctcaaagagatgagaatactggttgcgaagggaccgaggaggaagatacctgcccatcttccccatcgattggagtccgggagcgtattcatgaggataacgccgacaagtgcaaaaaggaccaccaaaatcataggataatccgactctttttggcgtaggtagctgcccagcagatgacagccaatgcaaggatctgaagaccaccgccgggtgctgggagcagcagcgaattcagctcgctgaagccaaagccgttgataattatactgctgaactgttccccgtcagcgccctagatcacgcctcgatacactgcactgcacttcctgcatattgatactaccgaaaaacctcccgttgggaatatttttgggtgaggctatacccgaccagcaaccaagcttgcggatcagtcaaagcatcgaccaactgatctgctctgaacacgccttctccatcacgcctgtcctgttctcgacggttcggtgtacggcaatcttcctcttatgcgctttcaggaaccacgcttccgatggcgagtcgggcaggacaaagaccagaaagaccccatatgcagccgtcacgcattctacgatgatgaagagcaacttccaagcgatgtttgggtcgtttgtcccgatcccatacgcaatcaagccggagacgatattggcgacggcgttcccgaggaaccagagcaccatttttgagggctgctcagaggttctatagaacattcccatgatgagcgaaagctaggcgcaacagccgcctcggtgacgcccaggaagaaccgggcagtaagaaggccgccaaagttcgtgcatgcggcatgggttgcgaacacaacaccctagaccgcaaccgacgcgcctaggtatttgcccagcgggaactggacggagatatagctggaaggccagctccagaagagatttccgaagtagaagaccgaagagcaccagctgtactcgctgccgtgaagattctgaaggacgtaatgtttgctttgaataggatgcggtggaaaggcaggtgggtggataggcttacgaggtctgttcgtaggttgagctgagtggcatagcccagagttaccttgtccaagtactggagcatgtagcagaggcccatcaccgggatggtacttgggagacggccagttattgagcgcatgcatacaaggttcgtcatactgaaggtcgatcttccgtaggatcctcttcctcaggggtggtctcagctgggagggcttcgacgacttcagcagctattggagtgctagctgagtcaatggcatagcaacgctctttttatggctctctctctcttactttttttctttgccttttctgacagctttcaaattcgcagccggcgactacacagaatgatgaaattggggattatattagattatatccttatgattcaaaatgtcgcaagcactggtagattagtagctacggtcgccattatagtcttgtattggagatgttcggccttttgaatggtgggctttactccactataatacatgccatttggagtacatgttgtagcaatatcaactcggaattacaacatcacacctacgaaggcacgtttcaaaaggagcctggtgagtccacagccaacagatgttctttgaatagttcaattctgcaaacgtgaaactatgtgccgcactatataggggtcataaaaagagcgcatcatacaaagggcgtcggattatgcgttctgcctggtccaatatgccctttgtacctgcttatttcgttttcagtctatgtgtcataaaaagattgtttataacgctggagagtttgctaattatagcctctcgtagatccaacccatatgtatccgc

SEQ ID NO: 3805 - DNA, 5908 bp, Emericella nidulans
  unsure (1)..(5908): unsure at all n locations
tgccgatacggattgcgactctggaagagaaatgatcgtcaatgtgggcgattgtctgcaccggtggacgaacgaccgcatgcgctcggcgaatcatcgggtgacgttacctgctgagatgaaggataagtcaagacctgagatcagtaacgatctcgtcccggatcgctactcggtcgcatactttgggaaaccggatcggggcgcgttggtggctgcgataccggagttggtgcaggaaggagaacaggtccggtataagggtgggatgaccgcttgggaatataatcaatcaagattgctgcagacttattagttagaggattcaaaccatgcgaatagaataggaggggccacctgaattaggcccatcctgcgtcactacggcctgcagtccgaatcatcgatgcttcaagaaactggcggtcaagataagataagcgcaccgtctattataggttgatacctgcctgataggtgtattggaaagtggataatgcccgttgactatcaaaattcttatttgaacatgtctattatatacagttagatcgtatcacgtagctcgcgagtcctgctcacgagtctcatttctttcggaaaccgatatcgctggaggctcttcttcataatccggagggggtgtctctgaacggacagcctcagtcgtaggctgcaccggcggtgttccgcgactttccatcacactgagctcgatttcctcaggtggcttactttccccattcgtcgagtcaggcggtagatttgtttttgtagcagccaccggtggctcctcatcaaccgcgtacctccactcattgttttcacgtaaaaacatgcgaaatgtgtaccgctttttgagccgctcaagatgcgtctgccgctgcgcgtttgtccaccccatacgtaccgtcaaaatcgtgaatcatatggctattggcgatccatggaatcacagacccgatggatcgagggatccggggcccattgaatctcccnacggcgagtgccgaaaacaatcaacactaccacagtgtcgagaccaatgatagccatcgcgataaccagcgaagacactgatggctccatccgccatgcgctccatataacggtggcgttctctgccaggacaggttctcgaagaggtagaagataaatctctcgccagagcgagaagtacgtactataaacccactggtatacagtttgcgagagagccatcaaccggtcgggatcaagacgcgtgatgggtgcgacatcttgcttatacagcagggcaacgaggaaacccgcccaatcgtaagatgagacgtagcttgagcttgtatttgtcgagccgtagaagctttgtgggatagccgcaaaaaccttattgaactgcccgaggctgatggtcgcattgtcgtacatgttgccagatgtgattgacgtgtttgggatctcatagtggttaatgatttgacctttgtgatcgaatacgatagaaaaattcctcagcaaaagttgcggttcgcagtgcaaagcaaccgtgttattactggtaaccccagatgctgcggtgtaattccatcggcccacgacaagcaccgttgacgactggcaaatgtccgcttcctcaatcgctaccggcgaaaagaagttgatcgatagggcgtatctatcgtttccgtcgcggggcggtgtcattttgacccagcaatcgcggtctggctctaaagatgggtggtaagtccagtacgggccatcttcttgccataccagattgtcggggatggacaaggcctgacagttaagatctgcacccacacccagagtcgttgcgctgtaggaggagtcttggtcgggatcacggattgcgatgggagcaaatgaatggtttgtgcttgtccaaggaagtagcgggaccccactggtgatactcgtttgaatcaggtcatactcagtaaagtctgccgcaaagtcgttctggcggaatacagaatggctgtaatttgcgaagagagagtccgttgcagtttctgattgggtcaactgctgcgtgaacagcccaccagcaacagtagttaggacggtattggcgatgcacgcaatcgaaattaaacccagcagaacatgacggttcttagcagctttcggtaaaacagtccacggattttggcacgagtagttcatggtcaacgaggagcttgcgctggccattccacgttgaagatggacccatggttcgagaatgctgaggttccgatgaatggatgtacatagcgcgccaactgccgacgcaacgacagacggaagaaatgacaggaccacttggaggaaactcgaactagactggttcaaatgttggaacccgccctttttggcgaacgttgagataaccaagctcatcagaacgatgaccgcggcgagaagcagaaactcaaggatgaagatcggaatgaccaggaaatgtggccgcgggtccgcccgtacgcgcatttgatcgtctaaccgcacaggattgcctagactgattagaacgaggtttgtaaatgacaggggaaagctcaccgtctactgtgacaatctcaagccggcttccaagaggactgtggtaccattgaagccgacagtcccgcaggaggcgacgaagctgccgggtcgaaaactggtgaaagccagaccgcgggtcggccaggatattgttgagaccgaagacatcagttagcatactacacattgcaccaacggaccccggatcgctttgaagaatatttggccgtctgtgatagtagtgtagcataatgagggtgaggacggcgccgattcccaagataacttccgcgcaacgagcaaccgctgcgactatggcaagcgagacctggcctgtagaacggactgcggcggcggtggttggtgagacatccgggttgaataaacggctcattgtgaggatgaacgtttgcttgacccctcgagtaaccttggctgcgaattcttccgagctcatggtcttggacgagtcgaggaccaggacaggatctaggtcgccgagatgctggctgatcacgggcagctccgtcagtgttcgctctccggttgtctcgttggtctggacaaaaagcatatcgctggtatatagagctcgatgcgcgagaaaactctggaaagcgtcgatattaaattcatcatcagtgagttcctgtgtggttccattgaacactctggcgctagtgattgaactgtttgcgtgcatagtaatctctgcttcgcccttaaaatactcaatgttgcaagcaaacattgtggcagatgatgtgagttcccccacaacactgctgatagcatttgagccatgagaggtggcattgatagatagcagaacaccataaaggtcaattgaattacagccgtccggaacaaaggttttatccgcaccggtgaacggagttctggaccacgtcggttcccagtatcggacttgaagaaaatcaacgttgggaaatatcacgttgtcgtacgagaaatccaagatgcactcctcgcccagaccagaaatcgggatgtctgtgacgttccagtgcagcaaaccctcagtttcgtctacggaaaccgagaaatcttgggtaaacagatcctggcaatcaagctcagtccagtatattgtctgattgagtgaccaaacagtggtttcgcgtcgatcatccgtgggaatctgaactggtgcaacggcaaaatgccccgagcgagtctgttgaagttctgcactgcccgtaaagtacgcttcaaagttgttgctttcgttgtcctcctgcacggcaaaccagcgagcctgggtggataaatctaccagctttgaccaagtcttcattgattcattcgagatggtggttacttctcgcaattccaggagcgaactttgtaacgcggggtggaaaatgcgaatgagtagcgtgaccagagagaccgccaataccaaccagtgccgtcgtttggcagaagctatgggcgtgatgaagctttgtccgaaattataatttataaacaagaccgtcgccggacatccttcgggacgggccatctgaaaatatggctctaggcgcaatacgtcgaagtcgataaaggaccataaagtggcaagcacgagggcaatgataacggggacgtagttgtaagtgaacgactcgagattgctcagatcatcggtatcatcgaagaagcgaagccctccggttcgttcgctgtactgactcaaggcttcaagtattaccatcaggaacagcatgaggcaggcgatgaaggtgaggaaggtaggacgtaggggaattgggcgccatcccgtcgggtgagtaggtcgggcatttggaggagagccaggctgacgagtggtccagtagtagtctaggaagagacacggtgagcattgatcagcagaaatagaacaagggtccgcacttttgaggtgtaagtagacatggtacagattgaatcgccggcctccagacatggtctggtcgcatgttccgccgggctagcgataacgtcccccagattcactccggtgtcagactcgggaacagcgttatcatgatagttccttttgaaaatataaagcaaagtcccgcatgccgattttctaatgagttctggataagacggaccgcaccaggcgatggagaggggtggacgaagcaaggttgaaggggtgagagtcggacatgacagccaccggcgtcagtcggtcgaggtctttcaatcgtggctcagctgttgcaggcctcaggcactcaggcgtggcgccagggacagccgtcgggtgccactggctcgttgagcgaggcgccaagcttatacccactattgtgtgcattatcattggtagacttgaggagactcagccaatgatcggggcgatgacgcagctttccctacgtctgcgtaacctataccgaaattccaagcagccggtgctgatcagcgtgtactattcgtaccggctttacaactagttgtaacgcccgcagaagtatctattactctaaggaccctgcaggtaacagcaactcaaaaccagctcagcagattttgtttacttgggagtagttccgttctgtaaagagggtctgtcagtgtacgataagtagtcttatgggtgcgctatcagcccaactcgaggtttataccttctgcactacaaggcttcggcctgccggtcaagcggatatataaccccgtgcggagcctaaatcaatgcttcgatcctgtatttggacacccacgacaataggtggattggccttcttagttacagtacctgtcctcttcgtgttccgtcatatttgaaggtgctatattcttattgacgcacgagccgttcgttcttcctaggttgaggctgttcgcctgccccacgactctcggtataggatcattgagaaaaggcattaagaacagtagtattataactgtcactacggatgcatgggtcatgaataatgcacccttgccatagtacgtgcatgaagaacaccgtcttgtctacgtggctgagagtagttttcaatataccttattgatttcatagaaaaggacagccaactaaaatggtgacatcggccaagttcagtaaaagcacattcttgcattggccgtattgtgatgttagcctgccgtaacatgatgcacatactggatggtacttgctttaaagggtacggaatgttggcgctcaaggtagaaccactcgtcagccccctacgggctggtctatgcgatagaatagctggtctgaagctcatcttttctcctgtattaggcgagggtccatgcgtgggacgtgcttcgatccaaattccaggactggtcaggtggtttagggagccaaaccctctggaagcggatctgagatccacaagactaggtccttatg

SEQ ID NO: 3806 - DNA, 1657 bp, Emericella nidulans
gattcagaggagccaccaaactaaattagggagaaggcgaattttaaaaagagcccgggcgctaaaataaaaaaaaatagcgttaggggggccattagagaaaaaaaatgattccccgcacgaaactttagagggtatgcccacaaagttcctaaaacctcgaaaccattgcaagaaaatgacccttgaatgtggttgttgatggaactcatgtgggcaaaaatcaattgggaccccctctataacttgcattccgggaaacccaagtcttaaggattaaaggaccccaaaacatcctggtgcatggaagatcgcagccgtacaaaaaaacaatcgcgttggcaatctcgcaatcgccatcatcgcaaatagcacatttcgtgtcctgactttcacctggtcctgtggtctcgccgttgacaacaaccgcggagcttgatcgaggctcctgtgtctgcgaaggcttggggtttggtttgggtattcgtttttcaagactgtgccattccttctcaatcttcgtcatggtgatctcaaaaacggccggcttgataggctcatactgatcctctcgccgctttgcattgtaatcctctagccacttctcatcctgctcatccatatcatattccacccggccgacggccgcattgacttccccctcgccaagcaatgggttgccaatatcaagatcatcttcctgagcaccttcaggcattcggatcaaacggcgatcatggcgaataaacaagtcactttcctgatatcccacactagccatagtccggtcgacgtagttctgttggccgacgccgggctgatcatagaaagtaaaggggtccttcagtcgaaatgagggcttcggtagcctggggggctttttcgagttgggggggggtggagaaactactataggcttgggagtgaaaacgccaaggcactgcaggatggcctctgggcgccgggtagggcgccctggccttcgttcgataggcgtttggacggtaccattagcatgggcactaatgagctcggcgactggatcattctcgttggtcttatcaaggctcgtcggagacaaaatacttgcgagttgcgctgaccggggcgggcgatccacttctgctgaaggaaatacagggaattgagcgtcgatatccaattccggatggaactcttcccacccccgttcctctcgcggtttatatccatcgccctgctgtaaagccagcgctgccgctgttgatgacccaaatcgtccgcgggtctggctcttctccctgcggagacgtgtagatgggggtgtggtaggagcatggaccggcggcgggggcggaggtaactgggcaggttgcgcagacgattctgcctctctcaactgatgccgagttcgagaaatagaggaactggtccttttcacggggctcggcttgggttgttttggcttgggtttcggcttcggctgctttggtgtttccctaacctcgatttcgatataccttcctccacctcctggaccgcctggcacgtattttcgtttcttgatgatggggcctaagttgtcagcgactggagtttccgaattccagaatccagtaagggagtttttgatccgttcttcagggggccccgggggaagagcgtttgggggatgtgt

SEQ ID NO: 3807 - DNA, 1835 bp, Emericella nidulans
actccacgcggcctccccaatccagccccataccttcccaacaagcaaggacacaaacatgaccaggaaccaggccccaagctctccgcggaatattgtcatagccaagcatgtttccgtcaccgcgaaccacgccttctcgtaaagttgctcggtctcaataggtcgaagggggccgtagagaaggcgctgaagccagaagagcaggaaaccgacagccagaagacaaacatttgtcaagatctaatggacacctaagtcagattggatgggacggcagatgcggagaacagatagcaaataccatgagattggcgctactctgggaaagatacacgcaagcggaatagaaatttgccctctggtgaagtgctttcaagaatacacctgttgctagagccaccgaggcctagagaaaagtcagtgcaagctcgaacagggcattctgtgcaacgaggcgcataccccagcataggcagcgaatctcatgatcgcgagagagcgggcgagaagcccaaaatcattgacgacgtcaagatgtggaaggccgtagtcgcttcaacgcaagcattgacagatgtgcctgtcctcaggggaagagggaaagagaaaaaggatccgaaggatatcgcgtggacagttgggaagcgtagatggatcggtcgacttctggaatctggacagctatacagtagttacagctgcccgctcgtgtcttacgtcagcggggcttatttgcgccataaccacctccggacaatatataactcctgtagccctcttcaacacagcatccctcccctgagtactatagtctacagcgggaaattacgcttctaaacttcttcttttgcattggactgctggcagcttggaattgctagttccccgattcatccacttgatcacaggtttcaccgacaacaatcatcagttttcaatacaataaacccccggaactaggagatcacaaggagatgggtccttaatctttctaccagtgttgaatctagaatttctattatatctaaaggctgcaaaattgacaatggcgtcccagagatctatgtttagtgctagccgcatccaggtctccacctacttgctggctgtctgtcctttctcaattgctttcctggtcttcatcaattcatccatttccttcgttgtcacagacttgataggtcttcatgaaggggagggcgatgctgtcgggaccctcggcttcgctgatgagctacttgccttggccgcctgtcccttgtggggtgtactctcagaccgtattggtgtccgccaggtaagcactctaattatctacccagatcacctgttgacctagccatatagatatgcaccgccggttacaccatcatcgctgtcgccttgatcctctttgtccaggctagaaatgtttaccctcagcttcttctgggtagactactattcagcataggcggcgccgcggtttcaacaatggtcacagccatcctaccagcagttactggacgtagccccaggactgagcttgaagaagaaccagagccaaggaccatcgtagctccctcatcgagactcgccggtttcgttggcacgtgcgccgggtgtggtgccttgatatcccttgtggttctcctccccttgccagctcaatttcaacagtggggactctctcccgcgaaatctatccagtatagttactacacggcggctgcgttggctcttgtggtcagtggttgttgcttcgtcggacttagaaatcttcctggcgaagacggcaaggcatggacgtcactttggtcacctttgcggaccgagcctcgatctttcgaacc

SEQ ID NO: 3808 - DNA, 1736 bp, Emericella nidulans
tcgcgtacatgcggagctgcaagttcgtcgccggttggcctagcgcagccaggatctgcatccacatatcacgttcacctcggctcatcctgttacatgtcgacgaaaaaaacttgctatatccgcgtatctatccttgctcgtatcttgcaaagcgaggatttcgtctgcgagatcgctagcccatgcgtactctgagtggaacccccgcagatcaaccaaacgttcacgtagccactcacgctgcgagatgtcatcagtttcgatgattgccattagcagcggccagtgtatgcggcgaagaaggcgcggatctgatgcgtattgcttgcgcgcaatctcaattatattggtaacagcgacgcgctgaaacggcgacggcggccccggagggtataaaagacgccgatggaacagaacttgtgcgtagaaggtactaacagccatattgatcgtgttaagtgtccggcgtgtcgacgcaggtccagcaaacttggcggttagaaatagatcggaaaatttctgctaaggtcagcttacgtccaagacagtctggaaaaaccatacttcgcgggtggccttgatctccttcaaaagtaacttcccttggttgttgggctgtaccgcgtcatcggatagggcttggcatattttgtaggggagaggtcatccccgtgtggagaagctctagggcacggtagttttccatatcatctgacacctcctggtcaggatattgcttgccccaaaaacaccgcccccataaacgagcgcaacgatagagtcggtccggatgaatagcctggtttccagattgcagcacgtattcggtgagcgaatctgccgttcccatcgaccgacagcccgagtcgatatatctagtccgtcagtatcgcttgtgcaaagaactgggcaaaacgtacattatccaaaggagcaactgttccggaatgaaggagacttgaggcgcggcttccgactggaccgtgtccatgaacatgagtacctcgtctacttctttaccctcaaagagtttagagtgcgattctaacagcgagcgcacaccgcggaggtgaagctggagatcctgcacagattgcccaaactgccactcgtaggatatcatcaggaacatactcgcaaagacaatctccaactcgggctgcgagaggggcttctcgcgtgtctcgaggagctgccggaattccttcactgcgaggccataatgatagcgcgcgtggtcctccgcagagggtcgacctggagaccgcacgagcagcccgtttcgatgcatgtcgttcgcagccaacgcgagtatcatgcgcatgacgaccttgctggaagcggcaggtccttggtataggtagctgaaaccgctccacgcccatgacttgatgtagtagaacacaacggacgaggacggaaagtattgaaaatatatctggtcctgctccatgagcatcagcgagttcgagcacgcgatatctgttccggatagtgacgggtataacggggtcggagctgtaaaggcggccggcagaaaagtccatatctcagggaatagagcttccgggcatagcatctgactgaattgagggctcagtgcaagggaattgaaatcgagaggcggttgttcagccgtactcgacgttgccgcagcggaagaacgttggccgtcgggctcgaacaggacggaatagggaccggggtatgcgatctcccccgcatacgcagcg

SEQ ID NO: 3809 - DNA, 3871 bp, Emericella nidulans
gaggctagtcagcttgagcagtgcgtcttcccctccacctatttttttataaccgtctaatgcgatatagggacatatccagcgtcgccgcaatggcatccctgaatatctcgcctatcaggcaaccaccccagcaaacggtagtttcagccccagtttcagtctctgccgcggcgtcagttccagcgccgacacattttaatccagtcaaaccccaacctcaacctccgtcgcaggcaatcccaccacagtcacaaccacaaccgcaaccgcaacccctgcggacacctctaacagcgccccagccaacacgcagcgttccgcaagtgacgccagggatgtggtcccctgaaatgggaatacgctttgggccggggggtacgacggcccagcagtctcagcaaacgtgggatccgtcgaaggggatgaagttctcatgaaccttaatacgctactaaacatatgctttgatgtaactaatggtgttagaccagtacatacttgcatacatacacgcacatatcctcacacttgataagagacacgtatgcgtgcctattcaagggccattgtctactacagacgcaaaagaatcatttgccatgcctttaataccgattatacaaagttgtttacatcttgtcgtcctcaatagtaaaccctcctcatgacagcagccgcctcagccgcctgctcccgcgcctgaatttccagatcctgtctcagagagagaaactgcaaccttgtcgtccacgtctcccactcccgaatcactatctcgctcagctgcggccaagtctcttccccgccttcaccattttcagacccaggtccgtcatccaaatctatcaaggaagccgacttcgcgttagacttcgcagtttgaacgctggcttgtgcgcgagcatataattcctcgcccatgatgattagccacagcgaaattgctgtcacggtcgtttcattcgctctccatccactgctacttacaacaccagagccaagcccaaagacagaatgatgcgccctcccaaaccaaagctcatgccctttcagcgcattccccggatccgggtgctccaacgtctcgacgatcatttcgacggccacgcgctcgccagcacccggtcgtaagaggagggactcttttgtcaggaaggagacaaaggagagaaggttgtaaaggtgtttctgggcgccgctgacgctgctgcgccttctttgcctggtggaacccgagcctgaagctgcagctgtagctaaagatgagttgacctccggtgtaaatatgtcctccacttcgctattggtagttcctgttcccgttatattcctacgcgtgtcgacgtcgatatcgatgagtgggcccatatctcgctgttcacagtatccagaagcacgagcgttatacccagttccaagcttatccccaaacaagcccccatccgtattcatcgccgctctcaacccgtcatagccaactttgtattcctgactaagatgcctgtgtacatcccggacaaactggagtaacctcttgtgcgctgggctcggcaggatcaggagttggtgtcgtgggatcggtatcgatttggcgcggaagagatctgctttctttcaggacagcggaaaggagggacgacgaggaggaccgtgtcgctggtctattgtgttagtagttcagttaaccttcacaattgtgttacgggatagatacagtaccgatttggattgcacaggagaggggtatttgatcggtcaggtggagaggaattatatccccgatctcaatctctggagaatccatggcaaagttttctcacttggttatcattcgagctcacgatacactgggtcggatgatgtggaggtcggaaagtaagtaaaatagttcatagatgtcatgacgtcagggtatataaggtaagtagagaatcgctcaaacacgaataaacaaaacaaacaggaactatgtatctacagctcgtatcgaatcgaccgagcggatttgtatgtgaagtgtatagtagaacatttctgctccatcttcctagcacccacacccgtatccatatccaatcccaatatgtatatcagaacccccgcttaatcgtactagtaaaaaacacaaagtggacaatcccatcatactcattccagtttacattcttgataacgctgcagccagctaacagcgcaataagatgcaaaacctgatcggatacttggttaggctgtcttttcgtctccaccagcacctgcagcagcacccgtgcccgcattcgccccagctccagcatccgtctccaacccctcgagaaagaaatctagctcactcggcccgccgggattatgttcgttttcagcaatctgctcaagaagactcagaaaagggtctttctcctcatttccgtttccatttccgcttgagcccggccctgctgtcgcagacgacggctgcgattgcgacgttgctgacggagactcgacaggaacagggacaggcactggcgtggattcgaaggggaatgttgcgtattgtatttgagattgtaggtatgtttggggttgggagtgcgaagtgaggtgggagtagtgcgttgtgctgccgagggtcggcgagaagaaggttgatgcgtttggaccgacggatccgcttgcaggagactggttgaggagttcgggatctgtgggaatctcgggccaggtggaggaagtgaaggagagggaatgtgaagctgaggctgaagaggtggacaggtggcgggcgtgtgtatgatggatgccgttcggttgagaggggaggattggtgtaggtcctgctgttggcaccgatgtcgatgcgtagaggagttgcgggtcaaggtcgattctgacaaacagaagattagctctacgctcttcaaaccaattctccatctccgcctaaaggggaagacggggctggcagggttaggctcactggtcctcatcaacaagccgcacatgactcccatcaacgccaggtccaccaccaagactgagacccggatacctatccagaaagtcctcgagatggaaaactggcgcaaagcgcaccggccttgccgccaacgaccgtacaagctctgcatgacaaacctccagcgtccgcaacagatcccgatggtggcggacaccagaccaaaacccgcctaaccagtctagctggctcatttcacgattcaaaaagtccggcgaggacgcaaaaacctcgccctcgcgacggccattataatgaacaccgtggatatgaactgtccctgcgacagtgaggcagtacgccaccagatcgggccactcgatgcgcggtgcgtgacgcgcgagctcaacgagctcggcgatggcgtttgcgtggctgaagcagagggtggtcgcctcgatttgccaactctggtgctggcctgtgccgcggagctcagcgaggtcgatgggaaggaaagggcggtagaggaggcagtgaacgagatggtagatgagttttgataggagcaagagtgtgctctcggggtggccgaagagggcctcaatcgaagcgaagagatcgtgagtgccggcggcccagagatcgagttcttgacggatcttggaaaggttggagagcgcgtgccaagggaaatgcgagtcgcctttgacgccaccggctgcgaggtagcggtgcgttacgccgagaatgcgcgagatgtcgacgagaagggaggagcatgctcccgaacctgcaccggaactggctgttttgcggcggtctgaggagtacgggatgttggggccgacagggttgaagatgtccccgggtcctgacctgagggatgagacgctgggagacgaacgaggatggaatggtcggcaatga

SEQ ID NO: 3810 - DNA, 1462 bp, Emericella nidulans
cccggacccaaaattgaaacaaatgaaagccggtatgcttgtaaagaaggatgggatctcaggacccaccgactgaaacctgaatgtccgaatgtggaccaccggcgaggacggccccaaggtactgaggtcgattagtattattcgggcctcaaaatccggtcccttacaaagcaggtgttgtatagagccgtcgcccgtgcccggtgcgtcggatatgccagctcggtcaccaggatcggcgaaggctgggcgagaaacgacgttgcaaagccgatcaggaatcgggcgacgatgaacatcggggtattttgcgacgcgccttgcaaagccgccccgataggaagcagggcaaacccaatatacaagaccttcttccttccgtatcggtctccgatccaggtggcggggaacaatccggcgaccttggcgatggggtaaacggcattcataaagcctagaagagcgcccgtgggtttgccgaaggtattccgccattgaggcaacgtctgcaggccgttcatcatggcgcctatggaacgtttagcgacggctcatcaggatggtacggggcaaggagtgtgaccatcgaagccaaccgcggaggcggatagcaagggaatcgcgagaaagaaattgagcagcagcagatgcttcgtgcgataccagggcctcgcgttgcttggcaacaccttggatgtcctgttagacggttttccacgccgagtcaccgagaacttaccgccagcaatccgggagagtacacctccctgtctgacccggatcggagaaaagcaggaaaacccattgtgttggacgcgtaacggccacagatgaactcaagtgtttttgggatcactcagatggacgttcggcttgatggcgggatggtgaggagttggaacagtcgtcgtcgtcgacggaattcccattcaatatatacggatcaccgaagacgcttcgccatgtgttgggacggatcctgactcgactcagaagcgtggcttgggactataaagcgtggcgggctatggggtgaagtcaaagctggaacacgtcgtttattccacctgaaagaatccggccatagtagaatgaagatgataggttgaaagcaagtatagtccgttcggtcgacagggagggtcctaaccacgcgccagacacaagaaatgttagtttcttcttcccccacaatctagactgcgggggaggcactagatccttggggaaactggggtttgcgaaggaaacataggttcgccacctcgtttcggtcggggacgatcccgatggaagatgaaggtagttgggtgaatcttgggcttggcgggggcgaagatgatatcgatcggggactctgccgataatgtggcggccaagacgtttagaaaaatccggggtctgcctcctggttttcctccaccggctatcaccaagctgaggcagtttagattggacc

SEQ ID NO: 3811 - DNA, 6115 bp, Emericella nidulans
  unsure (1)..(6115): unsure at all n locations
ccataccataccgtaccattgacttatagagatagaccggcggaactatgagtactggtcagggagttggctctcttgttctgactgatgcaattattgccaatacgcccaatggtattgtcacatctctctatgcagagaattccacttccctactgcttcagaacgtcggttttttcaacgtcgaaacagccgtcgtcgacagtgtgaaaaaccaaatcttgctcgcgggaggcaacgaggtcctaaaggactcgtggggctttggcaagattagtgacgccactggctctggatcctttgtgaatgggcaagacatcgccgtcatgaataggactgaagagatagtcggaacacaagcctatgtcaagcccaacctatacacgcgtcgtcgaccccaatacgaggatctctcaattgataacatcgtcaatgtcaagaaatatggtgttaaaggtgatggcagcactgatgacactgtcaccctgaactgggtcctttcgtttgctgccaatttatcttcggtggtctacttccctcatggtgtgtataagatcacggacacgctgaaagtaccggttggctctcgcattatgggccaggcttggcctcagatcatggcaacaggctctaaattcgaagatagcaacaatccccgtgctgccgtgaaggttggagatcctggagatgttggtattattgaaatacaggatatgttgtttacagtctccggtcccaccgcaggggctgtccttgttgagtggaacgtcgagcagtctagcaagggttcagcagctatgtgggactcgcatattcgtgtcgggggtgcccttgggtccaaacttcagaggcagcagtgtccgaagaaaacgggcagtgtaaacccagagtgcattgccgcttccctcttactgcacctcacaccaacttcaaatgcataccttgaaaatatctgggtatgggtggccgaccatgacttggatgcccctgagcaggaccagattgacgtgtactcagcccgtggtatcctgattgagagcaaattggcctggctctatgggactgcttcagagcacagtgttctgtaccagtatcagctgtcgggggcaaagaacatccttatggccatgatccagacagaatctccatattatcagccatcgccgcgagcgccaaaaccctttataccaggactattccccaatgatcccttgttcaatgattgcaaatcaaatccgctcaagtgcgctgtatcctgggcagttcgtatcgttgattcatcttctatatgggtgcttggaagtggcctctacagcttctactcggactactcgcaaaattgtcttgaaacaaatgattgccaacagagggactttgagatcgagcaaagcttcaatatctgggtctataatctctgcacaagggcaattgtcgagatggtatctcccttccggggtgtccctacttacgcccgtgataacgttaatggattgctttcgtccattctagcctggctaggtggagctgagcagaccgcgggtgaacgggagttcctaggattcagtatttacaccatggcgagtttagaagagattgatgttccttcagcctgcaagacagccctaacagaacgaatcaagtgcgatccttacctaacctcaatgatgcagctcaaataccgcgggtcgttggacaatgacacgttgactgattccatctgcaagcctagctgcggaacgagcttgcagcagtggttcaactctgtggaacaaaactgtgctggatataacctgactgcgggctctccaccagtgatgtttggagcacggatgtgggctggttacaatgaaacttgtagcaaggatatgagcactggagaatattgcaattgtacgtcttttcataccactccaacgtcgatgcgcgcactaacatttaagggcagctgtcatcgacgacttcactattgtggactccaccgcgcagatgccgaaagacgaattatgctcctactgctatgttgagcgactccagatgatgcagcgaagcccctactctgcttatgacaaatactataagtcagagctcgaattaatcaatgagaaatgcggcctttcaggacccacagagattcttgaaatccccatagagagccctgagacagaagacgccatatgtctgtctgatacgacatatacaacagtcgacggagatacttgcacctctatagccgcggcaaacagtatatcctcggccgccctctatatgggcaaccaagagctcattcgctggtgttcatccatcaaagcaggcatcgagctatgcttaccactccagtgcgcgaaaacctacaagctccaaccatctgatacctgcaccagcatcgagtacgcctttggccttaggaacggcgatgtccgcaagtacaacccctgggtctcctacgactgtgacaacctccacattgccacccagatctacggtactatcctttgtctctccccgcaggggggtgaccacaaccccggtaaaacgggcaggtcctccaacgcgccctcgacgtctgatggccatgtcaagcttgctatcccgccccctgcaaatgcgacgctggcagaggggaccaccaaaaagtgcgggagatggcatgaggctgttgcaggggagagctgtgtagccatctgcgtgcagaatatgattacccacgacctgtttgtagacgtcaacccgtcactggatgcgacggattgtacggccagcttgcaagctgggaagacgtattgcgcggggccgacgtacgggtggaattcgcttgagtctgacgatgattattactgaacctctctgtttggacatagaggctagaaaatatgcagccgctgtggaagggttcacgttcatggatgcgcagccatgactggctcctgccgaagccaagtgcagcgcaataagaaatcatacttctatattattccaacctcttaaattgtgcagttgctttttcaactgtgcagcatgtaggcttcgtacttttattgtattcagaatcgatacatggcctaaagtatccctgcctgggctgggatatagataccagaaggtctgtcttcatttactataactaaagtaagaccattaatagcggtggcacttgccatcttgctacgattctgataaatgcacccaggaggatgaatttaactatactgaatgtgtactgctactgggaaaagatattcttgcatcgcggagggaccttgtcatactgatttcattagccaccacgaacgctgtgatacactagtacttgggatttctttcaggctcacggacactcatggttcgtgcccgcttgatgtttaacatgtgcactgtctgcggctatactcgtcctcgtgatgttgacttgggaacggcgaagcaatccatcctccaacctgataatgatactgcagcgattattcgtaatttgtctaaccttttatctttttattataacaaatattcgcccttaaaatattaatcttcacgttaatctcatgacagcgtctatctgttttcatagtaatttatatcttgtactgcaattccagggcagacacaatcatgtagctagacggaagccctggacagcataaaggagctgaatgttacgattccctcgtggccgccagtgtggtgtggtattcgagggggataggtagagttgggtaggtagcggatgtttagggttttctgaatcttcccggcaatgacctcggggcgtgagagagatggtagctggtaagtgcggcacataaatgttaattgcgtgtggagataccaggccttctggaaaggtagtgggtagggtatcaaatatatatttgtggagccctcattatcatggccctaggatcatcggtacgagcgcggtgatgattacgttgaacgtagaacgtgaaacgataatttggattgcaggagtacgagatgtttcagtaaccagagggatatacaatttcttgcttggttatccaagtcatatccttcctcacctgttttttgaggtcttggatgtttgtataatatgtatgcacatatagtgcccgtatcctatatatatcaccccaagttagggctaatagtggtaattttgatatatatcctgtccaaatgtgatgttgttgtacgagggatcagccggtccatcctcatttctccaaattgtcgtcttgaggctgagttgataccactaatagctcggccggtgagactgggccgtgcacaagcagggtcttcaatgacgcttcaaacgcctccatcctgtttgaaatctagtctgattgaaacgaggcaggacatgagcttccgtgttaaaaaccacgtcgctaagtggtagaaagtccttcggcgaaaaaagaaggtataaatacttcaatgtctcggcctacaagatcagtatatttagagcttaactgcaaacatcgaacgattttccggattgggagtgtggtgtcttactagccaaaaactttccatattatctcgctgtggtgccggaacctttgtgacgtcttgtaatgatgtgtatcccccattatcgcctactgccgtgtgcattctaaacgccttgaaaatcttccagccccattttcggtagagagggtcgttcgttattcggtacattaagaacagactttcaaccgtctctggtcgctgcaagttatgtgtgtcttgaggtttaataataaggtctcgtttccacgaagcttcgtcattcttgcttggaggtcgtatagatgacccgaaagtagatcgaaggtcggcttcatcggccctgaaccaagcaatttctggggacaggccggtggcggtaaccgcgtacattgcccaacacgtcttcatgagctcccgagctagttgcatctgctgttccttttggggagtccagctaggcagcttgcgtgcttccttctcggttagcccttcagtagcgccgagtgcgattgttccggggaggaagcaaacgagatgatccatcttgggcgataattgcccaccaattccctgtggaagctcggcaatgaactggagtttcgaatgcttggtcgaagtaaccaggggtttctgaataccggtcaacgcctnctcccacatttcacggtanacgggctcctgtccagaagtctgtaggtattgtttaatcaagtactctggattcagatgagcttctgtctctagtaaacgttaattgccacgcagggtataccgtaataagaatctccgcgactgccaagacggatttcctggtgtctgaaccgtccagtgtctggatggataaaaatgggtaggaggccgtccggtctttgctgatcatcgacaaccttcataacttgctcagctttccgccagaaaacctccttaccagtgagatgagcgagatacttcatctctagctgaacactggtggcctcggcagttgaagatgctccaccatctgcgtgcgagggaagtccttgccgggtcccaatgttgacactggcgtacggtattcctgatctagactcatacgcgccgagcagccgatctgccaaatcgacggctttggacagataaatatagtcccgttgagacgagacatcatgaagcacagtcgacagatagtgggcagataggagtcctccaagcatccggattgttgtctcaaaagtgttcacatcctgatcctggccataagtcaggccacggttaagccattttcgcgcatccgagagttgactcgtcagatttattatcatcagagtatccaagctgtcaacgataatccaccctaagccgctggggcttatctgcgaaccaagcttggagattggatgaaaacggccctgtcctgattccgaaataacaactcaatgacggtccgcgttaaggtgccgtccggaccgcgaggagtgggttagaaatgcgacaacagcaaaaaaaaaaaaataatattaaattgaaaagaaccgagcttagctgagactactacccagctttttgcgagcgtccactgccagaaaggtttaccttttcgggctctccatgtggttttgatcctgaaatcaaagccttcacgcttttgttcgatcag

SEQ ID NO: 3812 - DNA, 1589 bp, Emericella nidulans
atgctacagttcaatttcggagctcatcgagcacttctctttttttgttcttcttttgtcctctttcccctctcttattagagcatagtcttacatcatcaaccgagccagtagcttgtgaaaaccatccagcaactgcgctaggcagccggatagtcctttttgacaaaggcgtctcggaaaaacacggatatcttacgcagcgcggtcacgttactttgctgcctttcgtcaagcgaagggttaagcgcagcaacagctcaatgtccgttctcgatagacaactctgggaatttccatttagccgaatgtccgattttttgtagcttcaagggccgtagagtgaataacggtaaggaatggcatgtacggtcatattcagcactgaataggtatttcaggtagttaacaagtacaacagaacgtgaataaatccaaatatcataaatgagggcatagcgtccagtcggccagagccagctggcaatgaggcaacggaaaacaaagtggtcaaaaataggcaagttcgtggccgactcgaagggctaatgaggtctgcctaacttcttggtatgccgggcagctatggagtatttgcacatggaatactatgcagcaaaggatagctagtgactccatatgtagagtacacgatcatattggcttaagtagaaggtcgctcggttctcgtgaaatcggctaaacgctacgctgctcatagatacatcttgctcctgacccaccgctgtggcatgatgatgctctttaagagataagtaaacataggtcatcatttgtcaattggttctctgtctatattgcatgtacattgaccgaacctgcactcgctaaagcccgtatctgttatgtagaaatacctcgcgcgctatccaatgggcagcaacatagtcacactgcgcacctgttcttgagcgttctgagaacttctgggaagttatttccaagaacatgcatttcagagacctggccactacggccagtctctaggaatattctgttgctgaacaaagttgagacaagaaactaattgatagagctggagaataaaccctcgcttatgatgttaattaaagctttaccctgctgtggtatccaagattatgaacaagaagatacggccatgaggctgcccaacaagtcacagaaacggtttatgtacatcgttaatccccgccgctaatgactccgaattcaacaaaggaacatcattgatggaagtagtggtggtggtaatagtggtagagtgctcacaggcgcaaccttgagcgaggctgaaacggtgcgaggcgcaaagacatacggctcataagagaagcttcttagaggttgttgccgagggtagcaataatgctgccaacggaagaaccgacgctggagaggccgagaccgcccaggaggtgggcaacggagggggcgagcttgatgagaagagccttgccgtctgagccaacgacagtaaggagctcgtcagtgggggcaccggtgtggttgacgagttcaccgatagagctggcttcctcaacgacctcaccaatgggctcacccacggtagggaggttaaggccgga

SEQ ID NO: 3813 - DNA, 1539 bp, Emericella nidulans
tcggtttttacaaccatgaccctgcttagtactggcacatgtagactatcggttcaccgtcaaattaagcgatgccagaaaagtctgacttcctgtcttcgccttagaaaaccacccgttggtttgtctctcttccggccagagaaagccacagaatcaagaaaaacccgagaagttgtctatgtattcgtcctgcgtcagagatttcgatcaccacctgccgctcaagctgcaaacgtttcgctctatatcgaaaccttgtagtttctactcaaagtcctgtggctgaaatctcgtaaaggctctcctgccttttcttcgatctacttctagcaattctgtctagacaaccgccaccatttcaccaccaagaattaatcgagtgactcgcggcgtatgtcttgtctcttgaagaattctttcatccaggttccctcccgcttcttcaatcgcctctcgtcgcctctttgaatcctctgaaacattaattctcgtctctcgtctacaacaactgtcatcatggctcccaacaacatcaacattcgtcgtgatgtttccgatcctttctaccgttacaagatggagcccttgcagtctaagattgaaggcaagggtaacggtattaagactgttatcgtcaacttgaactcggttgctgggtctttgagccgtccacctgcctatgttatcaagtactttgggttcgaacttggtgcccaggccaacgctaaacctaccgatgaccgctggatcatcaacggcgctcatgattcccggaagctacaagactatcttgacggattcattaccaaatttgttctctgcaagaagtgcaagaacccggagaccgatgtcatcatcaaggacgagaaaattatcctggactgcaaggcttgtggtcagcgttcggatgttgattcccgcctcaaactcagcaccttcattcttcgcaacaacacctccggcaagggcaagaaggataaatccaccaagaagactcgccgcgagaggaacaaggaaaaggaggctgcgaatggagaaaacaatgggagcccaggcgagacaactcagacaatggcgatgagaatgaagatggcgcactcgaagccggcagcgacgatgagcttactcgtcgcattaacactgccgctcagggtattgaagcggaggatgaaatcgaggacgacaactggaatgttgacgtctcggaagaggctgtgaaggctcgtgccaaggagctcccggacgacctgaagcgcgctcttgctcttgacgagggagacgacgagggtgccgatggccctacagcttatgatgaactcggtagctgggttctggacactgctactgagaagggcggtatctctaaggtcgaggatgtcgagatctatttgaaggccaaggagctcggtatcgaaaccaagcacaagactttggcagttcttgctcaaaccatctttgatgagaagattgccaagcaggtcgatgccgcgcccctctgctcaagaagatgatcacttctgagcgccacgagaaggc

SEQ ID NO: 3814 - DNA, 3456 bp, Emericella nidulans
tcacagtgctcagtgcagatagtcagctcagtcacagcggtaggcggtgacagatactccgagacaaaggacagactgtatgcctttcggagtaggaaagggagcgaatacaggacggtggccgtgacagaggacaaccagacgacagggaccccacccgcatcagggtgcggaacctagtggagccactgcgtcattgtgcatggcaatcttgcgcattattggcgggaacttttgtccatgaaccaacttccttgcggcgtgcgtgcctggccagagcccagaacagcgcccaggctccgcctttcgccgtcttcgccctgtttcccaggcaggccctagagggccaagtcccgtggtcgaggttgcatggttggagactggatagactacgtatgtttccgtaattcagccatctgggcctcccgaatgcgccgactgagtttcgagaacacaatcagaccatttagttccttccccacactgtttcatacagatggatattgccggaacagtccagccgtgtcgcgggatggcttcattatccacgtggtgatcaccctaactagatttactgcagtctaatgcgcaatgatttactacggagtagatctctgcaatacccaagcgcaaccgacatggtagattcgccgtctagtgtccaatgatttacatttctgcaatagccaagtccagaacggcaggttctactggagcgccgggccggatccagcagtatgtaatcaggcgctgaatggcgtgacggagagtagggcttggtgcagcgtggctgacgttaattctgctgccacccaacccagctgcagacttggggacgttgcatagatccggcagaggggcaaacggtggatttttgatagtcttggttgagtttcgcagattggcggcaatagtcacataatgagagttccaagacaggggcgagagaggccttgtccgttgaggtgagttgctcgatcttggtctatacaagatcttgattatatacaagatctatattagattgtggcttgcttgaatagtttgaagaatgcgctgtaggcagccagtgctctgtttcaggatagcaagtagactccattgccaagtagattctaaccccgacaaacaccgttctagtagctcatactatggctcagacaaaagtgctcaataattggtcatgtttggattgcgccgatacggcacgataactggacctaaaaaacagaaattggccacttccctcgtattcaggatcatgctcaaaggagatcgcttctattggagggatccaaccccgcagggtcaccagccgaacagcggcgggcagttgctgctgaatctcgaatctgtacacctgggtagacttgttggccaagctcttggtcgatcttgcttacagagcctcccgaactgccttccataccacgtatagacggtttgtttccaaaccctaaatgccaagacacgctattccatattcagttagaactatattcaaggactgtcttgctgtacaactattatacctgaaacaaggattacctgagtatggtgtattttaacgatgtgttcttacagcactgaaacaaccacgactagcataagctccccaagattgagagccatcgacccagaaacaccccaaaatgcgagaatgtcgaacttggcagcacagagttattgttcagatgatacgcagcaaaccaagccaattccatcacaaattgccaatgtagtgaattctccgccactgatagaagatgcggttgttcggcagcgccaataccccaagcagtgtcagttgacggtcaccgttatttctggatgtttgatgccttgtaagtctccttattctggacctatacaagggagaaacgggtgattactgggatgagtttagtgtattgccgtcacaattcagctcgacctgctctttcttgcgctggctgaacaaagcaggcccatgtacgtaacaggggagacccgcgtcagaagatatggtgggccagtcaggtattgacatgtctctcatacccgtactcacgcgtgtgagccctcgatgccaccaaggtttgtgttgcttgtactgtacccatagataagtattaaaatatagatagaaatcgagctacataatggaaagcaggtcctggttaacgactgtaaccatccaatatagattatgtaaaaacagaaccattaaattatcctcttcattataccaggcattaatgctccgttgcatggaatcaaccaaaaagacgcagctacaaggtctattcaggtattgaatactctttaactatcctaaagcattgcacgcgtgcattgtctccgacccattcatctacatcgcgtaagaaacggcgggcgtttccctgttcgatcctgctgggcgaatatccagagtctggatcttcgaaatctcaaggtctagggattgtccaaaatcactagacaaattcgaaatgcagctttatgcctaggttgtgcgagactgcggtcgtcgcagtattcccttactgctgcctcacgacggcgaataataacatgttggaatacatacaggccatccgagctattgagaagcttcaactctgatgggtgttcaaacatggacccgccatgaatgtgtgccaaaacgtcaaaggaatattaatactgactttggccgcctcgagctctggaatctccaactcagacagccgatatctggcggcactgtaatgatacacggcataaccgctgaagagcttggtgacagcgccatgcagatcttttgagcccacgtcggcgagggttgctcttgtgttggccacacatgcattcaacgacgaggctgtttcgcgcagtgattccatcggcgtgtggtcgtttgtccttgcatagctcactgtatagttgaacctttctccaccgaggatagactccttgcagtaagaaagcaggtcattggcgaagttgttgtaacgcaccaggcccgggatgacgggaaggtagaccggtataaacatactcttcggaaaaagagattcgggaaaagcgaagaaagcgtatgattctgccatgccagtcttccgtctaaggaaatacggaaaacccggcgccatcagcgccagggtgatcctgcccgcatactcagtctcgaagaactttatatatagattaaatagaacaagaccagcacctataaagctaatataaataatttttatttaaaaaaaattattataaacttataaaaaggcctccacacacgcactgatgaactcgataatggccttccggatcatatcactcgcaaaaggcccatagaatcgcgggataacatcggcgatgaaccgcagcatgtctcgtagcaggggttcggctgggtctgaacaaccacatagccgagctaagaatgtccagagatcgtccatactgacagtggtggtgtcataaaataag

SEQ ID NO: 3815 - DNA, 2260 bp, Emericella nidulans
cagtgggggttaagaggatatgcgggcagcagcttgcacaagaagtccttcccagtaggccctctccgatgccgacccctggtagctacagtagtgcctgacacccaatgactgacgctgctactcttaccaccgagagatacaccctggcacaggataagggggttgtgcgctagattactccagatcactatctcaatgatgatgcggaggacagaaaaccagactcgtgcagatcgatcctcgtagccatggaggtaggcagcagcacagattgggcctttctcaaggtcgaagtcagactgatatttctggagttgctggtcaatagccgcgcttccgtcgacatccttgacgttcaacactcggagctgtactggagaaatgtcatctgcgaagcattgcaccgtccttccatctatttgcctcaaccgcattctgaaggcgtcatgatacagctgcaattcggcgactgctgtgctcagagtagtcacgtccagctcaggggtccgtaggtagaaggtgtgattccaatggcttgggtgctgtagcgattttgataagaaccaagtttggatcggtagcagaggcgcatcaccgagtactgtttgctgctctgcttggaattgaggaacattgtgtggaacgagtttcaccataacgttgtcatgaataccacgaatggtagggtggtcgaaaatatctcgaacagtgacctttcggccgatctggtggtggatttgggctgcgagatgcaaagcagtaatactgtctccgcctaacctaaacagatcatcatcaataccgcatcgctctgttcctagtgctgatgcccataatctacacaagtcggcctccaggacatgggttggggggttgtacgatatttgatgttgagggttgccgatatcaggcagctttcgaacgtcaagtttcccgttgattgtcactggacgtccaccttctagacggaatagatatttagggaccatatatgcggtaagcttgctttttatgtgggcgaggatacttgaatcggagaccgtctcggtgtcaggggtataatatccgaccaggaatttggctatcctggagtaagcatcggtgttctcatacttggccactactgcacattctcgaacgccaggacaggaagcaagcacgttctgaacttctgacggctcaatacggtatcctcttatcttgacctggagatcagctcttccaagatattctagatatggctggtgctgacggtcaagccggcatcgaaacaggtcgccagttctatagagccgaggatagcttccggaagcaatatcttgctctgtttggaatggattctggataaaacggtcacctgttagaacaggctggttgagatagccacgggccacacaatcaccagcgagatacagctctccgactgcgttcataggaactggctgagtggcgtggttaagaagatatgccctagtgcctggtagcagctctcgcagagcattttcgaattgggattgcgcactgaactcgctgactatgttgtataccgtggtctccgtaattccatatgcgttgtagatcgggccgcggaatccggagcgcaacttattaaactgcgcagcatggagttgctcaccagctgcagttacgacctgtagatgattgaggcgtgctaggtcaatttgctgcaacagggatggtgtaccgctcaaatatgagaggcgttgaccgttggctgttatgtagaattcatcatccgcaacgaattctccttccgggatgatcaacttgtggccgctcataattgataagaccaactgctcgatagagaaatcaaacacgtaattggataggaagagcacagcatggtattcattgcattcaatgccaaagtaccgcttcctaagcgcatcacgcaagtgaagaactccaccttgttcgaccagaacaccctttggcttgccggaggtgccagatgtgaaaattatatatgccagattttttattcccgcaatgttgggcaagttatgagttgcctgattattgaccatattcgagaccttgggcgagtcaattgcaagtattgttgacgtctggcttccccatgcagaggcgtaccgtgactctgtaatcagaatctttgcttgaactacctccgaaatgcactggacacgctccttgggatatgatggatccaaaggcacatatgcgctaccggttttccagattgcgaggatgcaaataatcatgtcgatgc

SEQ ID NO: 3816 - DNA, 4795 bp, Emericella nidulans
taatgattgtattctacagaaacagaggtcttcaatgttggcggttgcgtgtgactgctgcaggctccgaggcagtctctcgagcagtggcgagcgcttggcaaacgcctcatcggccagggcattggtaagcctttgagcaagtctttcgtcctcgttgcgatctgcggtactcggctcaagatcgaacttgcttttcgtctcgtgcaagatgttaatctggtcgagcgaagggatcctatccgagaattcatcgccgggctcttgaggctttttaccatccagcgcagcgaacggatctgtggatgctccccggaagggcgatggacttggacgtgcggagttgtgttgagaggcatcaggtctcgttggccgcccgcgacgcatcggagcaatctcaggaatgctaatctgagtctcctggataggcggagaaaatgcggcacctacttgcggtgcttctgttggggatggcgggagctcctggtatcggcgtgcttccgaagtcgagcgatgggcatagatctgacattgtcagcaagcggaaatatacggatatcttggataagcgtacatctttgatcggcacttctcttccttgcatttggcagacttcacgcagaacctggtatatatttgggcgcttttgcgcgctctcctgaagcatcgaggctgtagggcattagtacgcagtggagatcatgcaatctagacggtcactcacagattagcattttcagccggctcgaaaatggaggatatgaagggaacttgtaggaagcattgagaatcgccatctgtccaacctcctcaaatggtgtggtgtagtagcagagcttgtacaggaggactcccagcgcccagatatcactcttctcatcaatcggttgtttgcgataaacgtcaatcatctccggacttcgatattgtaaggttgtatgtcgttgtacatcgtcctcaatcaagcgaccttctgcagccgaggtagcggcagggcgcggcggagcagcagacccgaaatcacagaccttgtaaataacggaattcccatgacgagagatgagaacattttccaccttcaaatctcgatgcagtagaggaggcttaaggtaatgcatacaagcaacaccttcggccacatcggaaaagatcttgataatctctggttccgtcaaacggttttgcagccgcgtattcatgaaatcaatcaatcctccacccgcacagtattccatcagaaggaacacttcgtatccgccggctttgagctgggacgcatgggagtcaatgtacttgacaatgtggcggtggcctttcagcttcttcattgtctcgacctcggtgcgcatgttggcaagtgcaatcttatctggaacggccactcgcttcaaaaccgccttatcggagccatcgacgggctgcgaaagacgtacgacgtagacatgggcgaatccaccttcggataggtatttctcaacgacgactcggtggctaccaacctggactttggtgttgggcaaaaatgtcccagccggtgcattcaatgcagcaaccgggctgtatgaagttacaggccgaggttgggcggcatggctctggtagggctgggaatgataggaggccatggtggggagagagaggaaaggatgaaccccgtggggaagagggagacgggattatcttaagggcgaagcgactaccgttgctgcatagaggagacgaagaacggaacctggcccaggacgagcgatattaaagcgatccggagcaggcagataattcacgagaggccagctgtcggcggggaggagggcttgacgagggtgaggcggtgacgttgggggcggtgcctgacaacccccaggggtctgctaacgggcaagaggcgaaaaaaaggaaaacaaagacgcaagcgaaggaatcaaagagatgacacctaacgtcaagaccaaagagatgggcaaaatctcagttctggacgaagcggtgttgcgggatttgcagttcagcctccaatgtgtgcctcaggtacagaggtacgcaggtcatgttacatgcaccaggaggttgacgttttgttgcatatcagtagtacaacaacctgctaagatggttacagtataaacgcggagtaaacatgcgccatctacatatatcccactatatctggcactttgtcatgggtcacagcatcaaggtattggtgtactgtgagacatcagcgtgcttcccagtcatggggtgtctcggaatgatgtcacatatcacaagtccgagtcatgcaaagttctcctggagatgctttatattagagtgatgaagctcctccatgagtagaacatcacgagatgaggctgaagattcactgtatgccagagtcatcctcctgccagggccataccggttccatttcaccttccgacgatcccccaaaaattgtggcctgaggcaacaagtgcgctagaaagtactaacttatgtaatcatcacaacccttcacactaaaccgagaacggacaaatcacaacaaacatgcgattgcatagaaaccataatgcaagtgttttctccagggctctgagccaggagaagatggtaacgtactctgactgcagagtaggacagaattaatagaggcatgctggccccgaggatatgattcgacgtctgtttaaagttgctggttaaactaccgtttggaatgctcgggtggtagcaaagctgattgaaggctcattcacgaagcctccagctcgataaggtgctgaaaatagatctgaagagctgaaatccccccatatacaactagttctcagtagcttcattccatgaggagcatagcttttgtttataaacaatgttgcatggttactttgcgagctgaaacagctgcagctatccgaaaagaaaacatgcctaatttagtttcatgggagaacagaatccttctaccgcctatttctttcaacaggtgaccggcattgggcaatcggttggatgctgtcgtggccacttgggcgttagcgctgatcctgcatctgctcttctctcgcaactgcagttgttagtcgttgccgccttcgccttcttcccatcccatcccacttctctctcaccccttctcgtttgtttttatctctcccacatcttctctattattccccattattatatattcttagatcagcttctaatcctcattattactaccgtctatagaatcaactaccaaaatctctgtccacgctgacaccacccagatcaagcgctgaggcacgactcagcgctcttcctatgccgcggcgaatatgattattcccctaccagttacgtgccagaacctgtcgaagtcgaaataatcacggtgagcggaggccaggccagcacggtacagctgaatcgcaacctaaatcaacgctgaagtcaagacctcatctgctattattcgtactctgtactgtgagcgatggacgacggcccgccgcctccccctcctccccatggcgagaagccaaatacaacccacggcgagtaccgaaaagcatcagatctcccgcaaggaaactatgatatcttcataatacctccccactcagcggggtctgggttcctctatctcccatccttacaatgccagcgaaatagcttcattgctggcgctgcctgcgcgctcgtggcagtctacatctgggtgacactaactccaatgataaagctctggtatgcgacaacagtggccagtggaggaggcgccggtattgctattctcgctgttggcgttgtagggctcgcagggtgggcgttcggcaattatcaggctggcagcggtggaatacctcggccagggcctggatttgggggcaactggtctggatctagtggaccaggcgcatctggccggaatgcttcaggtggtagtggaacgaactactcaaggggagggaactttgagggtcaagctggaggagcacatcaacagggtaattacagcggtcacttcgctggtgggcccccaccaggaaatcagtattcgggaaatcagtataggactaataatgagccgccaccgcagactaccactggtcctaatggaaacaccaacactgctcctggtcctaccccaggcccgaagcctggtggtgctggtaccaagccggcgagttctggccctcaaagcgaaagcaaaccacaaactgcggaagactgggagaaggctcgagaggaaacgagacgaaaagaggatctgaggcgaaagatggaggagtttaagcggaaacgagaagcggaagctcgcgaaaaggagaggcagcgggagaaggagagaatggaacaggaactgcgtgagcgcagagaacagctggagagagaaatggcggccgcgcgagaagcagccgctagagaagcaaagctacaagcagagaaggaagcagcggagcttcgtgcgcggctagagcgcgaggcagctgaagcgaaacttaaggcggagaaaatcgccgcccaggctcgacaaagggaaatagaggctcgaatgcgcgctgcacgagaggcagcggaggcaaaggccaagagagaaaaagaggaggcggaagcaaaggctaagaaggagaaagaggaggcggaagcaaaagccaaggccgagagagaggccgcagagaaggaagcggctgcaaaggcagctgcaaagaaagaagctgacgccaaatttgcggctcttaaagaagcggcggcgaagaaatatgctgagaagaaggcaagggatgcacaggaagcagccgcaaaagaggctgcggcgaca

SEQ ID NO: 3817 - DNA, 4333 bp, Emericella nidulans
tgcggagtctgcgggttcgaccgtaggacgaatttgccgcctcccagcgaatgacatggaaccatccccaggcaccgtctcttgctgcagcgcgaatttcgtttctttttttctcgcacccggcctcgtaatgcgcacacaaaaaattgggacaagaatgcaattgggggctcaccacttactgcaggttctgacccaaggttgaatggagctgagaaccccaatgcagcaatggaactgaagagcgagaggctgagttacggtgctggtgctgagggaattactgggagttcgagcgatcagcgatgccttatactccgtgctaccgtatgaccaggcaggcaggtatgagacacttagcaacccaacggtcttcgtgcaggggatcaagggaaagaaattgcagtcccgcgggcagcgactgactgcgaggatcggagccgacaaccacagaccgcccgtgactcagaccaccaagatcaccaccttcttaaccaaggaataatatgggctacggtggattttctcaggcgcttcgcttgctccgttcagccattcgattatcagattagatcttgtcccctcgacgaccccccttctaacccccatgctggcgtcttccagcgaatagagtcgacgcctcgttccggtgtggatagagcctaagagcccagatgcagcacccatcctgcgggccttttcattatcagatcttttagctaatgtaatttttttcaagggggattcttttagtcaacactggctctgttattctgttatttatcgtatggtccactcgggcgatctaaacattccgcgacctcgccttttactgcctaggctgtggcttggagcgctgtacaaagggcactcgtcgagcacgacgagcgcaccgacactgacgaccgttgggggcggcaaagaccagatgaagagacaggtatgataggttcattatagaatgctagacaaacagcacagtagcacatgagaagggaaagtcgagtagcaagagacaaaaaaaagcaacaaacaccagagtatcatttacatcttcgccgtcgacgagtcgtgtggcatagcatagcatagcccgcatctgaagagccaaatcaattcatcgcgtccatggcctgctaaaataaggcttattcgtgacaacagcaggaatcgacgcccaataaaaagcacacaaggtattagaggctgaaaacaaagctgcaacgatattcgcacaggtcccgggtcgggctggataacatgaccgtcgttgaagtgtcgtagcttagcgcgtggttgtaacaactggcaagaaacagcagttagcattgcgagcaagttttcctactttccagtagtgcggaactcaggtgggtcttaccagcagggacgatgatcaccacaagcaagaggataatgcaaataatcagacaaacacgcatcttcatgtccttccaccacatttgcttccgcacgcggttggcacctctgcggaacccttgagctgacacagccaagttgtcggtcttatcctgcaacgaatctagacgttcaccacgctcggagaccttgaaaatattcgagcgcatagtatcgacggtctcttggattttctacaaaaaatagaattagcaaacattgctgcgataagatatggggacagcgaaagcgaagcaaagcagcataacagcacaacaacagcaattctcatatacatggtcggaaccggtcgcagatagtccagaaaccgacacgctggaaactacgtgtccggaatcgacggatcggaaccgaaacatgcccagaaaagatgatttgcaaccaagcaaaagactcacccggtcgatttcccgtgtccggttgtcgccattctgtgcagtgctgccgctggcggcgttggagccggaaggaatataaggatcgtacggttgctcagacatgatgctctgtgcgaagagcttgatgtagaatcgagatgtagaatcgagatgctaacttgtagcgtgagaacgatcacaaacgatcacaagaccacgtcgcagattatcgggtcgaaagtccgctggcggtgggcgtaagaagaaagcgtcgcacaagtatcgagatatgacgaggagggggagatatgcagagaacgtgattcacgggttgtggaagaagaggaggatggcgataagacgggagtggaagctgaaagtgaatgggatgggaagaatgggaggctgagcgggagagaaagatggcttggtggttgcgttgcgttgctggagatgacagggccacaggcagttccaatcgtttcgggcggttcgtcggggtggcaacacgtgacgcttgggccacggccacagagctgaagttgttattcttaggtcttgggataggcaccgatcaataattctgtctgcggggccaatcactgatggcttcaggaatagggaatactagattgcggctggtgtcaaaaacggaagagtttcaaagcaacgacagccttatcgatttaccacctgtaaagggggcgggcactcaggcgccctgtcattgtttgagtaatccgagtctgtccctgttacaggtcttaacatccatgctccggctgcttacgggtgtcacagaaccttgttaactcctctcagtcatgactacatagctaatttaccctggtttacccaataataggcctagataactatacgcggctctgagttgcatttttgttggagaagcggcaacgttgatatatgaacataaaaaaacttgctgtaacggagggcaatttgtagtatatttgtacaccctatactgcatatttggatggacccttgagaggccattaccgttattttcggaagtctcgtggggctcagagagcgctattccactaggtcgctatatagactggttcgcttaaggaagggaaggagaaggggtagctgctgagctacagcttcctaaaactgcaagcaaagagcaaccagaaaggttgggcgtgaagtttaagattatttattgatccatcacttttaacagagtgatgccgttttcgcggcctggttgatttaccactgtttagtttaagtgagccggcaattcatgatggtcgtgcgtaattcaagaggagagcttgagttaggtaagagtcggtcaatgtcaggggaacactcacaggttcaggcaactgggcaacgcttgtatttgattagttatcatgagaatgacggggctgtctgggtaagagcagccagagaccggttatggtgacaagaagagccagcgcgaaaggctgcaaactggatacaccatgtggctgcgcgatagcaccggcgacgaagggtagtctgataggagttttgagtcagtaattttgaaacaatggatctcgcaggggtcagcattgaattagagaagagtcttacatcgcgccaccactgccccccaaagcagagacgatgccaatactcggggtatgtaaatgcttcgggagcagtttcgctgctactgtaactgcggcagggaagagagggccggtaaagaatccgattagtgatactgccacagcggagacaacgaagtgggggacgagccaaaacaccagttcgagggcaatagctaggacaagatatatgatcacggcaagtcgctcaccaaaggcctcatttgcaaaagcaagcacaatccggccaattgtgatgccggcccagaacccagtagggacaagaccggaggccacagcaccgccgtcgcgaacctgcatcatgaagtcgacaatccaaccgccaacggacactacggttgaattcatcagtatatagtgatatgaataggccggccgtgataccctctactcccatataagcaaagaggaagaaagcgagaatccaagtaacccgattcttgatggcttcagtcgttcgcgagtcccttgtcgagcctgacactctggggttgttgatcctaaaccgctccgcattttcaggccagaacaaaggcacgcaggtgatgagttccagagcagagccgccaactagagtcaggtagaatctagaccacttcagaccatggtcgatcatcgccgttgagatagctggacttatagttgctctggttgcatcgatatcagcgactcaatgcctcggcagcttcggctttgacaacacacaccctaacccgtaacatgcatgcatgagccccatcaatgtactggcgctcaccatgtcgccaacccatgcattccagcccgcgtcaagtaggccattagcgagcccaacgaagcgtaagccaccaacagtaccggaaatcgcggaaagaatgccataacgatgaatagaat

SEQ ID NO: 3818 - DNA, 2950 bp, Emericella nidulans
agactcggcatcatctcttgccgacatcgaggtgacggtcttggtgggggatataacaggcagttgttgtgccgtatcgaggggtataatgcctgggcaagagtctggaaccatatcaccagtatcaagggcgtagatggagtcattggtccaattgagcaagggattgccttgtaagagtaaactctcatgcagccaaggccatgaagtggtagtgcaaggcaaagagtccgtccagctgaagtccatctcggccaaatggtctatattgtccatgtcgggcaacggatcctcggaccccaagaagggaattatcggagcatcaacattcgagactggtgagtgaagcatggctggcgctgctgttatggaagtttcgacccttaccctcgagaaatcttgctcctggtcgccgtcttccttatcgtcctctccagctgaccctccatcatcggaatgagaatactgctcttgccgacgttctttctcgacgacgcggctcacacgcccagtacgggatccgagcaggcactctgtttgcgttgcgatacactgggagcagggattgcctccgtcacatttcacccgcgcttctcgacaaggctgacacgccgtatgacagcgacgtcgcggagcaggcgtggcgagatcgttggacgtcgtggtcgtgttgaggttgttttgcgcaaggcggtggattcgaacatgccgccgcaagaggtcgcggcgagaaaaagccaccccgcacgttgggcacacatgctggctatcattgacggaatggtttcgcaggtgtcgagtcaaggagccacgcgtctggtacgtcttgtcgcacacttgacatgaatgcatcctgctcaaggtatgaaggcgtctaaggtcattacgacaattgatgagggtaggtgatggtcttgcgacaaggggactgagaaagcggggaggcccatctccggttcgtgtggaggatatggagggagaatagtgccgaagttagtctaaagaaatgccaatcaaaacgcaagcgatctaagcggaacggggaaaaggtatgttgcggggaatggttggaaaaatgattctgcgaaattaattacagccctacgtcgtgcctaaccgcgtctactccatagacgtctggatgataggggttgacggcgtagatgatgttataactacttcacgacctcgaacatacctttcaggtaatttcacgtggcttcgaatctcgcggccagctcttaactcaatcttctccatacttcacttgccattgcccaggtgcttttcaggcgtccgatgacgtacgccaagttccgagtgccactacatccgggccactcgacggaccaaaagtgccacctcatccgaatagccggctttgcattggttcagtattggctattggctgttgtggtgccaacgtgaaatatgtgcacggcccgctaggcatactactcgatactgtagtcaccttccggtcacacaacaactaggctgttagccagggcaagaggcaacgtgtcaccctcgcctatgttatgtttatgattggcatccaaccttacacaatctatagtgtgtagctgtcttaggcccgaaagactcgataaatgacgctagattctctcgtcacaatgggcaatggtagagatacacaagcaataaagacgttgatggaatctgttaggcaaagttggaggaaggtgtaacagccgaatttcattcagctaccgttgtgaacaatccaacgtcactgctaaagtcacagaatttatggtccatgtggcctacagcctgatcctgcctcacatcgactcagtactattcaagatgacattgatttgctgacggaagattttggggcatctgggacgttttgaacgtttgtcacattcccagcaagtcatcgagcggaggcggaggttgctcggcacctcaacttagattcggtaatacacgcctcattcattctgcaccgttcatagccttgctattacacagacaattttcacgtgcccttcacttacagtcctctagaattaggcccggtcggctttggactccatccaattttgcaagagaagagtcgaccggggtctgtgcccagtttgtgacggcgcgttgacatcctcgcaggcacagacagtggccctacacaaatatggtggtgcccatggtgacaaaacgctcaccaatttcaaatttttacgaagactatccttgagaccccgtaagtccccttcacgatgactttgccgtcccttgcaggttttccatctgtgctctggggaaagtttctgataacgttgggcgtcggttggttgatgaggaattaggcgatcgaaaatagaatataagggtatctacattagcttcggtatgtacagttactcgaaaaaggcctgtataagttcctggtgacgttttgaaaattatttacggcattcgtgctcaagtagctatattggaatcgacacaaatgagtcgcatctatgccgaacttcctcctgcaagaaaaagtgatagtcaaggttttcgccatgccagcggctactatgtaatggaggcaagtcagacaagccatagggctgcgactcggaactgtgttgagttgacctcctatcgcatagcttgctaaacaagggccataaggttaccaagctgccagcagttattcctagaccagattccacgtttgaccagatccatacttcggaaattgcatctggcaaagtatgcattaattgggctctttgtcattcggtggggactgtacaactcacatagaaggtccgggctttcccaatggtggacaaacggaaagcgaatgatcacggcagcgctagcactgtaccagaaaattagcgaacgatgaatgagaagcatgaaggttgtataacagacatgctaccaattccgagaatgcccgctaatgcaattctttctc

SEQ ID NO: 3819 - DNA, 5315 bp, Emericella nidulans
tgtcagagtccaagaaccggtagcgaacccccaaacggcgatcaaagtgggtaatgtttattgaatcgggacattatatttttccgtaagctccaaccgtactcgcctaatttccaataccccttttgatttagccccagcaggccactactctgaaggcccagctacagccataacgcctttaagccccgtaaattctccccaaagctcgaaaacccctccgccgaatgcatcaacgccgcccgcagctgcatccaagccgcagagctaatccgcgagcgcgtagccccctcgcactacctcgccttttgcgtacagtatctcaccatctctggcattctgctactcagtatggcagacgataataattcgcctactttgttaccggacataagaaacgcactgagattcctgggcgatctcgaggcaatctggccgggtgccagtcggagtcggctgatccttgatcgattactacagagcccaaggccacagccacgagcgtggggggtaatgggcacgggaatgtcgaatgagggggatggtgagaatatggatagacatggtcaagagcctgatgtttacggtggaaccggagcaggaggatggcatccttctctaccggtgctggatgagctgctctgggaacaatttcctgactcaagtgaggtgttcttagggctgagtaatttccctaattgaagttactgttctattggaaagcaagcaccaatcattactaaacccctgcctatatacatcgggctatcctctttcaatccaaaggcaaggcaggtttactcctgattaaaaatgacaatcttaattccccttctctcaaactgtgcccgaaacgcctcctgtgccctcgtcaagggaaaagtcttcgtaatcaacggcttcagatgcgctctttactttgtacaagctcaatcgcttcctggtaacatcccggcgtgaaccggaccgtcccctaagcgtcaactcgttcgctatcagtaggaaaaagaggggctttgtgagtcgcttccccagcccagcttggatgcatgtgcccctgggtttcaggatagtaagtgccatttgagcagatgagtcggcgccactggcttcgacagagatgtcgaccccgtggccaaggttgtgttctcttacgacggaggatgtaaattcgaagacgaatttcagaggttcaacattttcagatattttcggtgaaagaacgccaatatcttctccatacgacaatgcgaaatcaagccgggattgctcgatatcaaagaccacgatcttgcacacaccgtaggctttcgcaatggcaattacgaggaggcctaatggtccacacccaccgtcaccaaccactttagcagctacttcattgttaataggatgtgggagggctagcgtacagtatagccaccgtcttactcgcactcagagccgcgcgtctagccagctgcaccgcaatcgcaagaggctggattgcgcccgcttcttcccaggatatctcctccggaatggggatggccatgtgcgccttgcaggtgaaatattgctgcagcgtgccatccgtggggtcgaggccgcaatatttgagatttgcgcaagtgtttgggttacccgcgaaggcagaacgcatcttcttgattgtcaggacactttcttctttcaatattgggcaaaaaagggtagtggaaatgtgtgagtctccgtacgtggcacaagcaaacccgggctcaacggccatacgctgtccgacatgtctatccttcacttcggagtcgatctccactattagaccccttagacccgcggactcgtggccgaggattagttccctcgagacattagggttattccagttgtgggtatcggacccgcagattcctgttgagatgacttggacgagcacctcgttcggtcctgggggtgtaacgggacgatcttggattgcgagggtgaggtgtgagacccggacggcagcattgttgatgggcatttttagtcgaccaagtggtctagagttggttttcgggtttggtaatggtacttcatggagtcttaagtatcgcgtctgtctgtctctcttatagttcgagggtcatcaagtctcggcccagagcgttgattagggctggcggctctccatctatctgtatacagagtatgcagtatggccatgaaataccttcaacctcgaacccagcaaacagaagcctcttaacttccaataatgcccttcagcttccccatctcattccccatccaagcgctcaatgccacaatatccgcaccgcaattcacaaaatcaaaaccctgcttccaccgtctcgcaacctcctccgcccccaacgcaaaatgccccgcatatttattgtgcatctttgcagccctcaaaactctcgcaattgcgtcctgcacctccgcgatatgcggatgctcaaaagccacgtgccccatggaactggcgagatcattcggcccaacgaacagcatatcgaccccctccacgcccgcaatctcctcacagttttcaaccgctttcctactctcaatctgcacgatgatgacgatattgtcgtttgcagtcgtaagatactccctcggattctggtgaaatgcactatgcgcaaacattgctccggcgccccggattccagctggcgggtacttgcaccgggccacaataaaccgggcttgttcagctatctcgcacatgggaatcattatcccatgtgcaccagcgtcgagggcgcgcctcatcatctagggttcggaagccggtatgcgcacgatgggcgagcagttggcgctggatattgcggcgacttgcagatgcatttcagatcggttattgcgccatgctcgcagtctattaatacccactacccactcctctttctagtgagtaaaggctgtgttttaatgatagacggtgggtgtgcggataaggaggtgttacgtacgtcttcgctcagtgacgcgaccgtttcagcgagctggtagcccgggaattcaagccattgcccgagagatggggcctcccgggctgcggcgcgggagagggaggcttggagacgggtttttgtggtcattctgtagctgcgtagtttagagattctggaaactggaggaggggaggcttgttggagctcaaatgcttaatgtatactgggtcggccggagctcgcccgatgccgttggagtttatggagatacggttaacattgttatgatagggtatgtgtcgatagctatctctatatgtgctttgtatagctttgaagtcttcaaaaagtgttttctcttgatgcaagagagtagatattgtcatgctcaatgtacatacatattataggtcgacctgcattaccagtaagcgaaatcaatgccttgatatgcggaggcccacttataatgtaatatcagtttgctgaaatagaaggtaaagaataggtatagccaaggaaaattatcgttcatgaaggaaatctaaaattacatgaagcagatcaagaatgctatgctacaagttcccaaaagccaccttcactcacatctaggtcatttgcttcagcttctcaacctctcctttggccgcttctaacatccgcttgtgatccagcttcgcctgtcgtatagcagccacacgggctcggtccttgactgattgctgtgccatctgttcaaactttgccagctcagccttttcctcctcagtcgggggcacttcctgtgcgcccgtcatgttcttcactttattccagatatcttgataagtgaggtttcggacatccacggtggccgtcttctccgttgctgagggctcgggcgcatgctcgtccttggcggcagcattcaatgacgcagcattgctgagtttctctgcaaaatataccgttaaagaggcgggcccgtcctggttgtcggtctgtttcacggtaatcggaacaccggggttatgatacttgagtcgggtgagacattgccgccaaaagtgccgtgcaccttgatgaccgccgtagattttgcgagcatatgtgaggtgtaggcgtgtgacggccgggtattcagcggttgcattagctgctgaagggaagattgcggcgcctgttcccacgcggatattgagaatctatttggcttgttagcgacactagtgactcgcttcgaatatagtatcctttttctagcgagtccgattatcagaggcagggtcaagggagaattactttctagagacacgttagcaatttgagttaattgaaatcagagacgtacagtttttagcttccgcatccgcttgaagaggttgaccatggtgactggtgtcgcgcaatacgcgatcctcttactctacaatgaaggagaaaagggtcagaagccgagggatggagctggacgtgtgcaattgatgaccgctctcttcgtcaaaagattgtcggcgaaaagaaacggctctgataacgcacgtgacaggaagcggtgatgccagtgcggaaggcggtgagccactccgcgtcccacataatcttttcgcggccttttgaccaggccgaccccgcggtctgaaaagcaactgactcatttctgctatacttgtgcttgggcttttctatagtttgcaaatagcagactctaaagaaagccatggctgctgccgctgcgtctgcagctgcactcgatccgggcaacagctccaagaacactctcaagctcgaaaatgtctgcccctcagtgcctgatcttgaattacgagctaatttgcggcgatatagaccgagaaaagagataccctcatcgccatcgaaaagaagtaccaggcacaatggaaggaaaacaaggtcttcgaggttgacgctccctccctctccgaggtgcctgccggcagcatgactcccgacgagctccgtgagaagtacccgaagttcttcggtaccatggcctacccgtacatgaatggtaccctccatgccggtcacagtttcacagccagtaaggtcgagtttatggctgccaccgcccgtatggagggaaagagagcccttttccctcttggtttccactgcaccggtatgcccatcaaagcttgtgctgataagcttgccgatgaggttaagaagttcggaaagaactttgaaggctacaaggatgaggacgaggagacggctgccgtcgccgccccaacccaggaggttaaggccgagcaacaggagaagttctccggaaagaaaagcaaggccgccgctaagactgtgaagatgaagtaccagttccagatcatgctggccatcggtatcccattgaagaga

SEQ ID NO: 3820 - DNA, 4983 bp, Emericella nidulans
acaaacctttacatcgtgtccctttcgacgtagcgcgatcccggtcgcaagaccgccaattccagctcccacgataatgaccttcatgatcaggacggcaagaccagcgacgtgggagggcggttagtggaatgtgtgcggacgtctgagaatttggtcaaaagatggcggacccagcaagaccgcaagccgcggttaagcatgaacttgccttcgaagatgacggagaatctctgcgcttgatcagaacggtgggcttagctgcgagctgttacacggcagcagagccagctcacgcaggaaaccaggtgccccttggttcgcatcatcccttgtcctgaaaacggaccggggacaggccagccgatcaccatatttcgccgacctgagaacatagatcctctaaatatctccaggcgcaaattccatacacgaacatacattgatgggcgagaaaggtgtgaaaaagaatatgctgtgatgagcggataggtccatattaagcatacggccctaatatagacggcgtctcagataacagtggctgatgaaggccatctcccgttgagccctataacaacgctgtcccaggatcaaggggctcttgcctgctcactcgatgcaccttaagtcatggtaagcctggatgtcaggaatatggcgtcctgttcatctttatttaacccccctcatagaattagtaatcaccccgcactctgattatttctagagaagacagccagcgtctcgtgcacatcttcgagtcgacagacattggaacagaagaagaacaagactaaaggacaagatgcctcgcgccatcgcaaaagtgggagaccgcaccatcgctgagaccgaaatatgggagacggtcgaagggaatatctacgtaagtatgctgctggcttcgctgttggaccatcctgattgcagagcagttccccgtttcgtcgatcaaggacaaaagccttctccagccgtccgatctgtctacgttctgtccttggaaagggcatgcttcgtactggagtatcgtggtcgatggtctgctgctatccccagaccagagaaacgccccatgctgacttttgactcccaggcaaaacgattgagaacgcagtgtggtactacagcgagccgtatgatgcggccggtaatattagagatcatgtagcgttctgtgagtctttttctttctttctttctttctcttttttatttttttttattatttaaggcacttctaacgtcaccagataagaacaaggtcgacataatcgaagaacagtagatgcaaagattttcagcaaacaacagtatcatcgattatgatcaatctacagttttgacactgcgctgcttgtaaaccctccatccaccactaggttctgccccgtaatatacttggccgcgtcgctggccagaaagaccgtcgcattcgtcacgtcaaatgcatcccccatccggccgattggaatcggccgttccatgatcttccaataggcatcttcctggctattattcctctggccctcgacaagcggcgtatacacaaggcctggagagaccgaattcatccggacccccctgggagcatacatgacagcggtcactctggtaaagtgaatcactgctgccttggccgtagagcaggccacctgcggcttgccgatgtagcgtagacccgcaatagaggcattgttgactacagtgccgagcccctgtttctccatgataggcaggatcacatggcaggcaaggtaaacggtcttcaggttgagctgctactgctgatctcacagctcttccggcatggtcgccggattgccagtcgccgtcgcatcaacattgtttaccaggacatcgattcggccgtgtcttgctataacggcggctgcgactcgccgcacctcgctcaacgaggtggcgtccgcctgcaagatgtcgcaggttccccctccggtcagatcctgaccgccgtgtactctgctgcttcgaggaaaaggtcacagccaaagacctttgcgccgctgtgagcgagaagacgctcgatcgctgcgccgttgccccatatgtctgagccggggatgcgcgactggccgatgcccatgatgagggcaattttatctcgaagttcggcatattttgggaagacgttggtcatggttgggccggtgtcgagtgagactgtgtgcgacgtaagtgtgcaaggttcgccgggctggacgggttcggcaccatgcagtctttacaacacagacgcaaagccggggtactgtccgaagggccgtcgagcagcactaaatatcgggcgtcactccggggtaggtggacatgactcgtgaggatggcctccagggttgggaactggaccggttccttgctgggacggcgagcgatgagtggtttgattgagggcaacggctcacataaggccacttcttgccagtatattacaggagggggcttcacgaagaactctgggcatacctaagggataagaacgaagctatagaagcacatgcgccgacatgatggggtctccactctacccagctctggatggtttctggatgcttggacaccggcttatgtgcccactatctgctgctcgttcactcttcacaggcctatcagcaaacgggcacatcggatacctgcatagagctaggacatggtccgagtctgtagtactgctctactttggtgaagctggctatggagaaggcagggtatgtgccggttaaagacaccagagatggcattcaaatattcaggctatttttattaaggatccatgggagcctgtattagcaaaccgtttctattaagaatatatgagagcgaaattccagtggctaattctatagacgatctacgagagccggagctcagcagcttttatctgcagagccagaatcctggagtaatatctcgagatggccagattgccacccataaaccacagtcctttatgtcccgacggcctccaaatgcctcgcatctcaccgtgctcgtcaaagccccatacatccccgacagcgtcggccgtttcgtcaccgaacaggcgccttgtctgcgttcgcatgttctggtagcctgtagctaggacgatctcgtccgcctccagttctgtcccatcagcaaacttgaggccgtgggactggatctcactgatctcaactccttgcttgatcttgatatggccgtcgacgatgagttgactagccccgacgtcaatatagtagccacctccgcgctggaaatacttgatcagcagccctgcgccgttgggtccattgtccaccttgaatcctgcctcttcaagacctttgatcgtggcctcgtcgtgcttattctggattgccgtaacgccaatttgctgtgtcttgagcagctcggccggcatcccccagaaccacaggtcggcatcttcagtgggcggtgcctgctcatcatacaggcccttgagtccaatatctgtgatcgcctcggaggagatcacgcacgtcgtgcttcgctgaaccatcgttacatcgtaacccttttcgtaaaagtcctgggcgatatcatggccggaattacaggagccaatgacgatggccttcttgcctctgtgctcatgcagggctcctgtaaagtcggaactgtggcagatccgatcacccttaaaactgtcgatgccgggtatggggggaatgtatttctcgccagagtggcccgtcgcctggatgatatgtcggggatgtacagtccgtgatgtgagtgagccgtcagggcccgtcgctcgaggataacagtccactgctttccatcccagctcggcgtcttgagagtcgtccgagtccagacgttgagctcgaggattttggcgtacgactcgaaccactccgccagcttatccttgggcgtaaagaccggccagtgcggcgggaagctcagatagggcatatggtcgtaccagacaggatcatgcaagacgagttgcttgtatcgttggcgccaattgtcgccgatccggctgttcttgtcgatcaccagagtatcgacattcagcatctttagtcgagcagctgctgtcagtcctccttggccagcacctatcccacatcagtccctcaaagcctccgccggaaaaacaaaatagaaaaaccagggagattcataccgataatcagtacggacggctccctatccatgaactctgcattcgcctcgcgcctctcctgccagttcttccggtccggacgccctccgtgctcgaccccctgcttcggcggccattaagaggctccttatgccccttcagctccagcaaggaggtaaagaatgtcaggatcttccactctccatcgttcttcgcaagccgtactatcccacgccctcttccagattcaaggtcgatggttgtgaagaactgaataccataggagttcccaagcccatccagagcacaggctgttggtctccgaaagtcggacgatcgatcgacctcgacgtgaatagcgcgcggtcgagtacggtcgaggaaggaggcgatgccgtcgtggccctttgcggtgtagagatcccatgcaaggcacaggtggtctcgccagtagccgtccttgaagaaaagagctgcgatggacttgtcgtcctgctttgttagggcactgttgaattggtcaatcactgtctgggccaccctgtccgcgtcggccgcagagagctctgcaggctgcgtcgccgggaatttgcccagcggaacgtccactgggttatttgttatggtagagactgtcatgatcgtacgtttcgctgattattataagaaaagaccatcaagaggatgagccagactttttatgtcgggggagcggaatgaactcccgcgatacatcactttcgctcaactagcccctcaaacctcctcaaaactccgcatccccgcaagcctcgctcggcaaatgtcgatatgatgtgatgtgtgactgctgctag

SEQ ID NO: 3821 - DNA, 5026 bp, Emericella nidulans
gcttcaaataacttgacggatttgaattgaatatatcgcgccgtccgagagcattgtgcgtcttgatgaaggatgccttgaactggttgctagcggcgctatcgtgcatgagctgagatgctaggtgttctttggtctgtgttagctccaaaagaagatggtaatgcccatatggtgtccataccgcaaccgaactcggcctccgaaaggagggaaaccgaagcaacggtcgccatagtagaagcggaagtcatgagacgtcgcccaaaatatcgccttaacaagactcgagtccagcacgttcagtatgcagggtagatcggaagtgtatcagagaaggtgtctctcaaggctgtatgtcgaatcaggtgctcggttcacgaggcggatagacagagccatggagcaaaggcgcaattcggtatgctgcatgtgttaaagcatcgtctcatcgaatagagtccagctcttagtaacaatgtagattaatggatggacatgaaaggaggagtgaggagcaaatcgggggttgaataaaggtgttgtccgccgtctcgtgtctccgccgaatcggtgccaaacactgtcgggaagaacgttagataccaggctatgtcaaagaaaacacttcaatttaccagagcaagacgagaattgtcccttagaggctcagacgtcaaatcaccagagacgaggcgataatgtgtccaagaacttttggcaaactcgactgcggctccgataagagatcgggcctgcatttgatccgagatggcgaatgaagtatatgggacgctcaactgccttcacattttgtcttggttttactctatttgactagtaaagtatattgtctaaatatttagaatgtttgagcctaatcatttcaagatctttagttgtaggacatggtgtgtctatttgcatgcgccatgcagcgcatgcgttacggtggagatgctatatgctgcccacgcaaacaggcgttcatctgccttacaattcgccgttgtgccagttgatacaggtccaatcgcacggcattcgggccccttctttcttcctttatttcccctctttcttactttagagtgccccgtgatgactcagtccaaagtcgtccaacgtcgcccggcgaccaaagggcgttttaatggctcgggacgattttagtgcaccgtctgcgcccttaaaatttccgcaatcctgatgttcgagcgtccttggattgtacatttactgcgcaagatcaccgcatgctctttccccgaggcaatgcgctaggacgacctcgacccctagttgcataacgactagtcgtcgtcccgcgagtactagttcctctcactcttccacgggatgttccgggtttgggtacttgttttgtggaaacagtgcttggagggtgttcgataaaggtggtgtccgaggtcctatgtgagttgtaattagcaacgtgtatgggggttatagcctgagacgattgaattccgcaactcacataaacgtcatgtcggcttcgttgcctttcgctgattcttcttcttcagcctctgcaatttgttagaaggattgatatccgcgttgtgtggggtaaacaatacccttctgtgcctcagcttgtttcgctcttcgaaatgactcggcgattggtgcctaaagtcgctggtcaggttgtacgcgagatctgagccacgcaaattattagcatacctctgggaagtccacgcaaaaagcattcatgttcaatccatagaggaaactggcaaagctctcgctgaagcgcgtcagactctcatgcattagctgcagtttgtcgaagttcgcctcgagctcagccatgcggtcggcaagatccgcaaactgcggctcaagggcattaatagcgggctgggtatacggcaccctgctaatcttcctgtcatatccatgcgcttcgcggacggaagacctagagcctggcctcagaggggtcgtaggccgtgatacggcgcgtgaccgcgacgacgagcgtgaagcagcatccatgatatctccctttcgccaacggttattgcaagtttgtgcggtccgaggttattatgagacaaaatggataatgcgagtcgacaagttcaagattgcccgttgcggcgttcggaacgcatacgcaaattagaaggtggggagtcaataaacactcaagtaactatgtactaaaacgattaataattactaggaattagtcttaaaagaggaaactcactgaagagataaattgttccagtcctttgaggtccaggctcaagtacctagcgatcttggaccgctggacgaagtttgttgacaacggacaccggaagaatccccgttgctcgggcactaaaagtagaagccctcgtgcatctaaagccacgagtccgtgaaacggagtagagccccagaagatcagggtcaaactagtcgggaatttgctggtttttctactttatttcaagaaagacctgatgatcgagccttggaacctgcccctttacagggaggcggtttatgcccgagcacttcatgttaactgacaaacctagttagtcgggctccaaccgctcgtcttttcgatcgcccgctggaccgcctccctgaatcgcttcgatccccccgcataagttaccccccaagccaatagtttcaggggtgtggctgatattggactttcttacacgcgaacgcgttcctcataaatcctttttgcgcacacttgccaacttgctcgtcactctgcaagggcacatgcatgcttctttactacatcgccgtgcctgctattcctcggccaaatcgattcagtcagcttgtcatccattagggcaaacctctcggcgtgcacagatctttgccccatcatctcgtcctttattcagcccaatttcagcacgctcgtacctaccgagacggatattctccacttccctatcatcaccctttagagaaccgaggaagggctcaactggctgggcgatcacgttcacggtccttctcatatttgggggagcttggctgcagaataaatatcgtacacttggggctgattccgttccccagtcgactgctctcgaaccccaagaaaaagaagatctatttctcggcgtactcaatacccttaagaccatgcctatcgaggccgctcccggcactgtgggcaacctcaccccggaacaagaggccaagctccaggaattctgggtcctcttgttcaaggtgtgtggcgtccagatggatggtatagaagaaaccgagaaccgtcccccgagtcccgcacaagaaaaaaagcagccgccaaagcggagattcggtttctttggaggaggttctcaggagaaagatgaatctaccgcagcgaacgatgctgcctccggtatcgcgtcacttacaattaccgatggagacgataagttcggcacgtcgaaggagttccagaaggctctcgctgaaatcaaaccagaggacatgcggaccgcgttctggagcatggtaaaacaggacaacccggatagcctgctgctgcgtttcctgcgggcgcggaagtgggatgttaagaaagcgctcatgatgcttatttcgaccattcgctggagactgcttgacgcgaaggtggatgaagatatcatggtcaatggggaacatcttgctttggagcaactaaagagcagcgacagtgccgaaagaaagaagggagaagactttatcaaacaattccgcctgggcaagagtttccttcacggtgtcgacaagctgggccgtccaatctgttatgttcgggtccgtttgcaccgtgccggtgatcaagacattgaggcgctggaccgatttacagtgtttacgatagaatctgctcggatgatgttggtgcctccagtggaaacagctgtaagttctgcagacgtgggctggctggaattcatctaacaagatatcagtgcgtcatcttcgatatgactgatttctcacttgcgaatatggtataatctgcgttctaggctttttgagatttgctaatcgtgcttcaggactatcacccggtaaaatttatgatcaagtgtttcgaggcgaattatcccgagtctcttggcgtagtacttatccacaaggcgccttggatcttttctagttagttcccacatttgtcgccctgacctgcaggtttaacggacttttttttttttctaggcatctggaacgttatcaagggctggctagaccctgtcgtcgctgcgaagatccagttcacaaagacacaacaagacttggaggaattcatcccaaagtcacgtatcattacagagctcgagggcgacgagaaatgggagtacaagtacattgaacctaaggagggcgagaatgataaactgaaggaaactgccaagcgcgatgaattaataactcaacgccaaaagctggccaaggaggtccaagatgcaaccgttgcttggatccttgctagcaggaaaaaggaagaagataaggctaaggaggttacggaaaagagaaaggatctcatcggacgtctgcggactcagtactggcagctcgatccttacgtccgtgcaccgagtctctacgaccggttaaatatcatccaaggtgacggcaagattgagttctatcccgaggccgttaccaacgtgaaggccgcaaagagcaactaagctgtttagtgtacagaaactgtttgctacattggcttcatttccttggagagtcattgtggagatgtattatcttgtatgtagttttagttgaatacaccagcgtattgttttcttaggcgctggatttggacgttatttttgggcctagtgttggattgagaaaagtgatgtatgaatacaggtgcaaatatgcaagacttaactaggaactaaggtacgatgcccaaggccataatttatgttccattcgttttaatttgaggaccttgtttgtaagtttccagtcgtttaaaaccataatcaaagaaatctttgttttttgatcccaacttagttaagaa

SEQ ID NO: 3822 - DNA, 2126 bp, Emericella nidulans
cgccattggtcaggagaaattgactgcaactccccggccgctgggccgccgatgccatgacttgaagctctgctcagttttgctccttgacacatcacccatcacttccgtattgacaacacgtctttcactccatcacggctcgtcctgctaaaggcagttccggaagaaatatcagcctcgccagccgaataatcagaaaccaccgcttccacttttggaacagcatctcgttgtgacctcagtggtggtcagagcgggagatagttacggcagcacgacgttcgagcgcgggtcgctcattgtatgctcctttaccatttcttctatttctcaccgatactttgttatgttgctgcctcaatatcttgcgtctgcacctctacagccactcacgcaacgttatcttgtattactactaatatttctttgtccatttgatcactataggtgacttattcctaatatcttgcgcttgctctttttattagcttcgtcttatcttcatgtttcttacctttatttttatttttattttttttaccctttccttatccactttaatcagctggcgaatacaacaatggcgcaatggggatgttttctttgcgtctaccttcggaggttgcgcttgttatgttggtctttgtgatatagacttgtgatggctgcagagtcttatgcatgaggggtgtaatctacgaggctgacagtgttgtagcattgtttgtgcatacacttgaatctgaatgtgattttaagatctatttgctctcaagctactcttggctacagtagtgtttataatcatcacgctcatagattataggctgacataacctacgaaaagtagcgtacgtctaagcgcggaggtttgaaccattttatactgctttgcaaaagattccccaaagccacgaactccaatgaatgacgacaacgccagtttaagagaacccaaggacgacaaaaaatcgtccttatcattgcttgtacctctcatgaagattcctaatttgttcctcaatattcatattttgagggttcggcggtcctcccatgggaccaaccggacccggttgctgctgcatcggcccagctccggggggcccttcaaacgccatgcgcttcttcctagcctcttcctccgggttaggggcggattgaacggcggtggaatcaaaaacgtcgctgcgttggctggcgaggcgcttaagattattgaccacgtctgctgtagagaggttggttgttgcagttcgggcttgcgccttggcctgttgctctctccagcgagggtcgagcatttcgatacgcatgtgctgctgcaattcggcttcgggaatctgctgcttacagtttggacagagtgccatagcgcctgctgcattctgacggcgtgcttgcgcaccggggacgtaatcggagcggatccgcatcggttgttgactgggggctgctttgacggcggcggcttgttcgcgggcttccatgcgctcccgaatgcgctgttcttcttcctgagctgcagcagttgcggcaactggtggagtaggaatgccttgaggtggcggctgtggggaatataccggaccaacaggttgagcgaagggttgtggttcaggctgggcggggtaggcgttgtagtatgttggagtttccatgtcggttggcatggcttcttcgatacggagagggttcagcgacatcattgctttctgctccagtgaggcggactgcaagtcgttgagagaggttggaggaggaaggtcaacttgatcatccgcttctgtgaaaagaactgtttccacaaccacgaagtcatgccaatcaatttgagcatactctatccgctccttctcttcctcctcctccttcttttgcttctgttgctcctggtatttgacccattccgcgcgcgcctttgcgcgctctaaaacgtggaaccggtttttcacgttttgttccaactccgcaattcgcttcttttgggacgtcgcttcgtctattccttctggtcgaagaagaatggtgtattggtcgaccagtcgcgtgaaacactggtagagactgtgttgcggaccgaggaaatcaaactgaaagtccgcgcttgcgctggagagagc

SEQ ID NO: 3823 - DNA, 2558 bp, Emericella nidulans
attctgatccagggtctgaacagaaggtccatgggacgaaaatgactcgtgaatatggtattccctttacgtccgtggcaggagcgcttgtaggcaggagactgcgttcctcgagacatgctggaaagtgcccgcttggtgctggtcaggtgcaggtgtgagctagcggaacgcgatcaccaggggcaactgttacggacagtgcggctgagaaacaatacgcatgatgccaagcgtacaggtcaatcactcggattattaacgtaggaatctcgcttgtgcttttatgcctccgaaaaacattagacgccgaagcgaacggttggtatatatagtggtcaatgacgatattgttcgagaggccgaagacgacaatttctcttggctatcttgaatcttagtactgtcaatcactcagtcgtgattgatctgcattgctgcagtttaaatcaatttgttatacaagatgacttcctgcctgccgttgattgacggcttattgcctgaattgtaaggcagaaacgacctcgcagaaactgagcgacgggaatcgcagggcgtggcaaaccgtccacctctccaacttttcctccgacgtctcatcaatccaagaccttgacttgtcgatccttgcgctaaatcaagcttaatcattctttctccttgtctgagcaggatgcgacacattaggctcatattcgctgcttagtggacgccctgtcaatgatttgagcaactcatagaatccgatcgaaagggcggtagtcactggtcgacgcagcggcttgttgatcttttgagaagaatcgtggccttttcaacaccgcgactcgcactctttaaacgacagtcttgtatctttactatttttgttggccaaacctttccattcttgagtttgtgtacctggtcgattcttgaaggctctttttcagacctaagccgcctagactggaggctactgatccttgccaggtttggttacatgtttgcacggattaactagatggctggtccatctcaacactaaagggcgtcagttgagcccacttgaggcggtttcagtcttcctataattaagatgtccatgttcaggtcagccgcggacatttcctctgattccgcatctagctccgatgagagcgaccatgaagtgaccaagtcggagtcaaagcctgacattcggcctcctgttcgggatgcaaaacataagtcacgttcagtggatgaagataccatggacgatagtgacattaaggatctgcttgctgcggatgccgagagtcactccaatgtcatgacttctgcgctgctcgaattctactgtctcactcgagccgcggatctattgaatcggcagcatggatcgcacaagaggtacacccgagagtctccggaagtgcaatatctcgggaagaagatgttcctttacaaatcgaaatttctctcgtctcatggcgtcctggcggaaggagtggacgcggatcaatggggcccgactcggcagtattaccgcgacaatcttgatgctctaggactgtctgcgctagaagggcttgatattggggacaagaagccgccattggtcgaaggtggcggtgacctagttctagcctcaaagacgagagatatgcactcaaggaaggaaactgctgcaagtctgcgcattgagggcccagtgggtccgctggatcttcaacagcggcatggggcggacagaatccctgcgctggaggagttgcggcttgacccgagacggataccacgtccattgccgcttcttggtagctcgcccacgagctttccgttgtttgatttgaaccccaaaccatccaacagttcaacgtcccgatacgctgtagaattctctgagatccgcgtcgttggccgaggatcgtttggagaggtataccatgtcaagaaccacattgatggacaagactatgcaatcaagaagattccgctcagtcaaaagcggctccagcagttgcagtgtggtaacgagaaccagcttgagaacattatgaaggaaattcgtacccttgctcgactggagcatgcaaatgtcgttcgatattatggagcctggatagagcaaacccactacccgcgcatccaaatcccgtctcaggaacccggaaagcttgtgtatgagaatacccagaacagcaaaccataccagccctcgggcgatgagagttttggtgttgtctttgaatactcatacgaagggcagcagcagtctttagaagactactcaattggttcgcatggcaccagcactgcaacgcatacatctgaaaaaccggtagcacgcagcctggaagatgacgttgagtcaatcccgcgtaactttagcgagccaacatatagccaactttctacgttcggcgcatcggacggggatatttttaccgatgggttcagcaatgaccattctcgtctccaggtccagcgcacgagtcgtcctggtcacgcacttcctgctgtgatcttacacattcagatgtcacttcatccaattccactcagctcgtacttaagccaacaacactctg

SEQ ID NO: 3824 - DNA, 1472 bp, Emericella nidulans
atccataactttccaaatcttcatattttcttttggctctagacggctgggtatatgtatattactatttagcactctctataattggcgagcgttgaagatccacctgcgctgcgcttaaactctttgtgcttctcttctctaccttgccatttctccttctcctcttcattgctttaactatttcgattttttttcaccactcttatgcatatgcactatatcaagtagacaatttccatttctgctccgcgctcactttgcctagtcttctgaaagcccgaatctgtcccaacagcctttgagtgtattccagactcatccaagttagaaaacatagccccgtgctgcagtatgcctagacgcattagtctaagagaggagaatagtccaaccagcaaccttagctccatacgctcatatatcatgcaagcgcacattatgttagagtgggtcatcatgccaaaaggaatccaaatacgtatcaaatagcatctaatgtcgactaatttattcatcaatacgttggccgtcctgagttcgcaataggattccaagtttagagagccaatttactgagtacttcgccgacagtagagacggaatctttctgagtactgcgaaacaatagaggaacgaggattttagacatagactggatttagagaccataacatataatattttgtgtgtgtgtttcagtgctctgggttttctgaactttatgcaggtattccctatatattccatctagcatagggaaataaaaagtggacgttgacggaaacgcgaacggttgaaacggtaaaaagaagaaactgttgaagcataattaggaggtatatacgtaaaaaagattctcagacaggtttgtcgtcgcctcgagtatggatatgattcaccaagagaccacgaacggccgtttgcaccaagaatcactgccctttcttttcaccctccagacgccagcgctcgaggaaataccccacagcacgggcaagaccctcatcaagggggacaataggcgtgtacccaaggcgatccttagccttgtcacaggagtagtacctcgtcatacaggagtaacgcaccgcccgccgcgtgagatttggcgttttccccacgagtcccagaacggcctcggcaagacctccaataggaccgagcagccactcaggaagctgccaggtttgatgcggttcgacgaccttatccgcaagcgcccaggcagcatgcgtaaagtcccagaagtagacgggttggtcgtttgtgatgaggaaggcctcaccgtcgacgcgttcgtagtcgaggaggtcaccctggcctgattcgacgcgtttgtaaatggctaggaggcggaaagccgcaaggagatgtgagtacgcgacgtttccgacgtatgtgaaatcgaaaagattgttgttctcgccgagctgcattttccggacagtgggcgagcgttaacgccatgg

SEQ ID NO: 3825 - DNA, 2615 bp, Emericella nidulans
cgttatatttttataacttactcacgtacaagcaaattttataaggtatttatgacaggtcaacatctcagcggatgcagtcacccgccttcatctgctcaaaggcagtgttgatgttggcgaggggctcacggtgggtgatgaactcatccaccttgagcttgccatccagatagtcatccaccaggccagggagttgagtgcggcccttgataccaccgaaagcacagccgcgccatacacgaccggtgacgagctggaatgctgtagcatggggagttagcagaaggctcaacgaagtctcaattagattggcggcttacgtcgtgtggaaatctcctggcctgcagcagcgacaccaatgacgatactctcaccccagcccttgtggcaggcctcgagggcagcgcgcataacgccaacgtttccggtgcagtcgaaagtatagtcgcagccaccgtcggtcatctcaatgagcttctcctgaatagtctggccgttgagcttggtcgggttgacgaagtcagtggcaccgaacttgcgggaccattcctccttggcatcgttgacgtcgacggcgatgatcttgccggccttgttcttgacggcaccctgcatgacggagagaccaacacatccagcaccgaagacagcgatgttggagccctcctcaaccttggcggtgacgacggcggcaccgtagccggtcgtgataccgcaaccgagcaggcacgatcggtcagtagggatcttgtcggtaacggcgacgacggagatgtcggcaacaacagtgtactgtgagaaggtggaggtgcccatgaagtgcaggaggtccttgccgcgggccttgaagcgggatgtgccgtcgggcatgacacccttgccctgggtagcgcggatcttgccgcagaggttggtcttgccggacttgcagaacttgcattctcggcactcgggggtgctgcgtttgttagccaagcgctttctcggcttaatttcgaaacctactagagagcaatgacgtggtcaccgggcttcacagacgtgacaccctcaccgacggactcgacaataccggcaccctcgtgtccgaggatgacgggaaacgctccttcggggtcctttccggagagagtgtaggcatctgtcgttatcagtaaaatccaacgcgctgcatcaattcgatcactgacctgtgtggcagacaccagtgtgaaggacctggatgcgaacctcatgggccttgggaggtgcgacctcaacgtcctcaatggagaggggctcaccggcggcccacgcgatcgccgcctacaactgcaattggtacacgaactcggactcccattgtttattcattttgcgtgcaggtcaatcttaccttacaagtgatggtctagagcaattagttgcggttcatacatcatgaatgaggaaaagacctaccttgccaacagtgctagccatgacgacaggggtggaagaatcggatggatggataaagttagaaggactctggggaatcgcagcggaagaaggtgggtaaaagagtcagcagcgatcggagaaacgaggtattgatttctccaaatggattgggccgaaattaaaagaagaagaagatgcaaagacgcagagaagaggcagaaaagtggtgagggggacgagggggtggggtaggtaatgaggggccacggccgtctatcgtgatcgcgtcttgctgttattcgaccggcgtccacgaatgatactataatcctagctctcttttcttatttcttttatctctcctcattctccgcatagatactgagtcattaactgacggaggagaacgaagatttggagatggccatggtccagaatgagtgtctggcagatatcacgggcatcgtcgctcagagctggactgttcgggcaggggatcaggtccactgtgaggcaatcagctattactactaaagatacctaatagattagtatggcgtatcagctatctgctctgtacaaagctcatcttggagctgcgatgcggcagcccaacttggtcaagttatccggcctggcccggccacgccaagcctctcatcggaagccgacccgatcacctgagcggaacgtgaagagcgcaaagactgacgatatgatatgctggatatgctggatatcctgggtattcctaggtattcggatggtcctagtgaatttatatgccagattaacagttctgacataaagtttctattcaaaggggatgtactgccgaagctactcatgatcatgtcaagctgtaatcatactacaaacaggatatataaattaatagttatgtattatgtaaataagcgcaacagcatctacgtcaagttagctaaccatcagcttgggtactcctaccatttctgcctccttattaagaccctcaatctcgttttcggtaaatggaattccctcctccagtctcttctcacgtgttatctgctcaatctccccagggtaatatatccgttctacgccccccatcttttcgcacccaaccaccctcctgatagagatagtccatgcgttctttgaaacctctaggccacaaatagatccggttgataccaaaagaaagt

SEQ ID NO: 3826 - DNA, 977 bp, Emericella nidulans
ccattcacccactctcggcacctgctctcttaacgttttgactgggtgaatggattcccgtggtgtcgacactagatagagaataatgatgccattaactccggtccgtcattatggtcaagtcatctaccacatatttgtctactttatccccgcacttcatccacgttattcctcattattccgcaccattgattgaccaactactcgcccattatatacgtacgggtcatgactaagacgtgcagtttcccacgaattaggatgctaatcaaggaccggcgtcggcgaatgggatacgccaagttctgtccaggccgcatacgataaaaagagggacctgaatattgcgtggcagttaagcttcgagacaagctgcagggcgcttttgatacgcaaaatatcagtgcctgcgggaacgatattgctaaacgcactacgccttgctagtgttatgctactatagcgcggccagagaattaggtgcatggagctcagaattatcatcatttttgcccctgattctgagtggcgatcatgtcgccatatactacgggagtgtaggtgtcctaagaactatagtgcatcaattacgaccgttgtttgttaggtacaatagcagctaacggtatttttagggttgtcccgctttcgtgccccctatattgaaggagaaggtgacgcattgttcaactaaggctgaagatcttgtacaatcttcggtgataacgcaagatactaccataaaaacgataagatttgctttgatcacaaagatcacggagccgctggtttcaaatatcttcccctaacacttccgctcaggaaccgaccaggaccagcggtctcagagagtgttctggtcaattcttcatcttgctgggatgatagcagggtcgggtcggagcgtgggaaagaggagcctcctgcctacaaggtcttagatatgttgtactacgttcacgttaggtggttgt

SEQ ID NO: 3827 - DNA, 2240 bp, Emericella nidulans
gataaaaaaaaactacaaccatttcaaagcagggtcaggtacatttctagcgcaaatactatctcttgtcagcctaatcattctttcttccctttttcccttcccttttccccttccctccctcaactcaaaggtggcttatggacgatatctcgccgggagagatgccgcctgggatcatttttgcatggtttacaacaacacaatttagattggttacccgagaccttgagagattgggatgacaaatgaaggagtactagagcaagctggattaggggcaggaacggaatgccgaatatcagctggaccccgagcgctgttagtgtcgggtccccaacgggctcgcggcaatccttctcggaatgccgtgcagcccactccaccttttaagagtgtttagacatgcattctcgaggatttgattgccgctggagaaaagaacgctgacgggtgcgactggagagattccagcggcaacttgctggctggtatcggccctcctccaagcgatcctacatttgcagtctgtccctctcaaccggagccggcgagatactccggaagaaggccttggaaacaggaaatgtcgagattctgtttcacgaagaatttcaacggctagaacagcgggacgggactgtcacgtactggacgaagaaccactctcttgggatagaaaccaaacgggtctatcagtatctgattggcgccgatggtagacgcagctcagtgcgcatatgtctcggtatccgtcttgaaggatacaccttcgagtcactacagtttttccgccgtcaccttctgtattggctgcgtgcagctagcggatggaaagcagcaaacttcatcgcggaccctgtcgcctggggcactgtcatcaatcgaggcaaatggacgagctggcgattcgcaaccggaaccaccaagacagtccctaagacgtccgcgtcactagacggagctactatccagctggtaaaagacagattgtcacgcattctccccggggacacgagcatgattcagtacgaggaaatggcgccttataccgtccaccagctgtgcaagccagttccaaaaaggtgatgtcttcttagccggtgacgctgccacgtgagttgcaacaacataaaagagagcacaacactggaagttgatccaatactgacccatcctattagctcaatagtcccgttggaggcctagcctcacaactggctttctcgatgccgcccatttggcgaaggctttgcgtgaagttattaaacaaggggccagtccagacgtcctgacaaattatgccaatacgcggcggcggattttcctcgagcgaaccaatccagcaagcactgataactggctgaggcttttgtcgcaggatccggagtatatgaaggagagggaagatatctttgcgggactgaaggatccccacgatgtcatcactaaaagacagattgggctgccggatttctgcctgactaccacatcagacaagtatttcgacacgcatggcgaagtgacatggttcatttcagccacccggattccaaactggactcgagaagagtttgagcacgaatacaagaatgtccacgccaagatgactcgtgtggtcgccgaaaaggccccggtaatccgcaggtacaatcagctctagaacacccacaggaacagaatgcccaccttgggactaagtgacttgtctgacatgacctagtctgtttatcattcacgctggcttccaggacccagactaccgagaacacgcggacaagcatattttctgtagattggaccaggaaggctgcatcatggcacaggtggagaagatcctgaagagaccgtttgcagatccagtccagtgccttgtatatcataagagagagaatccttacgtttagttttcgccagcatggttcgccgaacgttcggccaagctcgagagactgtcatctgaaagaacgatttacacatatatactatgtcgtgatgtgacaccgagaaccacaaacttctttcacggcacgcagttctctggaggatactggcttcgatacaaggcactcgaaacatttgggtttgaagatacggtcagcgcttgttcgtttttcgagcagtgcagcagtgttatttttggcgatagtgcggatacgactcagctagtgattggattgtcagactgggtcatctaagttgagagttacatacattatcgaatgtcatctatggtcgat

SEQ ID NO: 3828 - DNA, 3751 bp, Emericella nidulans
ggatcgaacgctagtgagaccgaagtccagcgccgaatatggtggcatatggtatcatctgattggtgcgagttctcctttagtcttgccattcatgactgacacacttaaggctcctctctctttccggcggtcctaatgaaggagtttatctgcttcaaccacgacacatgaatgtcaattacccgagcaatatcgacgacgaaatcatcccagcttctggaacacagtacgggtttcctctctccatcccaacctctatgtccgcttttctatgtcgcatccgcctggcggagctctgccgtgaagtcgtcgatactatgccctccctcctcctcgagtctcccgatgtctcttctcaagaggtagattacgatctcgtcctcgacctggatgctcgtttccagaactttcttaatgcccttccgatctttttcaaactcgatcaccgcagcattcagcagagtcttaccatctgtcgtgaacggccgtacgttgcctggcagcgcacgtatctgcatctcggtatcaacacccgcatctgccgtctccatcggccgttccatctagaaggctttaagtaatccaaaatacgcttattcgcggatgatgtgtatccgagctgcaagagacagtacttagtttgcgtcgctcaatgaggatattggtgggctgataaatctaaacccctctcgtttttggctcattgtgcagcatgtattccttgcggctatcactctcgctaccgatgtttccttgaaaccggacgctccagaggcagttccacggcgtgaggaggtccttgccgcttgtcggatgcttgagcgctcacaacacgagtcggcgacggctgaagaaggcaatacagaaaaacacgcacaccttgctaatgattttgcagaaccagatgtctctgccaaaattgagctcgcccgcggcaaacagtgccgtgggtggtggctccgtcttccagtcctctgctgggctcatgatcacgaacatgggaaccaaccaggttttcccccaaagctctggcggtgctcaattattgaacacggtccctactacaatgcacgaaccaatgccattaatgccgaactcatctgcacccatgaccgggcagtggtctggcggcgctcagggccaacaatcggacgaagatacctgggggaagctgtggtctgacgtgttcaatgccggcctggacttggatatgccgcagtggagttctatcttagatgatatggagtttacggagctcggtagcggagcttgacgggccctggtcgttctgagactgcatttctcctgtcgtcacctaccaaaaatatatctcaccactccttgcattgcttcatgaggcattacgaagtccacgatttacaatcacgattgaatgagattaatacccggccttgcactatttaaatttcaagtgtgtaattatcaatgtgtaataattagtgacccgctcccgaaaacgcgcatgtatcaaatactactttgttaaaatggtacgaatatcacaacgtatggcccctagatacagtgtgatgcaaaaccagcttcaccgatcccaactcttcccttgattctgggctgagtgccaaggcgctagtcagaaaactgagtgcggttcagttggggacttcgccaccaatgacagcagcattgaaggcttgacaagcatctcgattaataagctctggggcacaatttcttgagccttgaggaaatatagcatgttctagaaaagaaataaacataaataaattcactgcctctcccaggccctccttttgcaaagagactagaaaatagagaattagaagagaacttgaatcaaccaatactattatacccgaaatcctataaaggaaattcgacctgacgcatgtcccagggcaagggtatttgctttgattgctgaacatgaaggcctggcctcaggaggaagccataatacttccctaccatttacagatatccagtccgggccattaataagtatatcagaatgcatttttggggaactggaaagattattaccacacctggattgaatattgagcgatcccaggttagtgctgatatatgaaccatcttgggagaattggagttcagtgactgttcccttgataatcaaggtctgctgcagagtgcccgtcgccgggtcccagagccgcactgtcttgtcaaacgatccggacgccagtagccggccgtcgggcgagaaggccactgaccgaaccgtatctgaatggcctcggagcgtctgctgcaggctgcccgtcgccgggtcccagagccgcactgtcttatcaaacgagccggacgccagtagccggccgtcgggcgagaaggccactgaccgaacccagtttgaatggcctcggagcgtctgctgcaggctgcccgtcgccgggtcccagagccgcactgtcttatcaaacgagccagacgccagtagccggccgtcgggcgagaaggccactgacaaaacccagcctgaatggccttcgagcgtctgctgcaggctgcccgtcgccgggtcccagagccgcactgtctcgtcatccgagccggacgccagtactgcccaaaccgagtttgaatggccttcgagcgtctgtaattctgcaccccacttctcattaacttttggcaactggcatatccaacttggaaggtcttcactgaaatttgaacgaattaatgctgtttggggtgcaaacaccaatcctgcacaataaatctgaagtggtgcttcatcagcaacttggcaattcttcagcacaaagcgctttgcatcatggagaaaatcagctaataaagaatcattattgccctgcttctattagcataagtcaaaattaggtgtctactatattacttactagaatatctgtatggaggagatcaagcatacccaccacctctgatataagacctagcaagcacattgcttccacccagtgcagaaaatgcttctggaggaatagtcgcacatcctctatctcagaagatgaaacctgactctctttgagatggtgtatccagtagcgacaagaatatcgcaattctggtggtaggtactggcgaatatcctgagggttgatgtctgccctacgcgttccagggctttctagactgcagatatctttctgtaggtgactctgcatagttttaagacagcacttagcaatgtctttatgcttttttggcgcatccacaaggaatttggttctggactggaccaaaaatcccgaaatgatgaatgtagaatcctgacaggctgatctcggctgctgggaatgcttaacaccgatcggaatatatctaatcgattgctgatctggtctgctcctatcccaagaaacagtgatagcgtgtttatagacagtggattagcaaggagaataataacgccgactatggcctggaactcttgcagaagctgctgctgctcaaactcatcactctcttgatcatcgagtaatcgtgtcagaattggcaggtatgtcttgtccattcttgatgcatatttggcttggtcctttaggagctctgcgaggcgcaatttgggttccatttttgaactttcaatataacggcataaggtggcagcagagatgaacagtggagcggacatctcgaccagtttctggataacttcatccccgggccagtcctcggagatatttttatcgcgtttgatcttcacgaatcggtcttgtaggaataaatatat

SEQ ID NO: 3829 - DNA, 1784 bp, Emericella nidulans
cgtgtcctttgacggctactcgcccgctaccgtgccgccggcaagatcgacatgcacctctaccacgagctctaccacctctccaagggtaacactttcaagcacaagcgtgccctgatcgaacacgtgagtaattgacgatgagtggcggcacaacaggggtggtttcgcatgcatgaattcagactgactgtctccacagatccaaaaggccaaggctgagaggcaccgtgagcgcatcctcaaggaggagatggacgctaagcgtgccaagaacaaggctctccgtgagcgacgacaggagcgtctcgaggccaagcgcaacgctcttgttggcgaggagcaggagtaaacgctttgattttctttccttcattgacgggatttggcggtgcggatgtttgaactggggaatcgatcagcccaagagatatcatttcagatcgaccacatcgctcgtttccacattccaggttcgactcggtgggatatttgcatccgggataccctgggactgggttcgggaacagggaaaagaactcttttcttctttctttctctggtgaaaagtggatagagggaggagaagacggtatatggaaacgaggggaaaggaatgaaaaaaatatgaacaaggatttcttctacaaatcaatggcatggcgctttgtgtgtgatatggcaacttggattgattgcattctaccgtcttccccgcccgccaacctgcgctttaaaatataatgtcgtaacgttcttctgtggtagatgtccgtccgttcaccatgactttcttatccttgcgtgcaagcctgggtgctgtatggctaaaagggtggctttctattactatgagcatccacgatcttccggtcctttgagctgttcctgctagaccttgctaacccccgtttggggcgggttttcaggcctagctgatccgcccacgcgggttttgggtgggttaccttcacagtaaaccgcccatgggtttagcaaataattctaacccaacctaaataacccaaaataacccagttatgcatatcattactctaataagcagtgatctacatagttaataaaatactgtatttaaatactgtattataactatctaagtaagcaaatataatctaaatacagtaatatacctattcagatatcttggcaacccagcgggttgtccgccgggctttggggcagccaaaaatatccaaaacccaatggataattagaaggtctaacccaacccatttcttggcgggttggggcgggttgaggcaggttttgtgggttaggtttaacaagtctaggaagttctatcttaatataataaaaaaagagaattatatttatatatctacttatctaaaagaattctccagctaaatataactataagattaatctataataaaaaattattagtaattatataatatcttaaggcctgagatactaaattatacttttataaaaaattctaagttattatagattataagaacttaaagtacttcttctccctgaggttttttttaaaataatatatataataatctttatttcttagctagttcaatattaagctaatatataggaaagggttagctaactaaaaaactaatatatatttatagaaagactaagatatgcctgataataaaaataatagaattaagtcttatataatataactttctatagaaaatacttagaaaagatagtagttactatcttctaactagctaaagagcaactatagaagctgtataaaaaag

SEQ ID NO: 3830 - DNA, 3533 bp, Emericella nidulans
  unsure (1)..(3533): unsure at all n locations
aaaaaacaccccccccccccccccccttttgtgtttttggggccccccccccccccagtgttttttttattcaccccacccccccccccccggaggggtgggagagggggcttttcttctttaaggccccccacattagtttttttaaccaaaaaaaaaacccccccccctcccaaaaaaccccaccgtttttttttttaaataaaaaagagggtgccccaacacttatttttttcccccccaaaaaacccatattttgtttctcctgtaataacaaagaaggtcccgggtggggttccccccgccccgggtatagggttctccccgataaatgtggggattattcaagccagcgtcgggtgtgaccccaagcccgcggaagcctcaggctctcggagtggtaataatgagcaaagccagagcagtggtggcgcccacaccggtaccggcgtatataataatggtgccggcatgctcagtccttctgtcttcacgagcgtagttggtgctgttagtgtgctgggtcttgcgcttgctctgtgaacggtctgctcgcacatgcgaattaatggcatgaagacacagcgggggcctcatcgctttatccttgacggtctcctgcagtccatgtgttcattcagcatattggtactattctgcctacgcctgctctagtctatttattgtttaatcacccttcagctaagataacccatcacggacaattatttttctaggatttaatccaataacaattatctctggaatgatttgcaacattacctatctctgctgtgctattaattcgactcctgtgtattgtgtagctgctgccccatatttagtccgccgtggttcccctcgaggatttcaggctgcgtttctgcggcttcgatagctctgtagacggtggtattatcgatcaccgagcgccgtatgtcgtttagcagcccgtcgaaggtctctcccacgaccggaatagtcatgcgcctggctgactcaatgtcctcttcgcaaagtgcatcggcctgctcgaactggaatgagaacagggcgtcatagactttcccgatagataccgtgtttgtgagggctattggctgcacagatatctcattagcttctcccccaacaaatctacaaataacattcaaggcgatgaacacgatagaagatagaagtacactatttgtatacccccactctgcaatcccatgcgatcccgtaactcgcccattccgttcagatcatggctggccgcataacaggggtgctggcgggttccatgcattccgcgtgggaaaatcagtgtcaggcctgtatgaacgtcggggtctttgtggattgttatttggccaaccgtgacacctaagatgttaggctagcgagctcatgacggtatgctggcacaagcttacctttcacgtcgagcagcgagtttttcgggcctggcctgaatcgcccggggctgtagccgagatcacgaatgcgaggtcttgtaccaaccattggtctcggtgtgtcttggatgacttggctggaaagcttgtcgattggtgtgatatgagatgagggacgagttggaggttaaggtggaggggcacatataactgacgtctggtccgttgcagcctatctaggtcaaatgagtgactacgacattactcgttctagttgcttctagtttcgagtagcgttgctttgcatcgtgtatctcttcttgttttgaggctgcctagtctttagcttcaaaatatctggaagctgcctgcgccgttccctttcgccagaccaatgatagtgcaagaatgtttctcacccttgtgagtactttttctgtggtatccaaagtgcctagatgccgtggcaattaaaatgatgtgaggaatgtaccaaattgaacgtggcggtatgattctggttaccgtcggtggtcaatactgagggaaggctgctggatattgtatgaatcaagctagggttgtagtatcctgttcgtccgatcattcacgagacaagtgacggaccctggattcaatggttcttagtagggcccagtcttccgtggtgctaacctatagaataccttgctcggttttaggaccgtgagctgattttgcaggtattacgtcatttttcttggcccaagaatacttggggattaacccagacttctttggtaatggccgacccaaaagtgggaaatagacctggtggaccaataatccacataagtatctggtaattaggcctttattatggaacattncgttgcggaaggttgtcagccatgaccatcgactcgtgtgaacagagcgcgtccccggtctgggtgaattaactccaagattaagattggaagaccaaaatataattccaaatctcttccacgtcgccaacataccggcgcttgtctgttaagtttaggtcgtgaccagtctaagcaagcagatagcccatgaacgggcatcttcgataccttgtaagtgcattgttcgattagccgcaactacagcaataacgaagcgatctcgacacggctttccgcaaggtgcagtgtgattaacatggtcaatcgatattcattgccacccatcgttgaacaagcacggattgaaccatatgaggcccgtcgactcgaatcacttactggtcactcctctctggtttatggtggtcacagaagtgagtagcaaaatacccgtccattgaccgctgttatatcatttagactcaaagcggccacaccggcgtgtcgtctttcccatagtttatttctcgaatgcagcaaggatctttgtgattaacggccacaacttctcaagtcaacggtaaagtcgggcccagttttcagtctttagtctctcttcagggttgtgcgccaattagtccgaccttcgctgaaattaccaccggcccttaactgtccacattgaatgacaaagactaatgcgtctttccgtcatcgtctgaggtgctcacataagcccatgcttcaaggaacaccgcataggctgcccgtagctccgccatggatgacattcgcggcttcctgaccgtagatttcaggctgtcaaaagacagcatgtcgattcttttctctggtaatatgttacccaatggagccagtgtaagtgacagctgctcatccgcatagcccatgcctcgcgtggcctcgtactcttcatatcataacgcccattttccctagcttgagctgtaatgcagccaccaatatttgcataaagctttccgccagaatgctctgaagtgccctctcgacgcacattcctttgatagcgtcgctttttggtcggaaaagcggcctcaggttcagcaagttagcgcttgctaagagaagtcaatgcatatagtccctctctcaagtatactgtagatactatagagtatacatcattgaacggaacctcaatcgctgattgtgtagaattgatgctccttagctttgactaactcaacctcaactgtattggagcaccgcactaacctgtttgggtcatacccgtgcctca

SEQ ID NO: 3831 - DNA, 5877 bp, Emericella nidulans
tcgctgggtgacttgggactggacatgctgagggtattctgcgagaatggctcgccgtctcttgaagtcgaagcagtctccttcgtctttggatgtatcctcgcaaggtcgctttcgatctagcgacgttgtgtcgggtacggaccttggtatttcctttcttacagacatggtggctgatcttagcaagtggaacggtgactgggacacgaaataagattattggaataggaaaatcaagtatatgtggccatgattagatactaataatagccgtctcagcagcgcgctctgaatgctgacttttcaaatcaccaggaacctttgtggcagtctttgttcaggtgtttcagcccttccacccactttctacgttgtgcgattgtcagagtgaatcatttgttcaacgcttgagaagtctcaaaatgcaggcatacccatcgtgatagcgctgctttaggctagaacagcaagccaagcaggtattttactttgacgccaaatgaattccgtcgtcgtcaattggaagcctgcatttcactgtcggcaaaaactcatggccactccatctcagcgaaatcaatttcgcccatcacatccgtcggcacagtcaaaatgactagcctcatatatagcaagattatgcccaacagagccggaaaactagccctgggctccggccctgtttacaggtattgtccctactttgagcgttgttatgcgcggactaatgagaatggagtcctccaacgtagtcgaaagaatcctccgccgattttgatagatctgagtatctccgggtagaaacgaaagcgagcacagatacggacttacgctcgagcgtggcaaagaccgcggatgatataaaacagaccagattccagttcaaacctaagacacgtacgaacagcgtccaggagcggtgaaaccacaccaaaccagagaactgtaccgaatactagtactaccccgacgaccacggcttgaggaacggaacaattgtctttcgtaacgttggggctcgaatacgcaatcccgtgccacaggcagagagcgcatacacaaacggtcgtagaggttgatgcacaaacatggtgtttggaataatgggttagccgaatgatgggttgtaggacatagcccgcacgctaatcaaatccaagccgcgcctacggtggagaggtacgtgaatggctagaaaaaatcatcatggtggatgccctacgcagaacagtaggactagagtaggctagagttggagataagtggtgcagtttgatacagtgggaagcgccttcagcttcccatcagaagacaaagaatgcttgtcctgaaccctaatgcgccaagacacactaagcctatattgatttagagcgctatgggcttcgtttcgagacgaaatgatacaataccagacaggtgatttcaatcacgtgggctgtaaaatgactgaaacaaattaaataacgttatgccatgcaagaagtatgacgtaaccgagatcgtaaccaggatctaatgcgagacctacagatctgtcaccgaacaaggacaggaccttatttgaaaggctttatcaagaccttgcagcgactttccatactttttagtttatattcgtcaattattcactaagcctccttaaccggccccaaatagttgataattatgcagaaaccaaactaaacagtacatgaactcgactagagggacaggattctgattaagtggacgctgttatgccagattgcccttgttcctggaccgcgaaacgcagcagctccacgaatgtttcaagggcttccggcgcgagactttccagggtgcttagagtctgggcatactccactatcgcagtagccacatcatccagcattcgcactggaaatggcatggcatgttcggaggttgttttgaacatggtctcgacaacttccctcttggacaacgacgggtcaggctccaaaccaacgctggacagctgctgtttgatcttgacatatgctgtttcaacttcaggatcggttgcacggctaaggaactcaaagttttccaccaccgtttgtaccatatagtttccacaatagccgccggcgatgtcaaaaagcactgtggtcgcaattcccagcggcccaggcactttcattcctatttgagcccccatcttggagaaagggaacctgggcgtattatggaccttagtcagcacagccagatgtgaccgcggttagcagttaatccgaatccgaaaccaacttgtcagctccgccaacctttacccattcactccacacaataatggaggaatgcaacggtgtttaatgcttgctggcaagcagcctgcgtatccagtcagtaataataatggcccatccacctcaaattcggcggcaccgtcatccctagaaggagttatcgttccttcatcacaacctttgccccccgaagagcgtgacctcgcgatccgaatttttgacgagattactctgcactttgagcgttcccaggaaactgacagcggttataaaccgatcactcttatcagactcatgaaacacgaagtctcagagacagacgaattcttgagcttctttttctcctttaccgggcaagatctacttgacgaggaggatggaggaatcggtcttgatcgaatcttattacaccttgctggtttttctaactggtcaactgaagagcaaggcactttaagcgaaagtctcgttacatttgccaagtatctggtggacaatttcttcctaccccgtaagtttctagaccaggcgcgggacgaaaagtactcaccatccttagtaaaagcattagcagctaaaacccctcaacctacccctgcctcctcccggtccaaactgcacgaactcgccattggaacccctcaacgcgtttcgaaccttcgaaaagactgtcttcgtcgtgaccgccaccgatgtgttattagtcggaaattctatgcccaagaagcccagaatcgatataagcgagatgggcgtgatgtgaaggatgatgatggcaagtcactactaccagaacgcgatatcatggcgtatctggaagttgcgcatataatgccccactcccttaggtcaattaccagcggagggagtgaagggagacttgtaagtcgacatgatatggccaagctttcaaccctgcctgacagtagtttaggcagatccgaagcaaattgcccaccgaatcctaagaatgttcaatcctagcgccatccacttaattgatggtgttgatattgatagaccgatgaacgcattaaccttaacacacgaccttcataagttattcggtaactttgaaattgcattcgagccggttgactcccaaccgcacacctacagaattaactacatagattcagaccgcatgggccgggtcgaaaagctccccgtcactgttagcctcttcattacacccaatcgggatgtagagccgccttcgcctgaacttcttagaatccatggtgctattggacgcatcctccatctcagtgccgctggcgagtatatcgatgagttcattagagatctagaagagatggagagtggtgaagtgatgcagaacggaactactcgtcttgatgattatgttcggtttagggtttcctacagctaggtagtcctctctatcttcatcgtcttggtccctgcattatgccaggctcatcgtgtggaggcactttgacgaaacaaagctaaatgggtggagactgcggtgcaccagagtgtcgggaatccggctttgttgaatccgtcaagaccttactatactgacaccaacggaatgtcagcagaacgtgccggcgtatcggcgcgaagccgaaggattgtgtggtcttgtgagaatccctgtcacttacattgcggtaaagaagggctcttcaaagaccatcataatacgtttcgactatccgtcaacgctgtatcgtaccaagaatgcggacaggttggaaatccgactgaaccattagtagctggtaatcttgaacatgacaccaggtagaactctgaattcaggtgtagctcgccgttcagcctggccgtatctgagagcttacagcttcaagtgtatgagtccagaggggcagaggccactataggagttaagtctgaggtccagatggaagatgaggctgagtgcttttagctgtttacctcagtttgcagggtgcaaagtctcacagagtgggggccgcaggtaaaatggtctcgtaagcattgtagacggcaaacggaccctttgttagtggtcgttctatacatgctgagcaagatttggcggctgagctgctgttcgtgttctaaaacattagctcgtttgctgtcttctacatataaatatgaccgaggttcccaattccaaatggccctggcacgacattggagatcgtataagttgtgctttggttgttgatgcaagcttgagtctcgactgaagatggttcccttcgttgtgcttctcgtcttatgctctgtgctttcccatgcaagtaggccaagcttaacccgccgtcgagaattgagtttcccagagccaaagcgtctctctgcaggggccttgtcgtcaaaactcacggctagaggagaacacgacactgttttaaagcgaaaggcaagcttcggttatatcgcgtacagcgttgaaaacgggggagtgttttcaacaactttggacgtggaatcgcaattgccaatcctcgcgttggaggatatggacgctggtctcgatagcgtctctttcacggaaaccgagataaaacttggaatttgtatctactgctgtcaaggaaagcttcaggccagcgatcgcagagacgcctgaacttgttgccgtcacttcccatgccggctgcgattctgaaggtggccgctctgcccatcgattcgttcattacttaacttgtccctggaagtcactgctgaagatatattagagtaactggagtcaatttcgagacaacagggttagccttgagaaggttcagattaactggcatgagcattatcggcaacgagagtgtctttctcacacaaggcctcttcagagattcaaaaaggcggaccgacgcgagttagacggccagacgctccattagctcctcaatcctttccaccaggcccttcagaggtcggcacgcttgattcatccagaactaaatcctttggtatacaccacaccgatctgaagataatccactcgccgatgaatttatgtaagtgccagggtattaacgattcccagaaagctgattgtgcagaccatatctgcccgtcgttgtgaagtgcaagacatgcacgctgcagggtgatatccaactctcccaagggcagttcaatgtgggagagactgaggaaaacgagtccgatttcgatgtcgatttcgatttcgagttggacgagtcgattgggttcttcaccaatagcagcattgagttcttagtcaaacgactgttctcgcagattgagcttgagcttgaactttcgtctgacggccctctgttagatctcagtgccgcacttcccgctattggactcacgccttttcaggtaggtgcaccgccagactcagtagctcagtggtataacatccgatacagatagcagatgtcattacctttggccctttgattggagatcatcatcacagcagaccttgaaggggacgtcggattctcctacggcttcaacgttacattaagcgtcgccaggaagggtttttgtaggtgatactgataaagcaggtccctgataactcccaaattctgatcaggattctcaacttcaataaaaatgtgataaccggcttgtgagtactcgaaccaagtagagtcgagcatgatct

SEQ ID NO: 3832 - DNA, 1766 bp, Emericella nidulans
gcgcaacgccgctccggtcgactctcgggaaaagccaaggcaaagacggatttctaggcttatgtccaagatccccccgctgggctgtgcaagccaagcttactcccttgagtccgcacaaggccattcccccccccttcttgtcacatcccaaggatttcctctccttatttaccttggcttcccccatcttctcaaccccccctctctttccctctcattttgctgatctgtcctctgtttcggcacgcgtctttttgatgtattgactgtttggctgccgaccgtgcctcttaacttttcaaatctttgacctttgattcctaaacgcctggctcgttgtgtgagcttggttatccttgtcaacagagatcctttctctgactcaaagtgagcatttctcgtccgctcatcaccaagaaaagtcatatgcttggcgccatggccgaagaagcggtcgctcctgtagctgtgcctacgacccaagaacaaccaacctctcaacccgccgctgcgcaggttacaactgtcacttcgccctctgtgactgcaacagcggcggctgcgacagctgctgtggccagtccccaagctaatggcaatgctgcctctcctgtcgcccctgcgtcgtcaacatctcgtccagcggaagaactcacttgcatgtggcaaggctgctctgagaagctccctactccagaatccttatacgtgagttagaaccattttctttttgcacgctcgcgtcgaaagctctcaagatcaaaggacgcaattaaccctgtttgtgttataggaacatgtctgcgagcgtcacgttggccgaaagagcacgaacaacctcaacctgacttgtcaatggggtagctgtcgtactactactgtgaaacgcgaccatatcacctctcatatccgggtgcacgttcctctcaagccgcacaagtgtgatttctgtggaaaagcgttcaagcgtccccaggatttgaagaagcatgttaagacgcacgctgatgactcggtcctggtacggtcgccagagcctggatctcgcaacccagatatgatgttcggaggaaatggcaagggtatgctcctgacgtgtaccttcattgctaggcgtgactaacatgaatctcaggctatgctgctgcgcactattttgagcctgctctcaaccctgttcccagccaaggctacgctcatggtcctccccagtattaccaggcccatcacgctccccagccatcgaacccgtcttacggcaacgtctactacgctctgaataccggcccagagcctcaccaagcgtcgtatgaatccaagaagcggggttatgatgcgcttaatgagttctttggtgacctcaagcgccgacaatttgaccctaattcctacgctgccgtgggccagcgcctgctcagtttgcagaacttgtccctgcctgttttaacggctgcgcctctgcccgagtaccaggcaatgcctgctcctgtggctgttgctagtggtccatatggtggcggccctcaccctgcgccggcatatcatcttccaccaatgagcaacgtccgaaccaagaacgacttgatcaacatcgaccagttcctgcagcaaatgcaggacacaatatatgagaacgatgataatgtcgctgcggctggtgtcgctcaacctggagcccattacattcataacggcataagctaccgcactacacactcgcctccgacacaacttccctcggcacatgcacaacccagacgact

SEQ ID NO: 3833 - DNA, 4547 bp, Emericella nidulans
tgtttagatctcatggaaacatgaactgtatatttatcattgactgaacaaaccagcacctcgagacaaatcaatagttcgagactaatcaatatctaagatagacaataaatatgttaaagcccagtcaaagcccgtctcactagctactgtatctgaccataatggctgcataggagtaccccacaggtagccgtacataataatagtgcatcagtctcactggctagtcatgctaaggtggggtctgtgcctacaaggcgaaaatatgccaagtgctcttggtgctttgcgctatctgtgaaaccgtcacccataacgctgttattgtatatggacttgccctctgtaaccgcagtaaggggacgggaaaacaagcagcttactcaggatccagcgtaaggtaacttgatcaagtttgctgcgaataatttttccaggagagcatgccagtagcgggcaatttccgatctgcagggtgagtctagtgtggagactgctcagctttcaaggcaactcgtgcaaaaataaaggcacaaaagcccgcaagtttgatgttaaaattactacaatcagaatttacgcataagcgaaccatatcatctccaaacatatgtgttctccgcttaaagttggaataggggctgggaaagaatgactgctattagcgacttgcatgattcatttaagatcaggtacttactggtttgcagcaacatctcactcgtcggagacacggcatagaatcagcagcttatcaccggcttcctttcctcaataggttacgtgacgaaaaagacgattatactatgtgccttctgaggaggtccgctccgagttatatagaagcgtctcagtcgggatttgctgtatgcgtttctttggctttagggtcaatgcgagtcccgccgattgctctacagcaccagtaaagaggacagggggtttttttttattttgaattactggtcagcacactgggattaaagtgtcctactagactcaatagagccagagtctccgcctggtacagagaggtgtttagtgatggaaaaaccgacgagatggaatgcataaaccaagtctaaacaaagccttgtatacatagtgagtaggaagcttcaataatctacacgaaaaataatgagagttagcaaataccaaggggcattgtacagatctaattcagaccaaacccctgccgctccaacaagcccctcatacgatccctcccgtccattctcccatcagcattccactcggcagcaaatctactccatggtttccgaccaagcatcgaatgaagtgcgtagtgcttgctcagcacgtcatcaaacatcgccacattctcgtcctgccgctgttggttgctatcccaggtttcataatggagtatctccctcatcggcagccgcggcttgatatcctcatgcgctgtcgggtccgcatacccaacagccaacccgacaattccaaatgtcttctcggggagatgaagtagttcgaccaagctctcagcgttatttctgactccgcccaccatacagattcccaggccaagcgactcagctgcgatggcgacattttcggccgcgattgaggcgtcaacgacacctgctatcagcatatcgatcttctcgagcggctttccggccgttctgtacttgtctattacgtttgcatgacggtgtagatctgcacagaagatcaagaatagcggcgcttgtcgtatgaagtcttggtttccggagactcgcagcgacggcgtctttgtgctgcgggtcatggattgcgacgacggaccaggtttgcagcattgagaaggtggaagcactttggccggcagcaataagtgtttcgagtgtcccgggtggaagtggcgtaggcaggaatgcgcggattgaccggtgctcgagaattgttgagatcgtttgtgggacggattgattggagatatgtaaggattgaccgtcctgataccggcgttcaattagaccgctgaggtcttttggtgttgctggcggggtaggagtgtccattcctgctgaatgcgcgcttcactcttattttcgctctctgagggttgattgatgatggccgtcgggagaaatcatgatctttatagctactgcgcgttaacaccatgtatggaatcaaatcgacaatgtatactcgtgtttacaaatcatacattattcatcattccaattctgattatgtaggtcacactgaatgggcatctgatgcagtagagtaatcatgcataggctgtctgcaggccttcgaagccgaatgcccgaattagccgggctaagagagctagcagatagtacagtagcctattgggctgctatataggcagggtatatgcatgaatcaaaaaagcattgcatatccgcagcctgtagggcacagccttctcggccgacatgaaccctgtgctacagcagttgtattggcctgccttaccaatacagtgcaggacaagaacagtgtcaacgaacgtaggacacctctatcctctattatagactaacttagtggaaatgttagaagacagcttgagtgagtctcgaatatattgtgttcaataggcagacaactcgccaaccgcctgcgggcaggggggttgcgcgtagaggcggccgcaaccaggtcggcctgatccaattccaagtaatacagcgagccacagaatgccgataagactctcgcgctagaaagagcacaagagtagaagaaggcacctctagcaaaacttacggtgtatcgatggcttctgcatgtccgcttggaaagaccgctccatgtacaatcaataagggttctaagacgtcaagataccggagctaatagatctcctcgtttctacctagcttgaggtggaagttgtctgctttgctcagaaaagattaatttggatcgtgatcacattgagcttatatcatttgtttatatcaggccagacctgggtacgatggatctatgtttggatatacttgatttcttttactgttataaattccgtgtgacatatatcatcattcttgcaaatgatgaattgacagcgacatactcttctagtatggtgcggcgattgtatatgcgaaaagagtcctgactcatccactgttgcctctataatttagccagcgcctgcgtccggcacttgacagcaagcccataactatcggacgaaaaggtaatggtcgtccccctaggaaggaagaataggtcgcctgcctttactgttgctgtgttgccagtctcgtcgcgaaaattgaactcccctaaaaaccatcaacctatgattagatatctagggtatgggtacaagtagtatatatacctttaactaaatagcaatctagtcatactcgtacgctggggtaatggatacaggctcttctctatacggaaccaagcgccgacgatgggatttgggattttagtgttttgagtgcctagctgatcggctagcgaaatgacgacatttgtaagcctaggacagcgagtgatattactgcattcagcgccgttgtcgagccaatgttgactgcatccagaagagcaaggagaccgcttgtggctaggatcgctctgaccggcatctgggtgtcagggtgaactttggcaagatgatcctgaaaagggagtgctgcagggaattctgtcagataaaaatgcatttatctgtctgatatgagggaacctcacccttatctcgcgcaggcgaccataccatcctggcagccgacgcaatcaacgcaatcgtagccagcagagcagtcactatcacgaccagagtcatcacgctactggccactcgagatttggtgacgccccggaacatatcgatgaatgggtgccctgtaggactgctcaggccttcgtctatatctcccatgcagaataaaagggcaatcatgaaggcgaaccccatgaccccattcagcaaaaccgagcctagcatgcagaatgggacttccattgccgggtatgtcatctcttcgccggtatgtatcgcgccgtcgtaccctactcagtcaaagtcagccccgtactacatgccagagatacaggatgacaatacccgttagaacatagcaactggagagcattccaattgaccatgctattccatcactcgaccaaccggagctattcagaaatgtagtgaagaaaaactcggcagaatgcctgtcaggagaacaaacccacaggaccgtaaagatagcgataaaggcacagacatgaattagcagagacatgctctccaccagggacaacagacggttaccccagatattgattgctgtttgagcacaacgagggccatcatataagggtccactgccatcgttccatgccgtagctctcgtagttgagaactatggaccgctgaagcattgttgccgcaaaaaatggggcactcgctgcgaacgaaatccatccgaacgtgcctatgtaggtaaaatctgttctcagcgaagaaccttgactgcgcaaaatggggcttagcatacccatccagcccacagtccagc

SEQ ID NO: 3834 - DNA, 4556 bp, Emericella nidulans
gtagcgtgacgggtgcctactgagatctcctgttcatgttttaacaacggatcaaagacaacggcacaacaatcttgatattgccatctcctccactcccttatggtcctattgacgggcataggccgaaatgaggccagtacctcaattgattggcggtggacacagtagcttgtgctaatatatcatcggataggtgcggcgcggtcccgacgctagcggtctgttatttcctactctgcatgtcgtcaaataatctcaggcagcacggaataccagagacgaaggttcaggacatgacttgcatgtttaagtctgcttgttatttgttttctgccccttttgtggatatatcgaggattggaggggaagatttactgcggcgacagcctcattcaaacaaacccctgaacgtagctagccaggagtcatcttctttgtaaacgagccagtatcatgctcgttaatcaatacaaagagagaagttctccagggcagttgtggtaaaagaacgtgaatccatgtatttgttgcattccacagcaggataggttggagatacccagcatatgcaatcgaaatatgaggatcaatgctgtttctgcgaagagactacctcgctcataaaggactcgtcaccatcggacaagagctcacgagaagggagactagaaatgccgtttgtaatgggtgtgtggatgcaatagaagagatcttcggagtaacgagcatggtcttgttatgcagccaccgtgatatagatgaagagtgattgagctccgtgttgggattgagcagccgcattatgccggcaaccgttgctcaaaactgaacgagcagacaaatatgaagcagcgactcaaacggtcagttacagtatctatagctcaaaatcagctaggctaggcagcccggatcccttatctgctgcaggtacgcccgcggcataagcgtcgtattggtcaagggccgatgaatatcatggctgtgcaactgggaatgtcaccgcgcccaaagagggaacataatgactttagagattttgtttaggacttgatggaatgaaactaacaagtgaagacgaacagggtacattgtgcctcctccactggtggcatatctacatgcccctgaagaagtcctctattattgctacgtttgcgcagagcgcactatccgatcaccaccatatacatacagcgttgttcctggcctgagctggcatctgcggattcccctatactaaaacatcgcaaatcaaaattcatactagcggaagatgtacgtggtcttttcaattctatatagttcaagccaaacccagctcgtcgaaggcccaacaagaagtagaaacaggtaatgcccgtcaaagtatctggggtgcctctaagtctcagtcctacatcttcgtccatcacttgtttaccatccgaaaacctggccgctaccggcactcatgtctgattataaccaccagatccattcaattggacttccccagttgggaaacctccagcaaagccaccgggtgctccgctagaactggggatttgctagtcggaagggtaatagacttggtgatatcgacaggtgccactgatagtgggcttctacatgccaggaggagcatcagtctcctcgctggtccatcaagattgaggttggaaggagataaaggtggatctacatgagtgcgacgcaaatggccctttcttcgaaggaggatttctgacccctacacggttctctttcataaagttgattattattgttatcctgacatatcagggcctcagagtcatattgtatttttaaccgagactgttcgtatctcatcaatctggcatctattcagtactgcagggctgcaaacgttaagttcgacgacggagctttcagctggcagctcgagctcatagctctctgctccagcctagtagcctccaaatcagtgagtcggtggtggaagaagagctgagcccgtctcccaaagtaattggagaagagtgtaccgagccttcctcgtcctaaccagagccctgagtagccagctgagtggagacgggagtagatcagatgcttttatagaccatgctaggacttatgttaggaaaatagtcttattaggaatcgtcgctgcattaaaatagccactagaaatattggtactttgaggaaagcacccaggctcaactgaagtaaatgggtcaacctaacatactgcgtacaagagatcaattagccacctttgtacagtgacaaatctacaactgaggcttgatacgttgagcaagcccatgctgtttgagatcaaagtcgtccaggttcgacaccttttctcatgctgccacaaagtccttgacgaacttggcttctccgtcagagctgccatatacctcagagatcgcacgcagttcagcgtgagaaccaaacacgagatccgcccgagaagccttccatcttgcctggccagtcttacggtcgctgccaatgaatatttcgttggtgtcatctgccggcttccactgaacacccatgtccagtaggttgacgaagaagtcgttggtgagttggccggggcgtttggtgaagacaccgaggttggaacggtcgtagttgttgttcagcacacgcagaccgccgataaggacggtgagctctggaggagagaggttgagcagctgcgccttgtcaatgaggaagtcctcggtgagcacacgaggcgttcctcggccgtaattgcggaagccatcggcaatgggctccaggttgttaaacgagtccacatcggtctgctcctgggtagcatctgttctaccgggtgtgaaggagacggagacattgtggccagcatcgcgggcagccttctccagagaagcagctccggcaagcacgatcaaatcggccaaggagacgcgcttgtcggtggactgtgcgtcgttgaactgcttctgaatcttttcaagtgctgccagggattcgctcagccacggctggctgttaaccttccagttcttttgcgggctcagacggatgcgagcaccattggcgccaccgcgcttgtcacttccacggaaggtcgaagctgaggcccaagcggtggaaaagagatcagtatggcttatcccgctgtttaggattgccttcttcaaagtggcgatgtcatcattgtcgatgacggggtggtccagtggcggcacagggtcctgccaaatgaggacctcagatggtacttctggcccctggtagaggactcgaggaccgacatcacggtgagtaagcttgaaccaggcgcgtgcaaacgcatcagcaaactggtccgggttctcgaggaaacgacgcgagatcttctcgtactccggatcgtagcggagtgacaggtcagttgtcagcatcctgggcgggtgcttaatgctggggtcgaacggatccgggatgaagggctcgactccctttgccacatactggtgggcaccagcaggactcttggtgagctcccagtcgtacttgaacaggtactcaaagaactggttgctccacttggtaggggtcttggtccagatcacctccagaccgctggtgatagcatgtcgcccggtcccagactcgaagccgctctcccagcctaggccttgtaactcaatacccgcaccatgtggttctttgccgagatgggttgcagggcccgcgccgtgcgtctttccgaacgtgtgtccaccagcaatcagggcaacagtctcctcatcattcatggccattcgaccaaaggtgatgcggatatccttggccgcgagaaccgggtcggggttcttgttgggtccttctggattaacgtaaataagacccatgtgtgatgccgcaagcgggttgtcgagttctccgttcaagtagcggacatcattacccaaccattccttctcgcctccccagaagaccgactggtctgcttcccaggtatcacttcggccaccggcaaacccaaaggtcttgaaccccattgattcaagggcgacattcccggcgagaatcagcaagtcagcccatgagatcttgcttccgtacttctgcttgatgggccataagagacgacgagccttgtccaagctgacgttatccggccagctgttgagcggagcgaagcgttgctgaccctgtccgccaccgccgcgaccgtcaaagacgcgatacgttccagcactgtgccaggccatgcggataaagagtccgccatagtgaccaaagtcggccggccaccagtcctgggagtctgtcatgagtgcctccagatcccgcttcagtccgaagtagtcgaggctattgaacgcggcagtatagtcaaagcccttatccaggggattagagaccgagttgtgctgacgaaagatgttcagtttgagatcggtccgccaccagtcccggttgttttggccggcggcgtcaatgttggcgttctggcggctgtaggggcattcgttagatcccatttgtgtcttcaaccgcttgattcgataaagggatgataggaacgatgagaactgatgaagaccgtctcgggg

SEQ ID NO: 3835 - DNA, 3467 bp, Emericella nidulans
cgtggcttggttgagctccggtcctaattatccgctggacgttttgtaccgcaatgcagctgttattataggtactaattaaccgaatgcgagcatcatacggcccattctctagtaagtcggagctcatctccgatccctccagggttagatcgacgctcgagacgagggaaaaggcgaccttggcctgtcctgagtgacttcgtaatgacttgtagagactccgtagtgacttcgagagtgactccaggaaggtgatagtacagagcaacaaaagggaaaagccacgatctttcgacgtttacattcggtacactggcaggaacgaccgccaataatattgtgttggtggctccattcttccactgagaaacagccgggcagtccaaaagtaccatgtgaattgcaatcgtagcttttgtctaaagaaatctaactatacggtcgtgttggcgcgatcctcttcctcgttcgccttcgtgtacgtttcccgcgtatccatctgctcctgctcgtcttggccgagaatcaggttctcctctttgagagcctcttcctccgtagcgacggcgtccgctgccgaggactgtgctgcagtctgggtgcgtttctgtgttgtgttcagcactggcgtagtgtcgttgaagatacgaagaagcagggcccggcggtcttccttgggaagcataaggttgaccgagtgcagggatcgccagagaggaaggaccattcgttcgctgaacaagttagtaatgtagtttctaattagggcggtgattcacgtacctgaatttgtcgtctccttcgggagtgatgtagataatactgcagcccatcgggatgtctcttacgcgctcgccgatctcgccaagattctgccagccgccgtcgtcgaccttggggaacatctccaccaggagctttcggaaagtctccttctgggtcagggtgacggcacgagcagggcccagccatggctcgaccagccgtagaccatcggtctgaatacgccatcggcaaacgtcaagacgctgtgcatcttgcttgacgaacatcttgacaccgcagtggacaaacttaagaccatggccctggttggcgactaggatatcgcgtgcgagagcgctggtgtagtaaacagttcgtgacatggtcgcctccgcattacggaccatgaaccgatcgcgggggaagcgatctgagatctcgaagaagtcgaagatcggcttgagctcttcgtggttagggtccaagtatctgaaaggctcctcaatgggttggccgggctttcgcttgacgggcttgggctgagtctcgggtgctgacgcctggggtgtgtctgtagggacaggagtagaagtgacatcggacgtggcgacatcaggctcctcggcagctggaggttgatgaataggacggtctccaatcacgacttcggctccgctatcgagcttagtgcgcttgaagggaagttcaccatccacgccatccgcttccctcttcgctgaagggacctgactagtaacagaataaggaggctggtgtgtggtctcggccacagaagcattcttatctttctccaagtcggcctgttcgtcatgaggtaccagatcatctagcgcctcgattttctccagaggctcgccggttccattcttctgcttcgaatcaagctcctcggccagagcagccacagtgcccttggggatcgcctttgatggattctcaggcttagcacggatctcagactgcttctctagaaccgtgatgaagaaaccaccagtgtcctgcagatgagggtatatgcgcatgcatcgttcaagtggcatgtcagttataggggggaacatgctctcggagagccgaccgaggccagcaatgcccgactgggccctgtgctcctctacctcctgccagctgctccagaaacggttttctctatcagccactttccatgatcgtaaaccgttaactcgcttcaatccaggcaattcattgctgcaatcgatgatcttgactttttccaaaccaccacaacgctcaatcgcactagcgacaacagcctcgttttctatcgggttcatactacatgtagagtacaccacacgaccgccaactttcagcatttgcagggcgcggacaaggatccggacctgtgtcatgtgcagcccgttaccattctgaggtgtccagtctctccagacaccataattctttctcgccgttccgtcaccagtgcacggcacgttcgcgaggatgcggtcaaacttaagatacctgttcggggtcggcttgccgtcctcactcggcctagacggcagtctgatggacgggtacatcgtggcatcgtgattcgtgacgataaggttcggggagctgagacgcttcatctgatggatcaacatgtgtgcgcgcttgtggtcgctgtcattggcgatgagcagaccagtcgtccgcccgtcgtcattcaggccttctggcccagccggctccggaccgatcgttccttccttcgccttcttggcaacctcaagcattgcctcctcttcaccggcgtgaatcatctccatcaactgcgcggacttgcttccgggggcagcgcacatgtccagaaccgtcattcctggtcgcaggtccatcaggagcggaggaatcatgctgacgacctcttgtcggctgatatttcccacatccgtctcggcaacgaggaacttctggaatgaagcgaaaggtgcaaagcggcggatcacctgcttgggggtcgtcatcgaccatgcgagacgatcagggtaccactccaccggacgcgggggctcgacattatttccctcatactgcacggcagtaatttcggggatatagtggttctttagtcgttcctgtacgaaaagcgcatggctttggaaagtatcagcgctgtccatgacgtctcgaaaaaataaaaaatgaaaaaagtgaaaaatgaaaagagcataccctttggatcctgtgaagcggaaactgttgggaagctccctccgcagcgtctcccagaagatttcgcgctcctcctcaggaatgaagccttgcgcattgtagtagttctcgaatcgctcgttcgtcttcgggatgtcctgccagttttgacgctcagagcgtccaccgccaccaccacctttaccaaactgcagcagaattaacgtgtgtgaagacaagtgcgcgcaaaatgactgaccttcttcttgtcacgtttacccatggctagaatggaaaatgactgtgctagtcgctgctgtagtagtcggggaattttcgagctccggaaagatcccaccagcaacatagttattccggagctagctctattggttttatcgggcgggagtgcgacggagttttggcctgcataaaaatcagtgtcagcgcgagaacacaaacgtgcgctggcactaagctgtcttaggcttctctagcagcctggaaggccc

SEQ ID NO: 3836 - DNA, 2240 bp, Emericella nidulans
ctcgacactcacccgctccactccctccaaactttggagatttgcttctatctatggaccctgtttctgtgggcaccgccatgtccatcaacctatccacgacggatctcacttcgaaggttcacgaagacgaaaatcatttccagctcgaggagaacagcgatctatccgacttcaccttctggtcacacaaggccaagctccagcgagaatttgagcgcgtccgagacgaaatcaaatcaatcatccgcactgagtgagactcggggaacttggagctcaaatacgcatccaatacgctagaattaccatccatagactaggtcaacgcaacactagttagacgatcttgcaccttttgcgtgatctgcccgaatcctgattttcgttcgtgaacgtcggctgttgaacacgcatagtagaggccaaccagaatttatcttggtcgggctggggacttctagtcctctttcactccctcgtcatttgtctggatgccttaccacaacagccaggggctttacgttactggagctagttacactactcgccggcgtctgatcttaaccctttgcaaggacatgttttgcaaatcatgtggaaatccctcagacgtttgattgtagacattactactttagataaataaatggtgaacgggaacctttgattgccctcttcgacacaatctgtgacacagaatgtctgaatttcccgtgttcatgctggattggttttcatcgggcaattttgagacgggtgttgggctgaccagcctgttatctcgtagtcggaaagtagtatcactattttagggttaatccgttcctggactactaacgctcttccatcctgcgcccaaattaccacacctgaactgctgcagtcatacttagacatcaagagggtctttctcattgcgctgtttatatttgaggtcggttcattggtttgcggcgtacgccgacatctactgcgctgattgtgggacgggctgtagccgggttgggcagtgcaggtatattcacaggtgcgctggtcacgatcgcgcatgttgtcgaattggataaacgttccctgtactttagtctgatcgggggcgtctatggactggcgtccatcattgggcctttggtgagtcttccacccctgctctaatgcagacagttctcgactaataattgctttcaataggcttggcggcgctttcacagataaggtgacctggtgctggtgtttctatatcaatctactgctgggcggcgtagcggccgtcggtctgctgcttctcaggctgaagccacagcggcaaagccaaaagacctggaggaagatattctggagccttgatcccatcagcaccgtcatcttcgttccgtccattgtctgcctcctcctcgcgcttgcgtggggtggtacaacttgcccctggtcgaatggccgcaacatcgccctctttgtcgtctttgccctaagtctaatcagtttctgcgcgctgcaattgtacttgagggaggatgcgactgtgcccgtctctatcgcccggcaacggaccattgcatgtgcctcactatttgagttctgcgtaggcgcatccttttttattttcatctacttcgttccgattttggtatgtcattcccctgcgacgccagcccatatcaaatcctagtatgaatacctactttgcaacaccagtgctgactatttctcgcgccgctgcagtttcaggcgattaaaggtaccgacgctgttacagcgggcgtggatctcctgccgcttattctgtcagaaaacgtggccattgccatctcaggtgcgctcgtcgcccaagtcggctacttcgcacccttctttatagccagtgcggtcgtcatgtctgtaggcgcggggctctgtctgctcctcgacttgcacacgtccacttcgaagtgggtgggctaccagtttctctacgggtttggcgtaggtctaggctctcaacaaggcacggtagctgccaaggcagttctccccttcagcgacgtcgccgtgggtacggccgtggtagtatttctccaagtgctaggtggctcgatctttgtccccgtggcgcagagtcaattcacctcatgactcgttgctaaccttcttgagctcaaaatccctggcatcagtccagagagtatcatccatgctggggcagcggcgcttcgagacttggtgcctcaagagagcctacacaggtgctcgtggcgtat

SEQ ID NO: 3837 - DNA, 2084 bp, Emericella nidulans
atccttctcggcaccctcaccaatatccccaacgaatggaggctacgaagccgcggagtaagttcacggatgcggtgcgactagatacacgcggaaacggattttttggagggaatggcagtgcttctagcgacgcagagcttgatgagcgggaaagggatagacaagcggccatggcgaaattgacgggtggctgtgttgaatcgcccgccactcctttagctcaccaaagaccagccacacggggaagagcggccacggaccgcgaagttaatcaagggtctaataatctgaatcattatgacagcgctgaaagccgacgccattcacatcatgaaccgaagcggaaatcattcagggacgcaatgaagtttccgcgcgcaaaggacaaaacaagaaacggctctcctgctaagggcggaggcgaatcaactgctcctggacaattccctgggatcgatgcacctgtctcagcagtcaatgctggtgaacggagagtactggtgcagtacaaaaaagataacctgaagctcagtgtcagcccgtcaacctcagcctatgacatattagtatctgcctccggaaggatatcagagattgatcctcctcggttcattctcatggaatcctttactgcacagggtttggagcgccctttgcggcagtacgagtgtattcgagaagtcatgaattcatgggcgcacgatgcggaaaatactttaatcatcgtcccagctccgagtgtccatgcacttgactttctcgctgctcagaacgtgccgaaagacccgccaatggatgccactttccacatttactactcccaaaaaccacggaagtgggacaaacgctacgtgacaattcgatcagacggacaaattgtgtcgtcaaagaaggagatggcgaaagagcagaccaatgtctgtcatctctcagattttgatatttactcgccaaaatcaagcttcctggctcaaaaagtaaagccgccaaagaaaatttgctacgctgttaagagccagcagaaagcgagtatgttcctcacaactgagaactttattcatttcttttcgaccaatgacaaaacaattgcggatggctggtataaagctgtccaaaattggcgcagttggtacctggtcaacaaactaggcgctggccagattgagaacaacgctgaaccggcgcaaactgagccagcgcagtttcggtcaattcagccacttctagcatccattgacactgctgagcaagagacatctactgagcgtccccaagcgcggcaaacgtccttacgaaggggaccatcccgcgagcacggcccacccctgtcgtccctccccaagtcacttacaagcacaacagaaacagaaacatccactacacagacacagtcatcaggggagtccccattctctgcctcggggctcttaggccgaacctatacgctgcgccaaaaggccatgaaagaacgagaggaccgcgaaaagcgcgaggccgaagtcctcttccagcatgggctgatcggctccaacaccgctaccgctactagtgcacctcgccagcggtcacagccagggagtcgaacgaacagcataacctccgcgcaggcccagtctcagcacactgattcggagtccttgttaagacgatcacaatctgtcaagcaaggaggtcagaaacccaagcctctcgtcgatctcacccctgtctatcaggagcctccacaacatgcccgcaaaggaagaggagtcgctgttgacacgggcggtcctctgatagacgccgccacgggtccaagtaatgaactggcaggcggcatcgtgatccctccagcaaagacatggcgccgaccaactttaactggaaatggccctggtgtcccgagtccaccgcaagaaccacaatccagcactgaggcgcaagcgcggactcgcaaccgctcaaacacagcgcgcagccatcggcacggtcattacaatgctgcaactacaaccccagttactcctacttcaccacccgaccttggcagcccccaagatcaagtgtcaccttcgccccaaatagccttcttgcgcgtacag

SEQ ID NO: 3838 - DNA, 3644 bp, Emericella nidulans
gcctatccttggcacccgcaaactccccattacgaaacatatacagtctcgtataccgcaatcccctcacttctgttatggataggcccggtctccggttcagtgaatttccaggaatcccccgctccggcatcaagcaagaccgatacaaagaacaaatcgagcagactccgcaccttctctgtatcgtcgtacccgcgctcagaccattctgtcagcaaccgatccactcgggacacaccaccgacatcgaagtgctgccatcggccgtggggcgggattgtgttataggcgtttgggccgaagtctctctatattcgtggagatatgttagggaaattctggtgacgaatgggatatttacttctggcgacagacctgaataatcccagttacatactcgactgtctcgtcgagacgctcggggtggtagtcgaagtggttaagggcgttccggttcgcaaggtcaaggacaagatgtgcttttgagcggacggcttggagggtgaggaggcggtttacttcggattcggccattgtatcgtgttcaatgctctggcagtgagtttgcacaattgagagaagaggaaacaggaaacgattgatgtgagggtggcaggccagcagcccagctggaccagcctgtcatgtagggctgtccaacgtgcggcgtcggttacagttggagcttatcagtaccttattggcacgatatcaactccggctagatatacagggtggagacgacgacgcgataagaccatatcccgcttgctccttagttgattacttcattgccggcactctccgcagcggaatctaccgtaaggcgctgtaatgccgagctaacatcaagggtcgagtctagttgcctcaccgagctatgtgctagaatgtcaaatagttgcacccccctcgtgcattgttttgtgacagcgcttaaagcgcgttccagtatgaagaggcgaagtatcatgttctaagcatattattgagatcgtcgcacttcttcgcaaaaggatgatctcctatcctttgctctaagcgactgggatcgagttgcaggaagagaagccgacgtctagagacagctagggtgagactgaaaattgtgagatattgagtattaagagagctgttaatggagacaaatggaggagacggaatactaatgtgacgttcaagaatggctagttatcgtgagaagaagatttgagtatagtaattatgatatactgcattcagtcatatacttcgttacgatacatataggtcgaaacagccaacgcctggggggtaatccataataaaggaaatacaagtaccgaggcagtgagattagaacgcaaccgtcgaagccaatccatccaactcacgctgccagttgcggtgctgactgatctggtaaaagaacttgcttgtgaaatcaccggcgtccttgagcaccttgaagccctcactgaggctctcggcgctctctggtccacgagctgtaacaacaccataccattcgacgggctcagcagagtccgcaccggcaatttggacgcccatcacattgcccagaacttccttgaccagctgcgcggcttcgcccatggcaccgagcgccttgaggtgcccgaatgtctcggcaatccagtaccgaatctggccgttcttttggagagtctcaatgtgcgagccgccggggatgaaggtcgcgtcgaacatggtggagcgcatgccgtcatacatgtggtcgggaatcacacccttagagctattcttatcctcgccctgtgcgtagatggcggagcgtttggtgccaatgacgaaggggagcgcttgcgcggcgagaatagcggccttcatgccattgaaggcgatcttgtcgtagccgtcaccgatgatgatggcaatgcgacggctgataatgccaggagccttaggagtgaagtcgaactgggagagacggacggaggtcttgccgtggttatcacgcagtgccttcgtggggatgggcgcgccgaccatctcggccacggcttgagccagggggagatcgatctctgcgaggcgctggcctgcgagccgctcgtaaacgatcgggtcgtcacagtggtcaagctcgaaggaaaaggccttcttgacgtgcaccttctcgacttcggagagggagttatagaaaagctgcgcctggttgtggtattccttgaacttgggtgtgagatcgcggcgcttgcggcctgtaatcggggctgggtgcgacttgaagcccttgtcgctagctggagggttggcctcgaagcggttgggccaatagttcaccgtgcccttggtgatgcggtggcgtttagctccgtcccggttatggttgaggaacgggcagacaggtcggttgatgggtatttcttcccagttcacacccagacgactaatttgtgtatcctgatatgagaagttgcggccctggagaagcgggtcgtcagagaagtcgataccaggcacgatatggctagtgcagaaggcgacctgttcagtctcggggaagaactcgtcgatgttgcggttcagttcgagctcgccgaccacacgcaggggcacctgctcttccggccagaccttggtggcatcgaagatgtcaaactcgaacttgtcctggtcctcctcggggatggcctggatggcaaagtcccacttgggataggccttgttatcgatggcctccatcaggtccttgcggtggaagtcgggatcctgtcccgccagcttcagggcctcgtcccagacgagcgagtgcactccgaggtgagggatccagtggaatttgacaaagtggcgcttaccctccttgttgaccagcgagaacgtgttaacaccgaaaccctgcatcatacggtaggaccgcgggatggcgcggtcagacatcgcccacatgaacatgtgcgtggcttcggggtgcaagtacacaaagtcccagaaattgttatgggccgtctgggcctggggcacttcgttgtgaggctcgggcttgacagcgtggactgcaggcagttagcatcactcagtcgcggtcatttggggggcacgtaccaaagtcagggaacttgatggcatcctgaatgaagaagacggggatgttgttgccgacaatatcccaatttccctcgtcagtgtagaacttgacagcgaacccgcgagacatcgcgaacggtatcagcactcccccggctgccctggacagtagagaaacgcaccgaacaccgggggtgttgcgcgaagtatccgttaacactccagcataggtcaaatcttcgatgctctccttgagggtgaaattgccgtaggcgcccgttccacgggcatgaacaacgcgctcagggatgcgctcgtggtcgaaacgatggatgcgctctcgcgcgatgtggtcttctagcagcgaggggcccgagtgcgtctcgttggtgacgcgcagccagtgatcagggtcggtgatcgcgacaccaaaatctgttcgctgctcctggtctgtgtggacatttactgtgtcgtggctaatatcgacaatcttcttgttcttggtggcagtgtcctgcactgcttgctgggccttttgtaggccggcggtgatactagtagccatgaggatcgatcagattgtt

SEQ ID NO: 3839 - DNA, 7269 bp, Emericella nidulans
caccctccacaatcatacgccggcttaaatacgtactcaacctcaccatggccagatactcgtcctcactcggacactgtccttgcctcgtccagtagaggtcaaagctctgtcccacaaacaaattgtgcatctcctcgaggtagatatccaaacagaccgggtcatccagagcccgcactttctgcatcgcgtcgattaggaggtaatttgccgaattgatcgtctgctctgccccgaagatcgtatgcgttgccggacggccgcggcggaggggtgaatggtcttcgatgtcgtcaagcctgtgtgctcttgagcggggtgcttgtgagaaggcgatgtggtctgagaaaagacatacatgagagatgcgttatgtaggctctgcgcgatactcttcagttcgttcacgcgttggtcgggcaagacgagccagacattgagcccctcaatgaaggcctcccgaactcccttggagggaagggagctgatgtactcggctggaccgagaagatgctgttactgtcagtatcttggacctctgcattgtagaggggggaatacttcatcgccaagcttcacctgctcagagtggctttgtttctcgtgcaaatccgacgaagaggatacagaagagcgcaccgaagacctcgaatactccgaccagaatgtaggcgatgcatcggacaagtctgagtccgaggcgcttctgctcctgctgttgctcctgccgctgctactagccccgggtctttcgtccgcaaacgctggatcttctagagcagttgaaatcgtctgatcttctcgtaggagcgcccctgcagtctcacatagctcggggtggtaccgtggacacctcaagctccatgctacattgcccggaatctgatacccttctgccttaagatactccaaaagatgcggtctctccttgcctggaccggctgcaaactcttcgacattttgctgatactgctgctcatacttattcgtaacctctctcacccgctccttggcctgctcaatatccaatccttcccattgcataaacagccagacggcattcgtcatggtggtcttatcaccctcctgcagaaactcttcccactcaatatcgaatgagaagtaatcattcgctagccctagggccgcatagcacggtttcaccagcggctcaaccatcctctgctcgtcttcgctcaagaggattcccataccgaaccgcatgagcatgtcgacaaagggagctccggtatcaacgattcggaaatcgacgtattcgtctaaatttccaaacacgcgcttcttgtcttgctttgccgtcgtcgagaccatcgttttccagctgtctatcaccacttcggcgcagggggcgtcgatggagaggagctcgaggagcatcttcgactggatctgtttggtgcccagaatggagcgcacggtgcggtactgtgtctcgtcgaggccgacgttgtccgtttccatgtttagctgttggagatcatatcatcagttgggaacgcactgtcatgataggaaggaagggcataggtaccgttgacttggccgcagactcgaccacattatcatacaagaaggcatctggacccggtcagcatccgctgcgagaagtgaagagcgacagacattcgaatatatagcaaaccaccgccaacctctccagcctgcagaatggcaagaccacggccccgaagtgcccatcccacggattacaggacccccagcgctcgatcggcccgataaaggtctcccagtcggcgcggcaggagcagagccctcgttggctttgtgctcgtagcgatgccggcgactcgtacccgtggcagaacccggccatgtctggggcataccggggcacggcgtaggaagttacgtctttgttcgtgaggatactggtcctgggctgtgcatagccggtctctagtatagaactggacttatctgttcgacactgtctgagaagcacaccttgggctctaccaacatttatatactaattcgacctactcaaggcagaggtctatgggatcgacagtagcgggcgaacaattccttgggcccaggaggttacctcaccccctgcttcgcggttctgacgctttgggccaatcatgagaaatacacaagtatccatgagtgacgctggattgatagagctgagggcaaaatctgaatctcaatgatgaactgtggtttgcatcgatatgacgttcaagcgagatccacttgggctccattcagccgcgggtttgtatagacaacttatgagtgccatcgacgatcctattattttgcgggtaccttgatgtcattggaatgataaagaacgcagacaagattcgaaaacacaagttcgtcttctgatcatgatctgatgcgaggtcataacccttgtttcttcttctctgagtgggcactctatactgctttgatcgtttatcgacgaaaactaaatatggtcatgatctacagctaggcagtctatctagagcagtatgatgcgtgtcagtccagtccttcgagcagaatgtgaattgcaggaaaaatgcataatgcatcacagccaccttgcaaaaacgctaatcaatctgactagcggtctaaaaaaacgaaaaagcaaaaaggtcacacaacatcgattcatcaccttctcaccttgtcaacaaactgtcctgatcctgtctctgattgctgtttgacctccctctcacacctgctaccgactcatccagaaagcgccaccaacagatcctctctaaccgacatacagcagccagaccagactcgatgatgaccgctaacagtaacgaggcatctgccaccacagcattcaccagtctctgcgccgagaagggacttctgaagcgcccgcaggggctcaaggatgaggacgtagccgacggcttcacagacgaggtgaccctcttgtaagtatacgagaataccgatctataaccgcaatccacgcactactaacagagcaagacgcttcctgcaagccaacaagctggatccttccaaggcgctagaacaattccagcaggcgctcgatttccacaacgacaacgacgcaatccgtctctacgatctgctcagtgtggctgaattcgaagagactcgggccgtggtatgtccatgccatttgccccggttgaagtattgagtccggcaaatagtcgttgcgctgacccaggatgggacgacagtacccccactggacagggcgctgcgaccgctccggccggcccctgctcatgttcgacatctcggccatagataaagaaggccttgcgcactggcgaaagacgcgcgatatgcccaaggcgattatacccggcgatccggcagacgcagactcaacggcttctgtttccatatcagcagcggcctcgccaccacaatcgcccaacatggcgcagcgcgccctaacctacttcaactactacccgcgctttgtcctaccgctgtgctcagctgctcacaggaaaccagtcaccaattgcgtctatctcgtcgacgccggcccgctgcgcatgcggcaggcgtgggacctgcgtgagtttgcgcgcgacatcagctggatcctcgcaacgtgtttcccagaaacgatttatcgatgttatgtgagtaagaaaagaagaaattaatctttcccaacccctctcccctcccgtccgcgggtagtatcccatgtaggaagggtatttttttaatagacgcgtagtgctgcaacgttcccagctttctcgcgcggttctggtcgatcatcaagtcattcatcgacccggccactgcatccaagatccaattcttgcccagcagtgatgtgtatgacacactgaaggcagatattgaacacgatgatatcccgacctgtcttgggggcgggttccagtttcagacgggaatgctgccggatctggacgacggcattcggcgcgcgctggagtggtcggggacgcaggttgatctgcctcctgggccgatcaaatggatacagactctagctctagctgagagtggtactgggaccaggaaggctgtcgccactgggactgctgatatggtgcagagggcggttgaggtagctacgttgcgggctccagtttcgtcgagtgatgcatgatcgatagagcggagggtatgttgtgaactatcttgctacgtaggttctgaaatctcttggatagcgtcagactacgacggactatgagctttatacaacggttatctctggctagacgctagtttccagcttctgttctgcaggggtggtagattgtcccgctatactatgtagatgccttgccagctgcaattactctgacgtagcattccagagcgaaactacaagttgactttatattctaagatgcactgtggctgcaatgtacaagactggggattgtccggggtcagtggagcatgcggggatggaggcaggaagagcttcattggggattcgatcgacgagatgccccctctggcagcaaatttcggtagattcccttttgcctcaagctcatccatccttgcggggtcgcgagagattgccttcaaattttggttcatccccaaaacccatactgctgtgttggagcgcaaggcggtgcctggaccaattcgacactggctcatggattgtcggtactttggctcctcaatgtagggcgatcaagagctctcgggttgggtgaccggggtttgatatgggtagctctgcctatatattccaggtaagtcagatgttgggggtttgtcgttcacatatccagcttcaagatcaagataccccttcagttcctcctcacctacgcgatcttaatcatcatggcagtcaagactcaggccctcgtttccagggaggtgaatgtccctcccaagctcgaagagatcaccctcgacgatatccgcgccgacgaggtgctcgttgagatccacgctaccgggatctgccacacagacttctcctgcatgaacgggacacttcccgctgcattccccagcgtgctcggccacgaaggtactgccttcgctctcccatattcaccaaagatcaaggctaacccaccatcccaggcgccggggtggtcctcgaagtcggtgagaaggtcaagcacgtcaggaagaacgacaaagtcctcctcagcttcgaccattgcggagcctgctcccaatgcgacaaaggccatcccgcctactgttccgaatgggtcactcgcaacttcggccagaagcgatcggacggaagcctgacgctagcggatgctaacggcgccaaagtgcatggcaactttttcgggcagagctcctttgcgcgacacacgatcgtcagcagcgcttcggtcgtcaaggtcccctctgatacccgcctcgacctcttctccccgctcggatgcggaattcagactggcgctggcgccatcctgaacacgttggacgtgtagccgggcaaatctgttgccgtcttcggtgttggctctgtgggcatgagtgcgatcatggccgcaaagttgcgcaatgcaaaaacgatcatcgcgatcgacttgcagccgcaacggctggagctggccaagaagctgggcgcgacacatgccgtgcttggctcggacaccgacgtcgtggctcagatccagaagatttcgggcagcaacggtgtcgacaactccgtcgactgtgcgggcatcccccagatccgttgagaaggcgctggattgtcttggaactcggggcaaaggtgccaccgtcggtgctcctactcccggtgtgcgtgcaggtgtcgacgtcttctcacacctcgtcatgggtcgacagtatctcggatgctgcgagggtgacagcgatacacagaaggtaggtagtctgaatctcagtgacagcaacgttaagctaatgacgacagttcctgccttacctgatcgagcagcatgcaaggggtcaattccccctcgaccagatggtcacctattaccgtgtcaacgagtttgagcggacgttcaaggacgtcaaagagggcaaagctctgaaggctgttcttctgcggacatagctttcttgattttagattgatttagcgtagtattccatattacattccagtgttggtcatgaaggccgaccgtagagcgccgaaaacggaggagagttgctcgttgaagcacaagaggttgtcactacgaggttatagccaactcgcaagtccctgtgacaaggccgttccatggggaccctgggtctcaaatacggcctggtcaatcgttgacaaatctatccaggcgcacggataccttgttgcccgatggtggtcaaggacgccactgatcttatgcatcgtcgaacgctaacgaaagaattgaaggttattccttgatagtagtcccaactgccaccccgcagcggtgtagacgatgatagttgtctatgagatatctcataacgaattggtggtaatagagttggacatatggctctacctcaaatgtaagagactcgcggttattatacgtccagtcgaaatcctcgtacgcgaagcacgccattacaccctacaagagagaacaccttcagaagcaatatcgacttgcaattgttcctttgtatggactataagcactcttctataccatattttcgatgtagatgcgcgtatatatacgtaattattatatctatatgcagagatagtttgctcataaatcaatcttcatacgccaacattacgagtagcgctccaacaattgctcagaatcttcaaaaccatcaccggtcttggcctggcggctattgcggagtcggaatccggtcgtcggaactggtttctccaaccgaattgcccagaggaacaaatcctccaacggcaacaaaatgagccagacccggttgatcaggaagcaagtaacgacgagaacattgcgatcgtcgcatcgagccagtagtggttagccgtggcaacaaccaccgacaggaccaagacagggtacaggatgccaaaaatgacgaagatagcggtcgtcgccatggaccggagagtcctccgcccgccgttgaaaagttaccagaacttggagtgatagatgtatgtgaagtgcaagcaacggcatcgctgccagctggttgaccatcttcccaccaactcacacgctttcagcgttcccctggcgcacggtgttgtggaagttgaaagactcgggcagcagacagggtggcatgcaagggaagaagcagaagaccacgaatgcgacaaagttt

SEQ ID NO: 3840 - DNA, 2094 bp, Emericella nidulans
cacccaggagggaggcgacgccggacccaggcttctcttttttgcgatgtctacacgaagcccataggaagaggggggggtgttcataggtagagtcttgaccaccgacaagcatataaacacacatcaagaaactccgaagccagacatatgtggaggaacctggtgagcaccgtcaagcaacgctcgtccgatggctgaaatcactcgatgggatgctgagcaaaactgtgacaacggttctgcaagagtccgacaaagcttatgattgcttcgatacggagcatgtcaagtcctcaatgtcagctgtggcatttctaataagactacttcacagttttgtgctctacgacgattcggtgcgcgttggacaatcgccaggtatagatctgcgggcagctctagcaaaatcactggaaaacttcaaagagaagatgcgtgatatgttagtccgttgttgggttttgctatacacccttctaaaagaggctattgctcagaaccaagaaatgttcgacgagcctttggaggaccgcgtctattacttacgcgccgtgcacaattctcttggcttgcgccagatgtgcaaaagatctcgcaatcagttccttaaactggtcaagtctgagcttctcgctttggacgtggagcaagacatcgaggctgatatctgtcaaatcctctttgacatccatggggtcaaattaagtctaagtgaccatttattaagtgaccatggctgcgtcccggagaagctcgatcgctcgacagctatcatgatgattgattttgtaatgaaacaggcgaagaagattaacatcaaggatctttccaagtcggaactaaagaacacgattgaaaagatgcaacagtcaattggaacgactaaagcagttccccctgtatcatacaatcgccgcatcttgaacgcctatttaaaaaccccaatcaacccgtcagagcttgtccgcgctattcaaggagtaacagatcttccattcattcctgtccccagccaaacagcagtcattgctaatagcggttggtatttcctcttgggttatgctgccctcaccaaattccgctcgcagaagcgactgaacccggtgcctaccacagaccttgatgaagccatcagttggtttcggcaggacttggaacataacacctcaaggtgggaaagctggtaccggcttgcccaagtctgggattccaaggttgaggaggatatcacttggtctgcagacaagatcaacaataatcgcaccgaactggttacctggcagcgcaacgcaatccactgctacgcaatggcggtagccacagccgccaaaactgcagagtcgggaccagaaactggagcactcttagcagacctctatacggatttcggaatccgtctttactcttcgtctagggagcctctatctatggccgcattcagtgtggcagacttcacgcgtcatttcagcaatgaagaaagccagcagatgtatgagggccggccattcaaagaaatgaaggtatacaacgtttggagacttgccgcctttcttttgagacaggcgcttgttgataaaccaaagaactggatgtgagttgcacctttacttacgcctttttaatgggcgtggtcaattaacgtcaataggacacattacatgctgagcaaatgtctctggaagatgttcagctgcgatgactccgttcggggatcttcgaaacgcatcagccttgatagtgtcctggactccctcctcgacaccattgacgccctgccacagcggaaagactcgcgatctgagcccatttttgagcctcactataagcttgtctctatcatacacaaactcgtcataaaagaagttctaacggtaaggaccattcaccattgttacaatcgttgtaatcatatggcttacttctccatagcccgcagaggcaagtaagactttggttgcgacaccctgggctagaaaggtgccagcttgcgaggatcgaaattcctggaaaaaatacatcctcgatgtgctcaagaacctgaagaatgccgataaggcaaattggcatcatcgtatggctgttagggtatgc

SEQ ID NO: 3841 - DNA, 2707 bp, Emericella nidulans
gcgacgaccctattgtcggcgcccacagcgccttcattagtcaacacagcggtccaacactgcaaccgtacttctgctccccagtcttgttatcgagcggtcagggcgacttgatcgcgatgccgttggattacggtcgtccgatccggtcgtcctctcacgcatcctcgtcctgggccatgtcggctgccgggtcggatagtgattcgtcgatcgcatccgacggagagcagcaagatacatcgcccggactaaatgagcgaagcccgagtgtcgtaaatccgcctccaagcggaccctgtagcaagacttggtctcttcctccagtatgttgcatcatagtggtcgaccgaggttgttgatggctaactcgcggtgcgtattattccagaggacccgacggaaacgcaagagaacaccagaagacacgacgaagaggaagcatcgaaaggccagtacccgtcgacgtggtccgtttaaggatgaaagcaaacgcaccgaaacggctcttacaaggaatctgaagggctgcgtccgatgtcgcatgatgcggtaaaggtgagcagcaattgttccggtgtttccttaatccctggttacaaaagactttggagggtgagccggtcatgaggaccttatactaaccattgcttacttggaacgggcacatcagtcaaaggctcccagtatccggaagctcccatgccttcggatgatcatcaccgatgtgtcgttatatcgagagcaggatatgccgtgccagctattcagcagacgatggcagagtatggagatcgtcgacatcacggactgggcatcatctgagatcaagacgataacgttatcccaagtccacgtcgacgctccatatgaggtgcaggtgagaaaattcatacccaaggagggcgatatgctggagacgacatggacttcggggccttatgttagacgccatccaatgccacagtatgcactcgctgatatggaaggcgccgctaaaacgctgaagtggctaacggccaactatgtgggtgcgtacatcaaatacgaagtcgggaatctcgaccttctgatctggcgcacctactactttgcctttctttatcagcaaaaagcaaaggtaagtaccgtgtcgcccctgcgaatgtgcaaccctgcttagtctgcggtgcagccaccacgagaaagggctttgattagggattgcctgcagttctgggtcggctgccgtaagatcagcaatccggagtacattaagtactactacgaggccgtcggagggacaccagtggatgatccaaatagccgttttcatgcaaaggtcccgatgcctggcatcatgattgctcagatggaatgcatcatgtacaccagagtcctccgtcctctctgcggtagagtgttgacggctctgaaagacctgatcacggagaataaacgcgagcattggttgacgatatacctaaccttgttcatcttgctacacagctgcgcgatgctaacaagacgggactgggagactgctcgcgaatttggcttgccggttagtccctgcgcctatggttgcaaaactggtccacggaactgactcgcgtacacccacagagcgtatatgccaaccgcctgagcattgaaggaatgcagaagggcatgcaaaccgcgctggctcactttcactacctgaacaaaggcgtcctcccattccatctgacttacgacgagaagtcgttacgcagcctggcaaccgccgcggacctagatagcgaggagctcgagtttgtcaaagagacctcccagcacatcaaccaccctgccagaggtaagtgcgctcctaatcactcctagtccgctgtgccgagcgccgctgatctgacttcgccgtagcggcgcgcatggctgagatccgggcaaatcgggaatatggagacgatctgtattggatttcacaattatatgatgttgagtgggcgcctggaccgactgtttagatcttgagaatagtacctagtataatagccgccatcccgtacaattaggaggttaccgtgattcgaatagatagaaagcgtaatgaatgccatgaccatgaagacataacccgaagcacaagaaaacacctaggaaccccaaagacgaaatgacttttgtagacgaaaactcgagcagaggtgcgtgtctgaaattgagcacggacactcgtgtcgtcgtgaaccaaacttttgcccgtccatccttcacgctctttctccatcccacctggcactgatccaagttccacactctacctaccagccaaccccatccgcttcctcctcgtctgtttctccacctcttcctctgccctagattgatcctcttcccccttttccaaaactgcatccagcgtctgcgggcctccattcataggtcatggtctcattaatcacatgatccagcaaccctcaggatcttgccgtctcgacgcgggggctcaagatcccagtgttcttcacgctcattgtcctcgaagatacgagcccacgagagctgcagcgttcgtggcagcttccagcacatctgctcgttattcagccagatccggattagatgccgggcgttccccgcactgttttcgaaagcctcgcgtcggtgcagttccgccatggttgttgatgaagcggagatcgccgcgttctatccgggggtgatttcatgcttgcgtccacaa

SEQ ID NO: 3842 - DNA, 5042 bp, Emericella nidulans
ctcgcagcctgccgacggcattggcttatattcgttcttgaatcgttacatccagtgcctcgagacgcatcgaggggtgtacacggtggccatgggtggttggccccttctcatggagacagagctcgctccggtcctatcgcgaagccgggctttcacgtcacaagagccgaaaggcgatgagtgtcaacagttgcaagccctgatcgtcagctcagtcagtctcgagcaggaagagaaggaggcatgtcagcaggcaatcagatacttgcaactcgggttcgatgctctttccacgggggagaacgagaatatgcgctatcagatgctctttttgtggaatgtacttgtcccgtctgagttcagtagcttgctggcgaagaagcgagcacaggctcttgttatcttagcttactacgcattgttgctgcaccacgggcgacatatatggcaggtcggagaggcagggcagcacatccttgggatgatcgaagagtatctcggaccagagtggagtccatggctcgagtatcctcgactgggtatgaggtttgggtaacattgtatcaccgttcattttctatatttttgttcataatcgtgtcgtacatcacaccatataatacatagctctttcgatagccaacattcttttcctgggccccttgtcacgccaaataatatgggaagggtctggcagggtggcgtcagctcattatccatcggtcctacaatcacttcgccgttccacaggcctgttcagggtcgcactcgggtggcccttactacttctgataacagattcaccaacagcagctcaaggcagccgagacttgccagcagcgcggctagccgcaagggctccggcgaggccaaactgagaggcaacaccgttgatgcgatgagtcgagttcaggttcttaaccacgaccatctggtagcaggtggcggaaccctgacgagaggcgatgacggaccaagcgaggaacagttcccagatctgtcaacagtcagcatgaattcgtgacatcgtgaaatcaaagagattccaaactcaccctgtaccacctagggccgtacttggccttgattgcctcaacgttaccaacccagttacggtaccagcgccagagggtaccggagtagtgaacacccacagtatcgattctatcccctatcagtatttttccactgacgagaaacaagatactcaccccttgacctcaaaaccggcctgctccaagcacttgacgtaataccacagtggagtcgaagcgtccgcgccgcggaaaatgtacttgttgagatacaaaccccagatgaagtcttcgtactgccacgcctgtcggagaccggaaagctgaacgtacatggcgccatcatccttgagcatatcatagcactggcggaaaaagccggtgagtctgcggataccaacgtgttctcccatttcgagctgcgtaatcttgtcaaacttggtgcggggggcgtcgcggtagtccatgcagagaatcttgctctgctcctcaggaatgccagccttgcggagagcgtcatttccccaggctgtctggttctcggcaatggtgagtccagtgactttagcgccatagttcagactggcgaatctagctagagtgccccagccgcagccgatgtcgagcatggtctcgccttccttaagaccgatcttttcgcaaacaatagccatcttgttgtcctgcatttcctccagcgtctcctccttttcggggtccgagatgatgccggatgtgtagatcatacggggtccaaggaaccaagcgtagtgatcattaccactgtcatagttaggacgcacctgctcctcatcttgagccttggtgtggaagagaacgtcgacaaagaaagtgccaacaataaacttgaacaggtcccaggtaaacgaaaagttggcccaatcgtggcggtactccataacatcgagagtgtcgccattgaaatccacaaggccgtcgaggtacatttccgcaaaggtctgcatggggatcttgttcttgccatgccatttcgccttgtcctcttcacgcttgaaggtgatgtagtgctcaaccggacggcccggaagcttcaccttctcattggtgcgcgggctgaaagtcgaggcgtacgtccaaaacgccaccaggacaggaaggacgcttagcaagaagaagaaaacgaacgtctttgcccctccgccaaagaaccaggttaggaaggccgggagtccaacgagggtgcctccaagcaaatagttggagaagctctcgttgccggggccatcgaccgccaatggggggttggggatggcggcggccttacaaataaatcagcgtcaatcctaacacctagaagaagggacgctaaccttggtcacctcaattccgcaatcctcgccggtctcaaattgggaggctttggctggcggagtctcaatgaagtcgatatcgcccgagagctcgactgatttcttttcttcgctcatcgtcgattgatttttgacctctaggatcccccgttgttcaattgagagtgaagcctgaagggatggaggagagttgaggacaacaagctggttggaatgttttgggttgggtgtttcaccgctgatcggcctcgcacgtgccccattccagcctcaggcacccgcctcaactgccaggcactacgcaatctctcggaacaatgtttcaccgattaggtcccgcccaatagcgtgatctcccgttaggcaacagccacattggcatggccacatggcggcctggccagagtcaccaaatacctgacactgctgtacacttcggtctaggctcccagtcattacacacagaccagaccaagatccatacttatattcagactgcggattaaacatcccatttctctcgcgattaagaaagcagacaacatggaattcgccattgaacccgttctcccagaggatgctccccgcataaccgaaatatatttctctgccttcaccaacagcctcagccagcgtatcatgccccgcaccaaggaatcagaggcatttcaaactgcgagattcagaaagtccgctgaagaagcgcaatcgggacaaggcaaggatatgattaagatcgtggcgacagaaccagaccaggagcccgtgattgcggggttcgcgctctggaacttctacagcggcacgtctgactctaatgagcatgaaaaggagaaggtcgagtggccgtctagcagtgacagcgagctctgcgaaaggttcttttcccgtgtggaacgggaaaggcagacggcgattggggaccaacctcattattgtacgtctttcccactccttcgaaataaatgaattggatgaatggacagtctaatataaaatcacaggtctttacatgctcgcggtagaccctgcgttcgctcgtcgtgggctgggggccaaattgctgaaatggggtctccacagggctgacgagagacggcttattacgttcatttcggcgtcaccggcgggtcgcgggctgtatgagaagcatggctgcagagccctgaatagctacgaggttgtccctgggtaccacgaaacaacgatggtgcggccagtggcggggctatcaaggggataaactcatattctgtaaatacactatcttgcagaagacatcttatgtgccattggcagctgctaggctattgagtccttcgctcgcgttgcgcgtcgtcttcagaactctgtccctgctgcacttgcgcatccaagaccactttctttccaaacatcctcttaaacagcatcccccagaatcgcctcgtctcaacgactggcaaaatcccacagaggaaaaaggcggcaaatacccagagaaacgatattactacccacgccgtaaagaagcccttggagaagatataatggctaagaaacataggaattgggataatgatgtccatgatcagcgacagaacggcagatacaacgacggccatgacgaatgttttctgtagagcttttggatcctcgatgaccgcagagtctgctgttttctcactttggtcaacgcgcgtcgtcttgatcgccatgggaggtttagattcgatgacgggttccgggttatatgtagctggcgcgttaatagctcgggtcttttcccagttgaagtcatccggtttgagaagagagattccaacagtgagaatgagaccagtcaagacgctcgccatgttcccggccaatgtggggtagttggcacctgttgtagctacggtgagttcgccatagtatactttggcttcaaccagccaggcaatcagcccagctgccaggccaccaattgcaccgcagacagcacctaggcgcgtctgtcctttccagaggatggtgaatgcagccgggaagaccgcaccgccaatcaagagacccattaccaggaacagccagcccaggtcgatcccgatgccgttccagaggcaggcaacgcacgccataaccacgccgaagatgcagatcattatatgggagacgaagatgagctgttgaggagtggccttgggcttgaggtaggttttgtaaatgtcgaatgtcaggatcgacgatacggcgatgagttgagacgaggcggaggaggtgacggccatgaacagtgtcaaaagcaaggcagtcgcaccgcccttcccggcaagggctgtggcgccaaatggagccgcgagacctgctgagatctgactgcttgtcatattgttcgggtaagtcgggaaccgggggttgttcgttaacgctacagcggcaagacccagggtggttgcgaatccaaaggggattgcaaaccaggacaagccgcccatgatataggcccggacagcggtggtgggccgactggcgatggctcgctgccagtagccctgatcaagaaataccgtgcttaggccggtgcatagctcgataacaccaaatacaagaccagagttggatttgagcgtgacgtacgacccctctatgttcccttctacaggacgttcaactgcggctgtcttgagga

SEQ ID NO: 3843 - DNA, 4226 bp, Emericella nidulans
  unsure (1)..(4226): unsure at all n locations
gaagaacgaatagaagtgtgtactccctccaaccaaaaatgactttgtgagagatttttttgcaatctcataaaactaggagaccaaaggattgaatgccctagccacctattcggtgtttacagagggtggtatgcttacccgggcgactcaccaaagaaagagagagcgagttttaaaaaagtgtaagaatgtaaagcatcggaaagtccgtattttattggagggaggcagtattataaatgtagtggtacactccaaagcgaaaaaaaataatttcaaaaaactgggccctacgcgaggttgcctacccaggttgtgtttgaccaaaaaatggttaatttcccggccatatttacgaaagagaagggcagacctcgcggatccaggtagcggggccccccattaaaaaaacggtgcacccctaataatcccccctgaaggaacactggcggaggtaaacccgcacccagaggaaatcgccagcaagacagccagggctgccgacaagccgtacggattgcctggcccatggccagaaccgatgtaccaagcgagcaaccccaggactcctccagcgacggtgccgatcagtctggtgagcacggcgaaggtgaagtcggccatatacaccaacagacctgtctgcgacattatcaaagcccagaggcccctttcgcggtagaagaacccagcagtgtttggaagaacggcggcgatggagacggcgatagtgaccaccaccatgcgcagtgcaaacaagccctcatcacacgtcagccagtggtaagtcccaaggatcgccttgcccaagggatgacgtgtccggggccggtatccgcggcggacacgcagtttctcctgcgcagtctgtgtggcatccccagccggatcctgggcagggctatcgtcgtttgtaggtgccatgacgggagccttgtccttcttcccaaccagccatcggcccgcatacttcaggctcgtcggtacatagaaccgcgttcgagatgctttgggaagagcgctcgacatacttgacaacagagctcccgttttatccattgtgttcgccatgtgctcttggaagttcatgcagatgataatccctgccagctggtccgcctggtttgcgtggttgtggtggtctggcttgtcgaggatcggcccatacgccctgacgagggattcagtcatgtcggccaaaaaggccgctctcgtttggagtagtctttcgagcactgtcttggtacgctcttgcagctcctcatgtgctgcagagggggccttatggtaccagcgttggcggtcgacaaactgaaggcattcgccaataacgctcagtccgtccaggcaagcttccatcgcattgctgctcaggctgataaactcgctggcaacgtcttccgggatcgagtggtgttgggtgtattgcaaaccctggatgagctctgcgagctgcgagcggtggtgtgcgcccaccttccggtccttcttctcatccgtaccgtcctcatgctggtgaatcgacgggtccttcagctcgagctcctgggtctgaatccgtttctcgacggtctccttgtggaattccgacagtgtcaagatggcagcgacgagatggcggaccggctctcggaacgtggtgactacctctgcgccccagctaccgatatggaaatcaagcggcaagaacccaaacgagggctccagggtccggtagtgggcaataatcttcattcgccatttttgaagctgttgcgggccaagctggtcggaggacctgcccagggcggagtaagagagctgcagtgaggatttcagaagctcaagcagtccctgcatatcctctaggataatgtctgaggtggaacggggaaagaatatgatagaacagacggcacccagccctacggctgtggcggacggtttcaccagtggtagcggcagggtcccgttgaaggaagttagaatggggccgtagcaaagaaacatatcaataataatgatcccaaagatggaggtcagagtagccttggggttggctgctcgcagtcgcgcctggcagttattttcctcttaataacgtgacaaccttgtgcgtgctggaggatgacataccatgaagtagataaagaggcatagcatacagtagaagatcacagtaacccgcgcatccaacatccacccattatacactaagcgctgagcgatactgctcgctgaggcgccggtctcctgcgcttcagctgcggcagcctgctgaagcgcccctactcttgcctgcgtctctgcccccggtgctcggccagcgccgccttcatcgcgattacgccccatgcccatgcaagacatattccgacgaacaacgagagcgctccgaggatatacacgaagaggacaccggcgggagggaggaagaaaaggaccatgctgtgaacgattgtgagcattgcctggcgtgtcgcagcattacgaaaaaacttgcattactcaccaagcaaagaacgtgcctggccaaaatcagtcgcgacgggatcgatgaagatcaacagagaggcgacccaaacggccacccagcagcgaaagaagatcttgagctcgcgcgcgctgaaatggtctagaaaggcgggcagacgccgtttgcgaccagacccggcctttccgtccaaggcgcggtcggccattgatatgttaaatgagtgcattcgctcaaaaagcagaggtggaaggaggggcaatagctttaagaaaaagcaagaaaggggaggggaagcagcgaaaagatggtaaagccaagggtatgatgcaaatagtccgtggatcgaacatgcacaagtccaataagtacaaggttatgtgcataactgccnctatacactgatctgttccaggatccactcgatcagaagtggatacattgtctcagatgatgtaaggcttttgtcctaaacagtccaaccattcatttactcagattcagaggatcagaagccaattgagagagcaaaaaggtggggggaagcttcatctctgtgtatgggcagccgctcagtcagccttctatctccatagaaccggcagcttattgccaatttagattccgtgcacagaaatgaactagacagggcgttcgaggttagctaaataattgtagagggtgtacgggcttgctgtgatcgcactctgtcgcttagcagaaccttttaaagcagtaggtagaggtataaagtggtagccatacccaatctggcatagaagctgccggtcgcacgtcttgcagtagaactggtaatgccctagtgatttcatgtgcggctccgccgcttcatctgtgtagaatgtgttgttgcatgtctcgcagggccatctggccggccctcttagcgaggctgaccctgggaatttccagccgcaagccagccgcaatgaaagggtacgaagacagcgactctttgattactacttggtgatggacgagccgcttagtcgccttcgtatttacaccaatcagctgtcctgactttgcctataatccttgcaatctgccgtggtatgtcaataagagatagactgcccccacgatccggcggcggtgggctcgctgcggcaatgctagtactgaggaaatgatctctgatttggacggagtcttgccgatagctactggagttagggtccatgaaactggctgttgactgcacgtagggtccgatgggagggatagtttgaagttgcaatgtgcgcaatggcctggagtctgatgagtatgaatatcaggcacccgtctctagatcgtgagaggggtttcaaccctaagcgacgtagctgcgcagagaggctgatgctttctccttcccctagcatcgtcaaaaaatctgtagtataaaagacgcgtagttgccgtggcgtcggtgcaatggaaagtagactagctcattggaatatgctactgttttgctcattttgggttcacatgtttagatggacatgatcttttgccagacgtggccgctaatgcgcgaaagggcacggcgtagaactctgcagttgcttgctggccctggagattctcgagatggagacaatggcgttcagcagtgaataaaaaaagtcgttgtactgtggcttagtgcttgaggccaggataccttgccgaagggtaatacagagcaacttaggcacaaacagatatacgtcgcctcgttcactgcacactggcggccgtt

SEQ ID NO: 3844 - DNA, 5426 bp, Emericella nidulans
gcggaacatttgctaccgtcctccgagagcctgtcgatattctagacgccgtcctcaatgagatgggcatcatccatctcgcaatgaacaatccaaagatctagtaatccgcacaaagaatcaggcagagtcggaggaaataggctttaatttaagccccagcttgaaggatgctcgacctgtccgaaaatccttgtcaatcaatttgaaagctagtgaagcgtacatagaggaacaagatagtcgtgagtcgtatctttattgcgcgtcattgttgctaacgcatgggcctgtacagcttcagagagtctgaccaccctgacggagagttataatactgcaaatgaagatcatgagtgtatctcgtcaaacattattttgagttactacggatctgagcctcaggaccgatgtcttacaatcacggaagctgctttgaaaagcgcggcagaggacaccgatacccgtcaattggctcttttacttgatcatattggcactcaaggtcagcctgtgacagtttcgcaagacgttctagaggctgcggctgcaaatgaactctgtgggcaatctatgctaagcctcctgcttgaattttcagattcgcgcgggcagattggcaaagaaatagaaatggacgcaattctgaagtctgcagtaaggaatgaagaatgcggccgaaaagtgacggagctacttctccattacatgaaactccagaagaaaaaggtcacaatcacaggtgctatcttgaaagcagcagcggaaagttccaaatctagcaatactccattgagcatccttctggaacacgaccatgatccggttacagaagacattgtcgtcgcagccgcaatgaacgaagactctggctatcagataatgagcttgcttttggactacgattgcgatacttggatatcaccagctatattcgaagcagctgcgagtaaccttcatcaaggtccacagttaatggccgttctgcttcgtcagaacggtgagaatatccggatcacagaagatattatcatagcagcagcgcataatgatgtgtcaggtttggaagttctgagcctccttaaacagcataatggtggctatcttccagtgacggaagccatcctggttgcagctgcagaaagcgagaattgccaggaaaccatagacttgttcgtggatatttacagctgggatcttccacttaccaacgacgtcttagaagctgctgcaagaaacccggcttttggaaaggagaacctggctcagttactggatcacctggctcatcctcaaatcacgaaagaaatcatgattgccgctatttccgacagtgaaaaggtcaatctgctacgtaccgtctcatattgcgatacctttgccatcgttgaggcagcggttgggagtctagaatcgtgtcttcaggagactctactttatgaactatgcgacgaactaggcgactcaatcatagattcagcccttgaagcagctgccgcaaatccagtcaatggcttcaaagcagtttccctccttctgaaattttgcagcgaggatcacaaattctccgaaggtacgtttctcgcagcagcgaggaacccaagaagtggtgaagatatcctgggtctcctgctgaagcggcagcctgatatccagattaccgcagagcttatcacggcagctacgactgcagacaaccgtacactggagcagctaattcggcacctcatacaaaaacatccttctacggctatcagccctctgatccagatgacagagagcttcttagaagcagtaacgggtaattggaattgtggcgaagatgtgctccgtctcctattcgaaacccgaacaggaaacgacggctctatcccgatcacgcaagcagccctcatcaacgccgctagcaatgttcaatgtggatttgaagttatagttatattacttgaccacggtggcccaaatctcaaaaacttgataacagaggatgtcataatagcagcggcaggaaattctttatggggcctagaaattctagcccttcttttagaccgggaatacaccatttctttctcggtggatgtattcagcgctgcggagcgcaatatatggtgcggtgaagaaatcctagctcttctgcttgaacatcaggctttcgacgctgaggatgcggatgcagattcgtctgacgatggggatttctgtgaagacacagaggctgcagagcagtaaatctttatgatttggattccgatgatgatctatgattcagagtacagttcagattgtgattctaatataacccgtctactatccttccaacagtattttccttgcaggtgttcttcgtcctttttcatagccgccccctccaagtcttaggccgcccctgcgccaccaacaaaaaggacatgggttgctgtgctcgaatggtgtgtggaaatctagcgtagaggaattgatatgccaaagcagatgttccctgtaaagacgatccgcaataacatgggggctttttgtttctggaattataagaaacgagctcttaaaagccgggattcggccgactgttacattctctaattcccggggaagattcaggtgaaggtacctaagatgatcctcgacagagattggtttcagttgggccgcgtctcctctacaagtattctcgatgtcgcaacttgattatgcagactacctaaaagcattcttatatgagccttgcgaatatccaattggataccagttccattgccccttgctatattccgcaagtcgcatccgttcttagtagggactggatggtgctgcgagtattcttgtccacactgccagggatacggtcagccttatttggagctgacctggcttcagcgcgtggaagacgatgagccattctgaagagatgtacgaaatcgataagaagcatcgccactgtgtctggggtgcctggaggcatgggctttggaattgcgaatggtcgcctaaatgggtagatagatgcgtggtaccatcatatgatcagtgagactgcatccattagccaccagatgtactcgtcttgctttttgataccaagagagatatacgctttccctgttttcccttctcagacagcctcactttgagagatacctcttataatgacgaggtacgttttgcgatacttatcacatatatttatagcatccagaatataaagtttgtcctattcttgtttggttcatggcgcagtggacatgctggaagggtgatcgtctttattaaggtacgcttctactgcatgcttgtgaatatttaaatgttctgatagaaattttactacttacttgaaaagcagggccaaactattgataataggaactctttatactaaaaatatatcaataagacaatccagtgctactcttacctgccttagacgcccaagttttgaaacttcctttatctgaagtagaaaacaaagttcgagggaccaggtaggaaggctactataactaccaagttgtataaataataatatatatccaggcctttataagataagccccagtcttgggtcaggcatagctttcgctgctgtatagggtgctatttaacaattctgatcagctgttttaaccttttttacaagtagtcaggcctgctgtagcatataggttaagctgcctgttatataaatcctttgagtagtcaggcctcaggcctctgtagcagctccattagatttcttacagagtagatataaggtagcattcttttgaactactaaaagctatcaaaagcccccgcagggctatctgaatgcacccggagcgtcccagcctccagagcactcccggagcgaagcgcagatcagccagtgtaggtaggccagtgtaggtaggccagcggagggccaggaagctaatacctcttatgccaacgttagccttaagtaacctaagggcacaggagataggttgagtgtacttgcattggcaagtacagatttgactcacaataaacatctttggagatacctgtgcacgatgcagtatctccatgcaatttggtgtttgatatccctactctggatccgactccctgctgtggtcctcaaattagtgctagagtctcgagcgagccgcccgcttttcgaggaaatagtgaagaagatggtctctcgtctccaggaaattcaaactcacctcctccatttagcagcatcgagagcgtctgctttcaaatttctctcgcgttgctccatcgtcctattcgacaggcgccagtccctcatttgcaactccaattacttcttgaaaagcctgatattgttcatcagcgtcggattgtttacatgccaaggattttggatggaacaatacagctgcctaggataacttatttgtgatcaggatttatcattcaagagatgtttaacgagagactagcatatgaacacggccaaagccattccgccgcgacaaagctacccatccccctgaaaagcaaaccaagagttcccggaatttcagaccttggggtctatgactgaaggagtatttcaggattcctgcagtcatctctcccacatcttcccttcactgccttcgacgcgagcggggtttccctgcggccaggccaagctggggtaccgatattcgggagggatggaatatcacgtcttctattaccctgtctccacgttcattcatcttatttggttgtttattgcacaggaaaaatttcaggacttttcatcgaagtcttcgaacggaaaatggttttgaatccctgtgatatcgccacatgtttcagctgcttcaagcattttgatctttatctcacgagccatttctttcgcagcttcatattcatcattaggcacccaacccaatatgtccacaccaagaacattacgcgtttgttccatcacagtatcagctgctctctgttgcgtatccacatggatagtgtcatgaataactgtgtctggatactcgagaggaggcttagtgcatatccttttgtcatgctccaaagagtcttctgtgataaaattcggccagttctgtatggcccgaatcatgtcagcccgcaaagtggttgagtctccttcccagggagtaccagcactgtgaaaaaggcgttggagcaatatgaccgactggttaaatatagcatcgtaatgttcttcattcaagtgcttggtaaaatcagcgtagagaaaatgaaccagccgtctccgaatggtctctcgcacttgaatttgctcaggtaagtcaagcgagtcatagttcggtggaagattaatctgaggctcaaggagcttctctgactcagaatcaccatagttctggaaatgttttggtatcccagccacaataccatggggaagaatagcagagtgttgccagtcaatcaatccaataattttattt

SEQ ID NO: 3845 - DNA, 2604 bp, Emericella nidulans
atctcgggcctatatctatcataaacggatcggggaaatctacgggagccgggttggtgtcgtaagagggcgcggtattaacgtctcatgtattctggtgactgcaccgacatagtgagccggcaatctgcctcaatacgcgaatatctggcccttttttcaagttctcactatgatattttctgtttctgagctatatgtgaattatatatgaagatggggagtaccgacatctttttatatgtgcgaatcagaaagagccggctagagtagcctagtataagactgagaaaccctttcaaatccatggcaagtcacacaactgcaggtatcggtagggctttatctagttgggtctatgtttggggtatcttcatcgtacattcagggcatcaggatcgttgactgttaatcctggagactcgcaattcgcatcagctggcatcttaggctttgccatgcattcgaggtgtctaggcattgccaattccgtcagtcaataggaagaataggcagttcatcaccacacctgaatatttgctgaatctgttctcgcccactcgactaagaaagacacaataaacagtacgtagtaatactgctagccccgtctaaactagaaatatatgcagagatgaagttaggtctaagaaaaaaacaataagcggccagggagaagattagcggaggaggcaagaagggtggaaagaaaaggcaggcatcatagttaatcgcaaattgtctatccagatacttgcagccaacagtgtacgtacaatatgtacgaatataagaagaggatgataaggcgaattggagttgaaaggaaaggcgtcaacatcacctcgaggactcagtgacttccgtgccagtaagtacttacatacatgaccacgtccaactaaacatccatcctcgtgctacgaattatccattcttaactggaaacataggctggctgtcataccagcagcctcaagacttcgccgtcgtctaactgtcccagatcgccccgtacgcagcaacgccccgactctccatcccataaacaaccttcttggtgaccttctcattactaatgacaacgatgccctccgccttaaactcctgcacggcatcccagcatatttttactagttccggtcggcctagtaccttcgtgtcgtggacgacagcgcccgcgtcagcagcgtagaccgcgttgacgatttcctgcccaaatgtcgagacgggagacggggttgaccagattatacggacggggcacctgtgtcttaagcctggggattgaatgtgaccaagcagtgggccgatgcctgagcctgttcccagaaggacgagacgggtgaagagcggggagatgcgcattacgccgctggctgtgttgtcatcagtacggtcttcagctacgaataatgggagacagagaagagtacgacgcacttggaattccgcgcacccaaatccgggtaggtggtttctcaatctgctttcctgtccagtcgccggccctcgacaccacaagactgtaacccctttcccgcccatcgacagcctccggtgcaggaactgccgcaaaagagtgccattccagcaacggccgccgcgaaagtcggatgaacgtcccgtttacggggacggtatatgtgaagtgcaaacgaacggcgtggtttgagagaacttctgcgtcgacgggaacgctgtgcaagaaaagccaggagcttgcaatgctgagagtaatgacgagcagcatccagaaggccggctctgactctatggcatgtcccaaagagcggctgctgacgcgctgttctcgaatggaagagatggtctgcacccagatgatcacgagggcaacccacccgccgaaccgatggacgcgctcgaagaggtcatggtgcttcttgcggagggtggggtatgcgagaccaatcattgtgatgaagattgagcaagccagaagggacagcgttattgttagaacggaaggcctaagaggatcctctggctggttgacgaaggagttgatgttgtaacagatggcccccgtataccaagccacagccataacagcggcactggaatgcatgcctccaagatggtagatctttgcgcagcgtttccggattgcaagcggccatgacgttgggactgagcagcatacggcgtataacatgttgatggccatatcttgccggacgaggaccgcaattgtgagattgacaaaggaaacggtggttatatgccggcggttgatggagaacgtcaagaagcatatcagcatggcaaggtttgccatgaagaccagcgagaacagccgtctgtagacgatgaaaatgcggtagcggagaccgcgccattgtctgccgtgctttttgtctggcagaggaatcggttcattctgcggagaggaggacgaggaggtggtggtgatggtggtagacggcgtggatatcgagctcgaggatccctccctttcggccaacactgggtatatcttgtcccctgctgtcaactgctggatcagtgaacgcttgtcgaccttcccattcggcgtcaatggaaactcatccattgtctgccatctggttgcgattgcatagt

SEQ ID NO: 3846 - DNA, 6084 bp, Emericella nidulans
atttaagcttaaaaaagcttatttttagaagcttaaataaaggtggtgcatttaccattaaacatttagaatcccatccagatatttttttatccctccccaaccctttgccatcaaccaataaccgtactaaacatcagcccgattcatacatatgttagaccttgaaagaattaatcctgagccaaccgcgcccttctctcttttcgtcacgcttccaccccttccagataatataaacgatcccaccgatacagatcccatccaatgctcccaatcctgtgaaacaccaaccatatcccattttcttcacgactccatctacaattacggccgcaatcgcagctgcaatgtttctcagcaaaccggctaacgcaacgatcgtcgcggactgcgccggcgcacattcagtctgaaaggaggtggatgttacgaaaattatagctgttccgattccggctgcacaagttcatcttagttacttctgctcttagagtatggatgtcggggaacgtacctaaggcagatgcaacaagcccagcaacaggatggagcttatgctgcgtgaaccagccgaacatgacttttccggcggcggagatgacaaaacccataatttgaattgggaggcgtgtttccgctttgatctttatgtcgggagtggcctttaccaggcgtgcgcgatgccagtcggagaaccggcccgttaggagggaggcaatgaagagggcgattccttgagcacattagctgcttttcttgagaaaggggacaaaagctagaagcataccagggctcaaatatgcatacccaacctccgcggtactaaacccgtacttctcgccccagacatctgggaaggaaacatacataaggtacaacccagcgaaggagagggctccgttcacaaaaacaatgcactgcgttggttgaatcaagaggttgatccagttcctcagactcggtttcggtggcttagggaatttgccttggtctacgagcggtttctgacgcagacggggcagcgtaaaaagcggtctggttctgaagacttccccattcccaactagacatctcaatgtctcggggaggcagaacaggatagcgaggtagacgggcaagcaggcgagggccaggaacccaaatgcccagcgccatttgtcttctgttgcgaattggccgccaattaagggcccgaggatggggcctagctgtggcccgagcagaaagatagcaagaacggaggcacgtcgcgcgggctcgaatatatcgcttattgttcctgcgccaatggatgtcacgatgcaggcgccgaaggcttggaagatgcggaggataaataatgcgccgatattgggcggaagtgtggaaaggaggatattggcgatcaggaaactagcgagcgtgacgatgtagattgttttgcggccgccgaggtctgatagtgctgcaccgagtaagggctgtcccgcacagcatcagtatagttctctgcagggctagggcattgggtaaggtaagcgggatagccagggaagtgatcactcactgcaacggcaaaaacggccatatacactgacacagttgcattaatgactgtccctggggcatggaaaacatcctcgtagagattcaacgaggggagatacacggcaccgcagagcgggccgaagaagccggctgctgtgacgatggcgagatagaagcgttttctaggttctgaaaaggcagagtagggtggttctcgctctgggaggagtgggaagttaatggtggatgtgggagagttcatgatggtatggatggtcgatgggcttcggagcggaagggacgacaggggtcaagaagagagagaccgttttgacacaagtgaggaccatggtttagtttaacagaatgtagctggaggcttagcattgatgttgagatctgaccggcaccgttgggggcggaaggacagggctgagcactgcacgcttaatgtaccctattcagctcaaattcccgcatctattaataccgttaatccaatttctgcttacacaaccaataaaatccacatcgtcggaaccatgccgacaaagagccataagctggcacgatcgacagttttcaagtcatgccaagagatcgctcactgcccaccgcagaagacgaagctcagtcatacaaatgccagggtacaaaaatagccaatggccctcttggcgtcccagacaatggtccaatcccgtcgttactatgctggcttgtggatacagtttgtaacccctactgccagttagccgactgtctgtccaagccctaggagggacaccaacttcgagccctgcggctatcgcaacgtggtaccgcggtgggtattggcacagcctgtgctcgtagcatgcttagccccgattcagagccttatcacgccggcaccgccgcaagtacaatgtcctcgttggttcctagacttaggccgcgcttggctttttgtagtaacgcgacatgaggcagcggggttcagtcagtcaatacctgttgactcgagggaatttcgaatctgatatagtcataggtttattgtgcactggtcaggcggcttgtattgagcgaacccaaatgcttggtaatggtaggaaggggaaaggcgattgaggtagggttatctacaatatttatatctatctacctatatatattatagttacttgcgacaaacgcaatgcaattgcttagtgcatttttcaaccttacaaattacgacaaaaacctgaagatagacgaggatttatattcagatacacgctaagctgaaatcttgaaattatagttacatcctttttatggtcgttcaagatgcccccgccttcccagcaccgctgatgttcgagaacctcaattgcagatttcgcgcatacaacggcccggctggtgtcatccccctctgccagctaggatcaatctcccatcgaacacacattagcaatttcgcaagtgtcactcgcccctcaagcaaggcgaacctctgtcctaagcaagtgcgccgcccgccgtgaaagctaataaacgcgccctttgcgttcgcccttctaaatagtgcatttatttcttccatggtatttccccaccggcttggcttgaactcgttggcgtctggaccccagaagcctatatcccggtttgtagcatacgcgttgtagccgacgtatgtgcctgctggaatggggatctctcccccgaggagggtgggagccgttgtgcggcggttaatcagctggctgattggtgggtacaggcggaggacttcgtagattgtggatgtaaggaggggcaaggcagataaagcgttgtaagccggttccaggtcgttgagggcggagatctccgcgcgtaggctttcctgcatctcctaccagttgttagcccattaaaagcacagttgtatagagaatacaaagcgcaccggatgttcagccaacaagaacagacttgataccagcaacaactgggggttctcgtgtcccgccagaaacgcgctgatcatattatgtcgcagctgcatttcggtgaatagaccactttcgcaggcatatagaagacgacatcctagatttctcgtgtgctccttctcatggtcgcaggttgtgtggcccttccggaccgtctcgataagctcatcagtgaacctagtcaccaattttctagcctcctccctggtttgaagggggaggtagtctagaacagggaagttgaggaagatggggtcaaagatcttgggcttgatgaggagctggaaagcgtgcagagaggcggccggcttttgcagtgtctaagccaaacccatcagttcaacaagtttccgggtaaaacccaagaatcatggaacggaataacttacgtcgaaggtggttcccagcagaacctcgctcaggtttgctaatgcataccgctgcatcaacggattgatatccaccgggctctttctcttgatatcctggctgatcatctgcacaagcagggacgcgttcctccatattccagacggatcataatcccgctgcaagcctggcttgaagatgctgctgtacagtttccaattctcgccatgcgaggatataatattatccccagtgtattgtgccagaacgctatggggaattttcttctgattgccgcttttcgcatataaatcttcgtttttcaggacctcggcaatgtaggacggttttgtgatgaggatattccaccggccgccaaaaaatagcttgacagcgccgtgggttctcagaggggtagagaggtagcgatggtagagagtgacttggtcggtgggggcccgcttcagggtttgatttagcagcgggataagtgtgtagtagaaggggattgtggggagacccttaggaaaaaactggggtggagtgaagaggtaggtgaggaagctggcgagaataccgacgaggcccaaaaagaggactgttagggttactagcatggtggtggccgtgagggtaacacaggtgagtggaattagagcggttaagaagttgaaaagattgagttgagatgggactgcaagacaagcgggatgacatgagggaatctatacagaccacaagcagcaacaatcaaagaaatgagcataagccgaagaaagcaacacgaggctgagcttgcattgaaggtactgctatacttagcttgcacgccgtgaaatcgggctgcgggtcttggcggcggactacctccgctagggctacacgatagtcagtctccgccccaccgatatgtgaccttgatggcggtcttccttccaacgccgcatccatatgctacgtgcccctgaacagacggtcaggctgtctgccaagtctcaaatgctatgtaagctacccaatccacgctggacccatgaggcgatcggcatctcgcgtggcttcgcagtgtcggcacacaaaaataaccactgagccaatggagtgctattttcggcacatatggcaatacaggcatgttgcggctctatcaggctcgggttgtacagcttaacagtgtggaaacggggtcgcgttcagctccgtggagtcttggaactgggattagcgatggagcaagcaggcagtgtgaatcctctgcatctgctcagccctaatgacaacgtctggtatcacagggtctagatgccgacatggggtatattaagatgctgttgggatcgcgatcaaggtaactcattctcaacagcatcaaacaaacaacagcatcctctcatcttctgcattatacacattgtgtcgcaatcatctttattcccttttcaagcattcttagcatcttagcatttccagcattccggcattccagcattctagcattctagcatttctggcattctcagcatttccgcatacattcaccatgtctatcaacgttggaacctctgtctaccaccacgtcgctgccatctaccagcgagacagcactggcaacctcctcggcgccgatggccgatatgccaatcagatcaggtccctttggggcgagattcaccagaccatcttggatcaagacccatgtgagggtgtctaggctccaatctggaaggactatcagaaccacccaaatcacactccccttgacttcttcagaagggcagacgtcctaatccatgaactccaagaaatcgacgcctctacgatccgtggtctcctgacctttacaccttcttcctctctatcatccaacttctttgcctgggcacgaacatatctcctcctcaactcgcgtctccttaccacatcaccatccaacgctgggccgaagaatccagcacacctaaggttagccgaggagatcacgacgctctttgaaacaactctcaagaatacgagccatgacgaccgctgggaccttactggccgagagtacttcattgaccgggtctacttgtttatcaaagacaacaaaaaaatcgagttctgtctccctgcctttccctgcaaatcatcaaacccagataaggtagcaggagttgtacctgatgcagcagagtaccttgcattggaacacttgaatgatttcgtgcagaaggttggt

SEQ ID NO: 3847 - DNA, 2740 bp, Emericella nidulans
gaggcaatcaccttgcagcagccctgacacactaatctagatccgcgcatactcgttctttccactcaaggaaagcaccaataatgaccgggccagattgcgaaagcgtgggatggcggatggcgcgcctcgtgcagggaccagtcatcgaagacgacagcccaagctcagcaccgaaatgcacaaacgtccgagcgccttgaagaagcaagaaaatttcgagaaatagatgcacatgccagagagaacctctggataagctcccatggtacgtttgacagcacatccaagatactcgatctcacaagaatagggcagccatgtagaaaatccaacacttaccaccacccagtatatccaagaaatccatatcggagttttggttaacgttgtgcttgttctcctcgacgggttcgaatggcgggaggttcagatcgaagtcgaaaaactcggtattagtgaacagcgataggtcgttatcgatattgaacccatcctgctgttgctgctgctgcatcgcgacatcgtagggcgaaggaatggcattcaaatcgtccagatattgcgagaagttgggcgcacggcggccattgtattcagccatggtgaagcgcgagccgtatcggccttagatatcgtcttcaaccaaaacccttatcggtaccgtatatctcccaagtactatttccttcgtaagcgtactgaagacgactggaggggcacggcgtaaatatgccggcggtgagtcgtcaagagcgcggtcgctcgaaaccggtcgcggtgtcgacaaattgtcggacggtggatgtagagggtcgaaactgaagatggagacggagagaaagtgggagagaaggagaagaagaggggatccagcatggtgggttaatcggagacgagggccgggagattttgcgtcggattgaggtaagtgtggggtggcatggctcgctgattaatacacagccaaatccgtccagccgatgtccgagcagtctccgctccgctacagaaaacatactcacagaacactcttgagtacatccactggtggaacgatgcttattcctttgccactatagctggtattacaaggtgatttttaatttctctgctctcagtttgagttcgcaattctacaattgccctgaagtgtatggcttccccgtggcatattctgtccctgggtagaagtgccaattggagtgcttgccaccgggcgaggtccgaagccggcctccccaaccatgggccaactcagcctgccatccggtttctccctcgcgccctgaactgaacgaagtctacatctcacgacgcgaacagtaatacgccaaatacgaccaaccaaagctcagcattgttgttgcagcaattcagcctgacactgcgacttgttatcgccagcaagtttgagttttggaggccctggctgctgaaggacctacccctggtcccctgctcgtaatgcctgtctctgatcatcctttgtggccaaccttgcgttcggtcctctgccttgagctttctggttggctgcgctgcacatgatctttttatcgctggcgcggtttgcgatgaatatctactgagtacatctgcagcgacttcaactaaaaccagctcttccccgcatcattcttccgtatggtgtgctcctttctctgtacaacctcgaaggcgcaagcgaatggctaataaaatatctcaattgcacaatggtcataaggtacttatgcgtcgttggacttcaacctcgcaccgttagtggagcgctggagaaagagtagtttgaattatctcgcctgatgatcaattacactgactgaggactgagcacgacatctgcagcatactaagggactttgatatgagagggtgagattgaagacgatgcattctgtagctgaatagcaggtctgcgaagtccggcggatgactcatcgcacctgaatgacttgcgtccgcacccgtaggttgtttgtaggtatttggtcctgaggcatcaatataagacgctatcacgtgatcgcgagtgctgatgctcggcggctttaaagtgggctctcaaaacaaactgctgctcggcgagcaacgactcttgccaaatgcgaggcaagaaacagtttgaacagtttacagacatgagtctgaagtgatcctagattaaccgatatgccgcgtccaaagtccgtccgcgcgcccaccaccgccagtctcccaagcaacttacgtatcccttcaaccactccttcgctgagtaaagcagctaggaaaactgccccgccaatcgctgctagacctcgtcttccaatggcttgacgaccgtaacgtcgataatttccctccgttcttggaagcagacgaggccaaaaacccagacgatgaaggactacggccgtacccggctgagcgcaccctcaacgacgtccgcaacgcctaccaagagcttcaatttcggaaaggcggaaaacgggaagtcattgaccgcatactggatggagactggagacacggaattacgctgcgacagattgcaatgatcgatcttcgatacctggatgaccacccggcaagtttgcgatggacggcgctggagcttacgcgcatcggcatctcaagcacagaagctgaagagagcaatctagccgacatctcagcgtgcattccgcgagttcatgcctcaaatttcctcaataagcttcaagaacagatttcaccgctagtcaaagcgcaggtc

SEQ ID NO: 3848 - DNA, 2365 bp, Emericella nidulans
cgatctcaagtgctcttacgccgtccctatcgctatgacggtaagcagctgggttgcacaaccatcgcatggcccacatcctggcgcaaggcttgtgtcctcgagttggagcaggtcacctctcaagccgcattagaagctgcttcgtggccagcggatgagccatgggcttgcgtctttccgtttgcgccatactgcgcgactaggcgagcccagagcacatcgtcggcccatgtttcaaatgtcgagaatagctcatcagtggatacatccgccagccccaaatcagtgaggcgactgcctcccagcttctccagcaggctgtcgaccaacttagggatgcggtgaaacgtctgggcccattccttgttgccgcagccgaatacagcaaagtcgactcctttgagctgtaatgattcattctgctgctcaagttcttccagccaagaaacgaattgtttcgcgttctcaggaggctgtccttcgtatgaggaggttacgatcacgacagggtggtccgtagggagcgcggaacgaccactgtcaagaccgtcaaaccgcatgacatggaagcccttagacggggcatcggctgcaatacgccgcgctagcgtttcgcatgttccgctatttgagccatagaggatcgtcaaccgggtaccggtgactgaattatccgcagggttggtgacaatcttgtcctgtgttgcggactcaacagccagccccgccagtcgacgctcgagcgtcgttggggtcaggccgtgacgcaagcgtgctttcataaacatgtcttttggtttaatggtcaatgtctgtttgaacttgaggtcataattaggatcagctagtgagaagtcaaagttttggagaagcatggccatgaccaagagagcttcctgccaggcaaaaggtcgtccaatgcaagcccgcatcccgttgccaaatggcttccacgcacttgggaattgtttcaggcgcgcgttgaacaactcgtctgacattcgctccggcttgaactccagtgcgtcctctccgtatacctccgggtccagatgcgacttggctaggagattgacaatagtctcacccgccttgacggggtacttgcccgcaaggagcgtatcctcaaaagcctccaccgctaacaggggaattgtcgcgttgagacggagggtttcacggagaacactgttgatatagggaagcttagacaagtgcgatacttcaatgactagatgaccaaccacatattgcacctgttgctgcactgagccgtaagaatcttggtgtgtaagcaatggatcgaacacgaatgagaggaggccagaggtagtctcgtggtcagcaatcaggaatgtgattagattatccatgatactctcgtctgtcattttctgtccagtttgtgagtccacgccgcgcagcatggccgaaagaagatcattgcgatcactcttcccttccttgcgcgcctggagaaccccctgcgctgtatcccggagcacagcaatgtcgtcttggaacttctgatcgcgattgcggaagaacacggccggcaaaggtggccgccgcggcttctctccagcctccgtgaggaaatcgcccatagcttcgatgaacggatgcaacaccggtgagtagtagctgttgaatctgtagcccatcgagcacagtgccagcgtgtccagcgtcagacgggtaaagtcgtctgtgaccatgatggggcagtcgggcccgtaccgcgcccacttcagggccagctggctggcaatgtcgtgcatctcatcgaacatgcctcggatggaaagcggcccaaaggccggcatcaggaccctatgggcgatctcccagttgacttcgcccatcttggcagtgaatagtccatcatgaacaccttcacgaacgtgcgccagggccgaattgacggactttctgaagcgcttctcgtcgcaggtttcgttcaccagcgcgtgggtagaaacgacgacgaccgtccggccgggaaatcgcagtcgataaatctcgccatgctcttctgctaaagcgaccatggaacccagggggaattcctggtcaattgtgccaatgttgccgatcaatggcagccctttgggctctgggatttcggccatcgtgttgttgcagactcatcgatagcaggaagtgggaaaggggaagatttaagtatacaggatttatactccgtccctcgccatcaggtaattaggactgcatacgggtggataaattaccctaatgcaatggaagacgacatagaagcccatcaacctcggcttgacagaccgacgacgtcacaaaaaatcatagtgcaacaatggatccctttagtagggttaattcg

SEQ ID NO: 3849 - DNA, 6606 bp, Emericella nidulans
gccgcggcgcccgccgtggattcgcagacctgtgctctcaagaccagtacattgggccgcaaaggcaccatgatcgccggcaccctgatcaccggtgtccttcttttctgcttcaccgcgtctacagatccggacatccagctcgtctgctcttctctcgaggccttcttccagaacatcatgtacggcgtcttgtacgcctacacgcccgaggtcttcccggcccccaaccgaggtactggcagcggaatctcgagctgcctgaaccgaatcgccggactgtgtgctcccatcgtggccatctacggcgcgagcgcgaacccggatgctccgatctatgcatctggcgcgctgatccttgccgccttcgtggctatgattttcctccccattgaaaccagggggagacagacgctgtaaacctatagcggccgtcttctgtctcgaggtttcaaaatttgaattttatgttgctgcgtttaagcgaacgagcacgccaggtactagtgcgataagcaagcgtgttgccttctcattttgataccagatctttggctttgttatctatgggattgctctggctttgtcttgtttgtgtggatgtttctccttgcttcggctgggttgctttggcttagctgtacatattccgtacaagattatatatcaaatagacgaaaaaaaaccctattttattccctgcgtatggagcgtagtaggagcggagtacaatactcgaccgatgcgtctgcttaggtatgactctgccatcagatggaagcactatgaggcacgtctgagttgtctctgttaagcagaatactctgtagaagaaccaactgcttttggaccgagacaagcaacaaatgtactgtatgtacattacacaaatccttagcaaagaaatggctaggacgcgcgtgatacgcggcgaagggcaggggtcatcatctcggatagtaataagaggggaagagatacgagggcggagaagaaacagggaatggaccctgaatgcgcctgggccccttcggaacggaccttgaatccttgaactggctgcctgtaggagtagtcgggggcgattggtttggttgccactgccggtgcatacgtcaatccgacgttaatgctcctaggattggcaggtcatggctggggtcgaattactgtcttgggtatcttctgcggtacagtgtaagttatgttcgtgctattagagaacggtagaacgggataggtcaaatgatctgattcacagtcttggtctatagcgattcgttcagacagacaacatcacgcagtccccttcctttatccagtagcaagacagcgagctaacgaacatggtcagggtttacgacagcgtcatgtataatgtgtagacactaacattaggagcgtagcaaatggactgaacgtagcaggtgtatcatcatcatcaaaaataaagaaaaatttcacgatcttatgcaagcatgcaagcaggaagcagagaatggggagtgtggcaactaaactccaggactattggcacacgacccacgcaagtatctgtaccgtctcccaccaagtatgaaactcagtatcaaaggtataaagacatcgaaaacaatatatgcataatatagcaaacgctttgccgacccgaaacccagacatcagaccagatacaggaaacgcctgaacaaaggcgggtatgccccgatcaacaggaatcccaccatcagagaaaaccagaaacagaaacatgatgtcatcagattgaaaagagaatggcccggcggattcgtgagttcgtgaaccctaatcaagtcgtagagacgcttacatggcaggctgctcttgatgtcttctgccgcgcttctctagcagacttgcgttgtctaggctgagctcgaatggtgcccgtgcatttcgaaccatgttctgcttggcagcggctgcgacctgggcgctgtgttgtccatacccccgcggctggtgtgattgccgcatctgtgcagcatgactagtagcacccaagttggtttgccgcattttagcctccatcgcagcaacgtcgccagactgctgggtggacttttgcattttagcaggcggatggccctcttcgtcgatggtctgatacgcaattccatcctcatcatcgtagtcttcatcgagcgggttaagtgctgactggaacgcggcggtcgggttcgactgccggaaaccgcggccagctttgcgtcgcttgccctcttcctcctgtcgatgaacagcgtagccaacatcaaagacttcacgcaagttaattgcaccaggagatcggaaatccattggccgttccccggctgacagctgtgcactcgcgggcggatatggcgcaagttctgccgcaatggcatcaagtgcctggttgcgagcttcgggcgccggtgtcgttagtggcggggcgtctgaagcagcttgcgtctcttcaccggattgtcggatccaaggatgagccagaaattgtttgatggtataccgttcatcagggtcgaccgtcagcaggtgggaaatcaagtccttggcagattttgaaatgtcgtcccaccagggcgataagaaagtatactgtccacgagcgaccttttccgtaaggacttgaatgctctcgtcgtagaagggcggaaatccacaaagcagagtataaaggacgcaacctagcgcccacatgtcgacactcttagaatatctttcatcctttactatctcgggagcagtatacccaacagtgccgcatggtgtcattgtttgggtatcccatatgaccttggacagaccaaagtcggcaatcttgatcacacctatcccgcctgcgcctttgccgggtatgaattcaccttcgtctaccttgtcctcgtcgccaggttggcgcggctttggatgtttcgatgggacatattcggtgggatagaagaggaggttctcgggtttgatgtcactggcaaaattagctgcgctcctgataacgacgaagagtacccataccgatgcacgacacctgatgtctcgtgcagatactcgattgctttggcaacctggacgataacatgacgactgagatcctcactaaagtaggtcaggcggacgatttggtggaagagttctccgcctgggcagagctcgaggacaatgtaatagtattggcgagactcagaaaactggatcagtttgacgatattagggtgatcgatctggcgcataatctggacctctttgaggatgttcgctcgctatacagcagttagcagacatcctagaagcagatttggagtgtattggcgtgcgaattgagcagcgtagttcaggcgaggtatcgagaaggaatatagcgcacctccgcagctttcggcttccttttgaagtcgggatgtaggtgggcgtcagactagagaagaacggcattggcgaacagtccgtgacaaatagcagcgccagtgaaaaagggacacccgaggcaagcaatttcgaaaatcacaagacaacaaaaaggaacgacctacctgtgtgctgttcatctcaaacttgcgaaccactttaatggcgacttcgccgtattcaccggaagcatccttggcccggtagacgttgctgaaagcgccgtctcccattttctccagcaggacgtaacgctctaagcctgggtaatgcggcatcttagtgcgattggtcttttcttcagcgatgatttgctcgatttcggcctcgcgagccctcttgacgggaatctcgggagattcgcgttgtgtggagtgaggctgaccaccccccagcttgctgtcaatcgcgtctagattccctgcagcgggggcgaattgaccctggggctgacgctgttgctcagcatggacaggagacacgttggtcgtgggttccgcatggggggtgacaaggcgggcttgtttcccatgacgtatgaaatttttcaggctctgaattgtgctcatggtaggaaagggagggcgacacgagagggaaaatcagtagcgaatagtaagtagaaaactgaacagcaaagaggaacaaggaggaggaagaaggatcaagaaagtcggaaagatgatgggagaggggaaacgaaaaaaaagaggaaaaggtcgaggaggcaaggcaatgatatgatgatgaatgatggctgaagctggagtagactaggtaaggttgggaattgggattagagcagcctaagcaatgacgtgaatggctgcttgctttttttcgtttctttgtcacccactactgagtactgcccagctttctttgcactgggattatttctgaataaataattgtaggtctgctgtgaacgtcaaagtgtctgaaactgataccccgccaacggagccgaattggaagtttcacggtgcgagacggcaaatcctgaacgaaaactgaggactagcaacgagatctaatggtcggaagggaacgcgttctgcttcagtcaatcagagccgtgcgaaggcaagtctggaaagcagaatgatatgccacaatcgatgatggtggggaattgggagttatgacttacaggagtcggccactggactctcgtacccgagagtaggagctggagaatgacggcatagcggatcacgacgtcagacgccgtacagtaacggcttgcttatggtatcataagttcatatctccaatgctcagtatctaagaagtacctcctctgtaatactgtctcttttattatgtttaacaattatgaacggatctcgtcatgggtttgaggcaggtatgacgtcgtagcaatcatacatgactaagcattctggagaggctgtaggccgttcggccgtttggctggtactggagtagtatagcgtccggctgggtttgatctggtgaccaggcagagcgctaaccaagttttctaaaagattagacaagattagaccggatagtgactagactggtgtaaaatacaagttgggtttggaggaactgtttttcaaccgaggatagtgggatgtgctgtgtgacttgggagatttacagtgatttttctgacgaacgggatattatccatcctttaagatggttattgaattcctccgctttatacatgggattttaaaggagttcttgtacggtgtaggtctgtattctgatcagtctttgtataggtagcgaacctggagttgggatcccgtgaccgggcgccccagagtgttacttttcggcccacttcgactgtggatgatgcatcgcgtccaatattgagatattcccgagatccatctctgcagcctcatcttcctatttatggccacgctgataacacccggctaccgactggattcaggaacgaattgcttctgccggcaacgtggacagaggctgcccttcgctgctggggaccaactgtcactcaaggaccgcttcctgcagacagtccttggccgcctcagccactcagacttgcatctccttcttgactccttcggctgcgaatgatctgtttccttgaacgtccttcctgactctgattcgtttgtttgctattcgagcgccggcttctttgtgagacgcgggcggccagcggcttcgtcgtccatcggctcatcttgacttccttgcgtctcaccctgcaattctcatccaacctgcatccgactcattctttacgacaggggaattcagggaggattacgagaggtactaagatacagagtacattctttgcagcttcagttggggtcaaggttcggtcttgactgatgccctgttccgctatgcgccctcgccgactggtcccctccgaatgttcttgaaacgacttaagtgtcatgatcctcactccaattgacaatcgccagtatttgtgaccgcggttccccgtctggcaattttttttttctttcttaaactccgccgcactcaccggggcgtcgtgagctcgtcagaatgcccagcatcgaggtcgtttcctctcccgcctcgtcagaacatccagataggctcctgctgaaatcccacaagtcgctgccccgtcggacaaataccaatcctcatggacaattctcccaatcgtcacctacggaacacgatggccatttttcaggcggcctacctcctatggccgtgccaattctccctttgacaccacctggcatcacccagaacgaaaatccgaccggagctagtgcacaaaaatcgactctttcttcccactcagtcacaaatgtgcttacgccgtctagactgtcacacccgcctactcccgagacaacacctccacgagtcatggcttcgaaccgacctgggctgagccaatttgggtatatatcctcttcgtcacgggcggaatcattcaaaacggcccacgaaacgatgtccgatgctgaaacagtgactcctcgccgttcgccgccattgctctcccgttcagacacgcagaaaagtactaagagcacgaaaagcagtcgagccaaccgtaccgatgcaatcacgaaggatctagcggctagggagctcttccgagaatcgccgcgttcaaaagtcgaaaagcacgttgaaaagaaacctctagctacggccgatatttcacgcaaacaaaacctg

SEQ ID NO: 3850 - DNA, 9902 bp, Emericella nidulans
cccagacacgagcttctctcgcccgcgatgccattttatcctctctaggatgtgctgctgtgggtcgtagccgtgcatctggtcgaattggcgctgcgcgttgaaaccctgcttctctcgccactcgccatgccgctcaatgatctccaacatatcacgggcaaccgggggagtgttggtatgcttacccagagcatctccatcgacagacggcgtcaaaatggcttgtgaacacgcaggattcagggcaatggcgcgctgccagtttcgcatgaatgaatctgcagagctgccaagcatcccatcagcctcggcctggagctcccaattcttctgggagaaaaggttcggaaagcagctaaagcccggggtcgtgttgttgacaccccgtggatcgaaaccgatgatatcaaaatagagattggagtgattcgtatctgtagggacgacagttgcgtccgcaatggcctgcagattgcggccggatattagggcctgagctacgccggagccaccagggccacctgaaggtttagtaggtaaccgtcagacaactgaaacaaacataccgggattgattagtattgcgccgccgtatcgagggtcagttacgggaacctttgccggcagtcgagcgacagcgatcgccatacgagcgccttggccatctgaccggtggtagtccatcggtacgtcgagccgggcgcactggaatccgctgaagcagtcatggtactcaagcgattctgatggtgtaagctgcccacgttagcttgagaagacgcaaattcgcaatcacaaacctgcgtccaagagaattgattttctgatgccggagatgcgctggccttggccttcgatgtcccaatacgaaattgggaacagccaccaagatagccccgcaagaaccgtcaaagctaacaaggtgggactaccgctttttcgggtacgcccgcgtggccatatgtactcgccatcttgacggctggaactgtggtgtttaccatcctccatcggtcttctgtcttagactaccattatgcagtcgggtgccgccaacaagcccctagaggctgctggggggtggaagggtcttaaatagcgccctgtgtgggccttatctggcattgttggggagcggctgaggcgcatcatttccttcacgatgcaagacgaacattgagaatgggaaagcctccaccgacgaataaacgaaggcggatatgaaatcacagcaggaagatagggcgtcaaatatgcaaggtagtctcaggtataaagcgacaataatgggccggacaagagtcgcgagcgagcacctctgatctcgtgagtggagttccagtgaaaacgaaaaaacccatctctgcattgcgctagatcatgcagctgataaccaaagtaagcattattaggcgggccaacacccgtctcgtcgaggtgatggagagcaggtggcatctttcaaccactaatagtacggcatctgcaatgtgagagaagaaattggattggttgtgtaaccatcttgagtttgaaaggtccaaaagaagaatagacgtggaaatgttagcattcttacagcgataaatgttgatgatctctggttgacttactggttaaggatcatcgaccagaagatcatgtggtccggaaatggtggtgggttctgccagccgtcaattcaccgcctccaataagcactaacttgcctcgcgtaatgtcacgtgagagacgcaacgtggagttcgtaggctgggaagaggagattgcagaagtcctgtggttctatcgtttcttgcggtaactcgggaaactatttttttctcatctacagagttatgtatgatcatccatttgattgccattgcatctttaatggacttgtgcgacgcaatggaactcttacaatgccacggagacgatgttgcatagattcgccaaacggcggagctggtaagtgacggaaacagcgcgctcgaattgaactgcgaacccagctgtccgaagggtagcgatgactcggcgatgcgcataataaaccgcagatccgtaccgtgcactctgaccatacgaatgtgctaggacgctacccatcgtgtcctataaccggaacaattaacgctcaactggagggacttggacttgacactggcaccagacatgggaatctacgcctcagcacacccatatgttggccatggacaagtgtatcaaggtatccgttgcgaagaattgttggtgctcatgcgtctgttagagaaacacgatgcgaaaaccacatactttgcagcgatgataacaagacggtcgaggtggtcgccatctatctgaagatgttgctgtgactgggcgcttgtgccctggcaccacagggtgaacggacatggtcagagttccgtgtctcattgagcttggatatagccaacttcatcaaccccgaatgtcgcgcaaggagatacaagactgcccagcagagggtgagagtgaccccagcagatttcccaggctctggggttgctgagactaaacctgccacgtcttgtcacgggtcagaatgtgtgagactttgattggagttctcccggcttctcgaaatgtatctcggtccgggtttccaactttctatcacgcggatgtttcgcagtgacgtgctgcgagcagacccttgacacgcgggtgaccgcggccaaagagacggcgaggcctcgagaagggaggctggctgccgcggctgcttcgtgagacagacgccacaagctcagttaggcttggacttggacccggcaagaaagtctgctggtgtaacatggcaatcgtatcgcaggctggctatttgtaggaattagaacaatctggtcaagaacaatgtgaatagaagtgttcggtcacgacagacctaggagccaagggccgggacgaaatttgagtcataggtatgtgtaggccagccttgtcaccgaccacgcctgcttcccagaaatgtatgcgaaatgtatcgccaacaaagcagcatctgggccgcggagactcggcactagtagagacaacatgattcttcaccagcttgccaagaagcctaggcagagttcaattgggtgtgtagtgaggggtttcccccaagactcgcaccgcctctattgacatccctggagcgcttgctcactgttcaccgattggaagggttgatctgcgccaaatcggccggtgccgcagacgtacacacggataaatcataaatatagggtgtgcaagtcctttacgtatttcggtcggaatgacgaatgacctgatggggtcttagcccgtcgccggcgatcaaccagaccacggctccgctgtggctactgagtgactggatctgtgatcgacctggtgttccaagtttctcaattccttcactttccctgccatttatttttcaatcgaaaggcaaccgacggttcagacgttcaatcatcgctggtttcgagtttctgtacgtccactgcatgttcactttactctaatatgccggatgacgtatggtcggggagctccacgtgctctctgtcgagctatgagatctccgtccaaaggatgaagcagcaatctcacaaaaactggccgtactcctgggcaaagaatgtggaccctgcgatcaccgagaagacgccgcaggacgaggccgaggtcgctggagtgacgaaaatcaaagctgtcgaagcggttggcggaaagaaggggaaatacttgatgtacgcggggttggccatggtcatgatcatctatgagctcgacaattcgacagtgggaacatatcgaaacttcgcgacatctgatttccaccagcttgggatgctggcgacccttaacaccgctgccagcatcatcaccgctatcggcaagccgcctatcgccaagctatcggacgtgcttgggcgagcagaagcatacatcataactgttaccttctatattctctcctatattctctgcgcctcgtcgaagtcattcagcacttatgctggcggctacgtcttctactccgttggtcaggcgggaatggccatccttaactctaccattgtttcggatctgtcctctatgcgctggagagggttcgcctacaacattctctatatcccatttctcgtcacgccgtgggtttccgccttcattgtcgacagcgttgttcatggaattggatggcgctggggaatcggcatgtttgctatcttgatgccgttctgcgcaagcttcattatcatcactcttctggtactccagcggcgcgcaaaaaacgcgggtctcatactcaatgagcgactcacaatgtacagtttctgctcacggatcgatcttggcggcatcctccttctcagcggcgggtttgcgctggtcctgataccgattaccctggccgccactgcgactgatcgatggtcgacgccctgggtggatgctctgatcgtcctaggcgcattggtcttgatctctctagttccttacgagaaatatgtctcgcaacacccggtcgtccccgtgcgctacctccggacagtgtccgtcgttatctcggttcttctgggctgcattgacaatatcggctacggagcaacacatacctatctcttcgtctggtcgatggtgtcgcacaatttctcccctcgggacgcccagttcctgacctacaccaacggagtcgcgcaggcattaagtggcatggggacggggctcctcatgtatcggtaccgaacgtacaagtggatcggcgttgcgggcgctgtcatccgcatgatcgggtatggggttatggttcgcctgcgtacaaatgagagctccattgcggaattgttcgtcgtgcaacttgtccagggaattggcagcggcattatcgaaacaatcatcattgtagccgcccagatatcggtaccccatgcagaactcgcccaagtcacgtctttggttatgcttggtaccttcttggggaatggaataggatcagccgtggcgggtgcgatttatactggccagctgcgaaatcggctgcgagtgcatctaggcacaaatgtgggtgcggagcagcttacgaggctgtataactctattactgggacgttaccggactggggtactgctgagcggaccgctgtgaaccaagctgtaagttattcagtcaaggatacctgtgggcacgtgctgacttttggtagtattccgatgtcatggggtatggtacctgtacccactgtgccaataaactaaccagtgtaggtacattacaatcgcggctttggctttcgcggtcccaattgtgatactgactttgttactgcccaacagaaaactcgggtaagtctgctcccagctgtacaatacaccgctaatctcccaagcgacggacacaacctcgtacaagaagcgccctccccagattccctcgagatcaagaaacctcaaacgtagcatataaccttccataattctccacgatggctatgaaatgaacgatgatgaccattcccttatcacttcaattgcgtacatatttcccttaagtacatggtgacttactcctgattacttccccggtgatccaatcgaacaaggaaagctcctgtcaatctgatcctccagcgcgtttttgacaatattccacacattcaaatcatatgcctcgccaatatgacccacgggatcgttggggcaaaaatcctgcacccagacattctgcaccccctcttcatgcacaaacgacgtcgaggtcggcgtaaccatctcatcgaacttcgacgcaataaccgtcagccttgttccactctggacaatcggtgtcccgtcattcagccgctccacagccgccccgggaggccctaaatcatcgcaggcagggcaaccgaaaagatgtagtagctggctaacgagcactctcgacgcatcgccaaggatgtaagctaggttatacagcccaatgaatgtagttccgcgcgtcggtggtgcaatagcaacaatcctttctacgatctcggcaatcccgtcctcgaatttcggcacatatagggcttgcattccgccttcggagtgtcctactatatcgactttatctgcgcccgtctgctcgtgcacttccctgatataggccgttatttcagatgcggagtcggcgatgggccgcagaccgccaacaaaggggaacccatcgtatgcgccgtaggtttgggcgtaggtgcagtagccttggttttggaggaaggcttgcagcaggttcaggtcttcatagtaggttgcaccaaggccgtggaggaaaacaatggggttgctgttgttcccggagcggcaggaaaagtcgtttattgatgtggcgcctgcggtggtgaggtttattagggccagggccagggctgggagtgtctgaaagcgcatttctggtgactttattaggattatttaattaacaatatattgcagtattgatgagatattaaagagcgacaatgttgcgatgcaaacgagcgtatgatggtgtcaacaccccgtttcctgggatagtctcaaaagaaggaatggacgctgtggaaaaatgcaggtgaagaaacaataaatatggaaaagatcaataagaccaagaagcaaaagatgagaagctgaagatcaaacaacaaaagtccgacagtcgaaaaggagtgtagctgattccgcaccgaccgagtggatgcgtctgtggaggctgtgtgatgatcgctaataatcagatccattctgaatcctgattcatgattactttacactatcgattcccgacgaaggcccataccatcctgcgactatcattcgtcgatctaaaattgacagatcaactgggcgttctgcaaccgtacaattcaagcaagattgaagaatcaagactccgggcttgggtcagatgcagactgcgctgcactcatcgctgaggtttcaatttacattgtcctcgaaccccgtcccccaagctcaattgccgtctgacactcgcagctagaattggacagagcgtcatgccttgcaatgtacacagaaataggcaacaagcagagactatggaaagcctgcgcgatgtgcagatgctaactccgtgtttcgctcgcgtattcccaggggttcagtaggcaggaggaataaagaagcatttgagatatgttctcctgtccctatataacccactgcccagcgccgaagatatcccggttatcgttggagttgtttacccacgatcacgggcgcaatgcgctattgaatcccgtcacaaatggaggcaagcctgtccgaccttgtacccgaatttgtactgactggcagacaagcaagaaccctcagagatcccaatccatgccgtcgagtctgacgcacactcgggttttacgccgggttgcagtggcgtagcgattgtgcgatgaatcaagtgcggataggcctgaatacgtggagatttccattagcactgcacgtccttttcgatgccgaggaatctgagtgaatgcaacgaaactgcaacgttcctgacaaggctggcatggaggagcccgtctggcggcctgtacccaccaaacacggagcgcggatagatcggaaggatgacaggtcaaccccagtgaaccccgctgtcaaagtactttatcgttgttttggattggcctcatcctcagtctgcaggcgatactcgactggcggttcttgagatgatcgaggacgaagatgatgattgataacgatccgattggattggcttactcgatgagtccaaggcagaaggctgtgattcctgtgaagatcgtcgcctttggttgagctgatggctggctgagtcgcatggccgctagtcccaaaatggctatcactctggggctcacactaggaccatcccttcacaacaccaacaccgcttcacctcctttcccaccgcccagtgttggaattgtcgcttgttgagactcgagtggccattgaaatcggggtctcgcaaaacgctgggtgctgcatctcgattctgacttgcatgcttaaccggccggctgcagccagctccttggtcccccaccataacggcgaaacctccccaccacaagtgccactgcgcccgtgctcagctgccaggctgtcatcgagtacgagtaagcactactggcgctccaaggccccaagagatctcggctgagctcgctctgatctcaaatgcctccatttcgcgccgccgttggtccgtttcgcatgaagctggctaccttttcctgttcaaagctcaatcttcgcgagctacagctaccattgacgggcgctgctcatgtcggaaactctccccagacgaccagccagctccaccacgggttctcgtcaatcgaggtcttgtaaagtgtgccgcgtccgcaaggtgaaagtgcgttgggtctccagaacggttttggttgagtttcggtgaactgttttctgatcaagtttagtgtgatcgcgtgaaaccctgccacgcatgctgtacacacggatacccgtcgcagtgcgtctacgatatcgctccgggggaagatttcaagccgatctcccaggcggacgagatccgtaacctgcgcgatgagatccgagatttgaagtcacgactggaaagtaagctttccctttactagcagtatcttatcgggcagaaactaattcatcagattcgagtccgtcgcaacgacgcttgaaacagctgcgcagtctctttaatacgatccgatccgcgccagaagatgtgttggagcgtgttatcgccgagatcagaggggaggattcgagtcggcgggacccgcctaccgaaccatggacggaaggtacgttggttcgactgaaagagactgacacagagtctgacaatatcaagaacgagcagcatataatgagaccaacaacgtcggcggagatggtatatccggcgcggacggggagcacgagctgttgatagttccacgtaggtttagccgaggatcgtccgaagatagcgataccgttgactctgcctatgggtcgatttgtcgcatggattcgtcgtcatcggtgctggatatctttattgagcggtttgtcgatgctttcagtcctgaagttgatgccaaagctggcgaggctggcgcgatacgacgagctgccgaaattcgcatgttttcgcccatccttcgcgatgccttcgactccgtcagtcattccttcttcgggcgttctgtgcagaatcaaacaatcgaggttaaggggttttcggggtatcctcgcgttctgcggagcttacaggaagctctactggacccagaacgcagtaaggcggagtccacgctggccacagttgtcttattgatggctttcgaggtatttctctaatcgttggaaatgaactgtctaactggtggcagagcgtggaacgcactggccaagaatcgttgatagcccacgttctgggcgcgttgcgtctgatccagcatcgaggcccagaaaaccatatgtttggcgtggagcacctcattttcactgaacttcgtccgtattgggtacgctagattatttccaacttctggacgattctgacggatcgcaggtctcagcatcatttaccgcccgaaaaccgtcgtttcttgcgcgggaggaatggaagacagtgccctggtcagccggcacaactccgaaaaacatccttcattacttgctcgatttggcggtcgaaataccgggaatcctatcacagcacgacgagctacaagtcgggatccagtcgaatatcctcagtgcgcacgagaggtctgtaaaacaaaccgcgttctggaatgcagtcggggactcacagatcgcttcgccttatggaaaattaactgggtggacggctaccctgacggcccaccacgagaggttccgcggcggatgag

SEQ ID NO: 3851 - DNA, 5175 bp, Emericella nidulans
ttctgcgcaagcgcccgctgtcgctcaagtcgagctcttgcacgactctctgccatgggcccaccagctgctgctgaggcagcacgaagcttctccatctctaatttcaggttagatcgctcactttccaggctttttatgagctcatctttctccaagaattgtgcttcaacgcttccgagtctgtcaatggcgctagctttctcgatctgctcctttaaaagagcctttacgacagcttccggtgagtcgtattccgaaaagaggtcgctatcctgtaacaggctggaccacgtttgccgctcgtcttcaaggacttgcttctgaatctggacagtctctagctcagcttcaactcccttcataagctgtaactggttctccagtgacttcttctgctcttcgactacttcaacgttccgctgtaccttgcgtaggcgccgtaattctgcgttttgttctcggtttgtagtttccagggccctcatatggttaacttggtcagacagctcccttttaagaacagcaaacgtttccgcatcattcccttcggctttgagtcgaatattctccgcttctaaaccggcaatgtccgactcccgctcacgaagcttatcttgtgccgtttgtttctcgtttttggcattttcgagatctcggtgcagatcctccagtgttttctggagagatgaccgaatagtttccaactcattaatctgatacttcgactgtctttcctggtcgagaagctgtttatgcttgtcctctagttcttccttcaaactttggttatgatcttggaggctgcgaactttacgctcgagctcaacttttgtgctgagcccattttcttgagcttctctcagctctttcgcaagagcttcagtcttgtgattggcacgattactagacgattcggcagcctgtggcgactagttagagccggtagctgaaaagtagcagtttaaaagatgacttgcctgtgctttccgaaagtccgcgtctgctcttaattgcaattcccgaagctctttctcatggcgtagaaccaacaactcgcgttcttgcttggaattctccagctcatactttagtgtattcacctggactcgcagttcatccttttccgaatctaaataaagtccgtcaacttcgaacaatgcgccgtcatcgaaacgccaacgtaccaggtttcggaggaccagaggatcggatatgttgtcgcaaaatgctcggggcaggtggaatgaccaagggtgaggtgtccctaatcggcgaacctattgaaggtactgagctcctcctgaaactcatctgggcaagtcagcttcaggtccatgatggaactccggtctttgttacggagtcgcaacatacaactgcagtgggagccaatgaatcgcgcagcaacccagttactccctaatcacatagatacgtgcggcatatacgctcaaatataatcagcaaagctgcgagtaaccgacaagaaacaatcaagccacaaacgttggcatcgaaaggacgagcttcattgttttgggaagactccccggtccagcagctgagtcatcagcacaatcaccgccctcgcccgcaagagcttgcattcccaggtcggactagcgcgaaaataaaaaatctcgaattttgtctattctcggttcctttttccaacagctacacctctttgcgcctaccccattcacatacccagaatcactgatcggttcatcgagcggcataaataacgacaatggccaaggacaagtctgagagaaaggagaagcacgagaagaaggagaagcggtcagagaaggacggtgtgcacaagagcaagaaggacaagaaggataagaaagataagactgctctggccgatgcagtattgaagggacttgaagccgagactccctcaactgttcccgtcaatggtgccgatgcgaccggtgaagtcgaagcccgccccgtcggtgcgctcgtaccgtttgccaaaccactgctggaggacaaggcagccaagaaggccctcaagagtgtgaagaagggtaagctccctagcttcagtggttgcgcttgttgatttgatcttgcacctttacggactacgtccaatgcaacccattacattccaagtgaacctatgatctttcaccgtgctaacctgcggttctacagctgcggtcaacaaatgccttaagcgcggtgtgaaggaggttgtcaaggccctcaggaagtctcccgttccggctcctaatgaaaccgtcgccattcctaatggagttgtcattctcgctgccgatatctcgcctatggacgtcatttcccacattcccgttctctgtgaagaccacggcatcccgtatgtcttcgtcacatcccgagcagaactcggtaacgctgctgctacgaagcgtcccacaagtgttgcaatggttgtgccaaaatccgcggccaagggcaagaagaaggatgccaatgatgatgacgaggacttcagcaaggtttatgaggagctggtcaagctcgctcagaaggaactcacgcaggtgaacctatagtgccagctggacgtctagcacctttcttattttctgttctttttaattctacggcttatttatgcgtcttgccatcttccacgactgtacagttccgctttgtttgacaagacagcgcatgtctttggggtctggcattcggtcgtgtttttctgggttaatcttgatgattatctgttgcaaaattcggcgttcttgattggtgtacgaaaaggcaggaagtattgaatagcacggcatgatgctgattacactccctcataaactgacattgctctgcaaacagctcgcgggttccagtgcgctgtactcgacgagcttttcagcggtgcaacaaagcacaatctcattctaagtgtttttacatgattattcatattacagttgaattgggaaggcaaagttcaatgcttgaattaaggcccattttgaattttggattcatctcgtttcatctaatgtacatggcatggttcatcaagaacaataagaggtaaatttaaattttaagcacgctggtctgcgtttaagggttgataccaggtttggtcaccagtacccttctgagccggcgcagcagcggctgccactgtctcggcctgacgtcgctggaatttttgttcagccaatcgaccggggtcgtcctgagagccaatctcagagttgaagctggcgttgtacttggggtcgctggggaactcgccgccctgaccagcagtggcggacgagtcgttctgcttcttctgcgcagcagttgcgcttcgagtctggtagtacgttccgctagcaggggcctgagtccgtgactggccctggtggtcgatcttctcagaagcagggtaaacgggtttgctaatgcctaagtccttcttcgccgcggttgagccgccaacgtatccagtttttgggacgtgagcgccggggaactctgcctggccgccgagggcgtcaggatatcgctgggagccgtggggttcttcgcgctcacgggcgttagaagctgaaggaagctttgtggctgccgatgtgtcggtagtgtttgtggtggtgttttgagatgttgctccaataggttgggcgttgcggttttcattgaatgagccgccatggctgaccgattcagcggcgagtgagtctttcaagacagggccagaaggctcgttgatggggcggttggacaaggggtcggtggtgttcttaacaccgcgctggccagaggggatagggttgccttggagatccattgtgatgtgatgatgatgcgtgttgtagttatttgaaaagttgatgcgatgtggttgcgagtcgaatatttttgtgcttggcgttagtttacaatgcagttatatagacgttaaggcttacaacggacggttctatataggcttgcttgcttgttgtgatgtcatgctgacaggcggactagggctgctcatggatcagcaaacaacaggtacgtcaatgagggccactggtagacctttcgatatggcccagctgcagtggttgtgacgcatcttaccggcacgatgtaaagcgaacctgtgggtattgactgaatctgagtggtgaactttgatgcaattatgctggggtgattgacgtgcttgacgtcaccttttaaacatcggatagtctaacaagcaggtgtctagactcaatcaaacgaaggtatgagcatggacatcatacgaaaaactgttcacttgaatttattgcagtagggtaatgctattaactgtgatttggttatttgtccttagttttcgcagcaggatcgagcatgaggatatattcagtcctcaaattacgaaatagcaccagatctaatagtcattactatcctagtccatatttgacccatctccttactaaagagaaattaggatggttcggcatttattctaagcttaggcgtgtcttgagagatttttgggcccgggaaacggtatggcaagcttcgagaattattgtatctatcgctgacagcctttagatgaaaagctacataattttacattatagcatgtatagaaggagatcatggagaaatcatcattatgtcttcgttttgttcgtatcacatcgctatgctgcaaacaatgagaatcatgggttaccgagcctgagcatcggcagggaggtctccccgaccaacattgctagctggctgtgtgttcctgtgcgtctcctctccgacctcgtgagcactgcttgaggctgtggctggacctcggagagcagagttgctctcgcctgagatgggtccttcgataccgtccgaaccaacattgacagctcgctgatcggcgggattccagtcactagcgacagggggctggtctggtaatggcaggttggccctggacttttcgatgtctgcttgcttgtctgtgtcctggtcgataatggactgcacgatgttcgcattcactcgatcgtgtatcatggacgaaagcttaccttcattgcggagacattagaatccttaggagagtcgcccttagcaccatgggaagcgcgagactctggctcgcgaatgtccctaatggagcagtgtatgtgctgtcacacattgcgattagatatgtgccgagcatgccagatagacctc

SEQ ID NO: 3852 - DNA, 2811 bp, Emericella nidulans
  unsure (1)..(2811): unsure at all n locations
ttcgatatccagatatacccgttcactcctaagacaagatctacatcgccgccgccgttggaagtcgttatcgtgaacatctgtctgcgtgaacgaacaactccggttgccgatccagatccaagaccgccttttgttgatgagctagacgcgccgctaccacctgttcctgcaactgcaaggaagacaccattacggagcttcccatatttgagtgatctagtatgaagcgatgcagcaccatctgagtgcactgtttgtacctccgcaacaagcaaatccccctcgctgaagaatgtccgtatctgcagttcatccgcgctcgttcgccggcgcaggattcctccaggcaagttgatcgcggagagaggtagctgagctaagagaggagctgccacatcgaccttccaccgtctggactgaacttcgactatacgtccaacgaccaaatcaccgatttctggcgtgtaacgagcccgaagcggctgaacagaaagtagcttgttggtcttttggactgttccggcaactgtggcaataatggacgtggataaagggttcgtatatgttccatgtcctctagacgataaggacgacgttagtctgcacgcacatacaacagtaatcggcagagaaagaaaaacaaacctcatccattgcgggtcattcgtaacaacctctcctggtgtgattattcccgttccaatatccaccccttctattaatcgaggccgctttgtcggccgtgatgattttgctggtgtgagctcaacgccgccgtcactgtcaacggacatatcgtcaaagtcggactcagcgtacgtcgcgtcgacatcatccgcgacaggggctagtattgtgatcgccattctttaaaatattctagtcgctattgtaagcagtactataggcgaggctgggctgcgttgtgaagcgagagtttgcgatttgaagctccaaaaaaggctttggtctcgggagcaaacaagacaaacagaagcaccctaatgccgcgtgggtcgttctcggatctctgagcatattgctatatgaagttattatcatcgctctaggttcgtttatgcggcaggattattgatctatcgctctttctgtataaggcatgctatatattcatgtgatgccttcacgcactcctgcctgataagatctggcgcaacagattggaacatgtatctatgcgagaaaggagccgaatgcaacgcgtgtaaattcttaatacagactaattagaaattaaacaggatagctaatattgcatattagccggcaacctataagccaaggttcatcacaattttcaagccagacaatgaagcatggacgtagacactagttttacaagaagcagaaggtcgaaatgtgcataatgttcatgcccctcccccagatgttcgttttgcagggcgcttggcgttgttggatgtactttcttccttcttcttccgattcgagcgaccggtgacagctttagaccgaggggtggcctcttcatcgcgctttcgtttggccttggagcctcccgttgcgggaccagaatctgccataacgctgtcttcatcgtgcgtgtcctcatctttacgagacaaaggtgccgatcgcttggaggcgcgcaagttggagggccgtgacgcggatttttcggaagcgttttcattgtcctggaggaagatattgggatggttcttgcgtacgccaatgatgaactgaaacagggcttcgtaaggcatactcccgttctctctctagtaaagatggtttctccggaacacgacttaattgaacagcggctgccatgtcgcccagcctagcgtctgtggccaaacagtattctgtttcatgctccggtgttaggaacccaaggttctgattcaaactagaatcatccgttggatttactgggtcctgactctcggttgtgggcgcagagtgcggcactttgagtaaatctgtgtaccgtagcagaggcgcgaacgccctgcctcgctttagcccaccctcgagttgctgatatgactcgagggtaatatttccggccgccaagtcatcctttgcatttctcaataccgatgtggccaatgcatggtcattgtaggctgccgaaagctctccgtcagggggtggaagaataacttcgtcaccaggaacatgcaggtcgtatcggagcttgggcgggatgtgcaaggcgtcgttgaactctaataggacctccagaagctgactataagaacaattaatgaacgaactggaggtaagcatgactaattgacgaactcgttttgctcctggattctctttgacagatcctcgatgcgcaattgctcccggcatgagaacctcgctttccttcattttgagctcgaattgaatcttaagtttcgcaaacttcccctccttttagaacttcaaacagtcctgaaactaatctggcattgtcccattctgcactcacttgaacgaccgatgagactgcttgtaggagcatcggcgtcaggcacacttccggccacagaccgggtttcgtcgcgttcctgagacattcttgttgagtagaataggcgaaccattcaacggcacgttgcccttagtgtttaaagatttcgtggtcaatatccgagcacggtgtagacaggtgagaacgttgaccatctggaccgtggtcgcgagtcgtgccggaagctcaaaggcggagtgtagcgattctgcccgtcaaatcaaaaaaaaaaatgtcaccaggccatcttccacagtcagttgagattcatcgttttggcnaacagttttgtttta

SEQ ID NO: 3853 - DNA, 4089 bp, Emericella nidulans
acaaacttattcagacagcaagtgatagggcgacatctagctcggaatggagccacttttgacgacaaagcggagaccgtgacgtggttggacgtgctttgtttatactctaagctgtgatcctctgctggcagaactgccgggcggtggcggaataaagacgggacgggcggggccgttggacgattattggcatgacagttcgatcaccgctctttcatctggaccaggtttctttcccctcttctgctgtcaatgcccaattggtgttgaaagtacgctttctcgcctagttgtctcttccatcttgtttatctcttcatcctagacatgtcctattccgagccatagagggctgcagcttcggctgcatctttgtcgctgtttgtcgtgacaaagaccatccactcaaatcggtgtttatcagtgcttctatgtacttcaccgcgccccgctatgcctcaccatcacaagaagaagacaaatgtcctcaagaactcctctccaaaggtggagaaaacgcgagttttcccggattcaagacctattgaactgccagtagtggctccgacaaattaccaagaaatacaccaggaggaagttgaggctcttcgctcaatttatggcgacgactttgaagatgtgcaacaacggcggtctgcgtggcatgtaagtctcctttccccgatccaacctaaatctctggtgccctgacatgtcgagcagcgctcgtcggaagtttcttttagacttcatttgcgagcaccttccaatgccgatgttcgcttagacttgctcgtcgagctgccagccacttaccccaagacgtgcccaaatataaccgcagagaatctggaagacctccgacaaggcgcccagtcgagaatacgcgatgtcctacaaaataagcccagggccctcctgggatccgagatgatatatgagttggcggattcgatccaggaaatcctagaggatgctgcggaagctcaggcccatgatcaggatattcccagtttagaggaggaacggatggtacaagaagcagccgcaatcgaacgagcggagcgtgcaaaagaagaagagctccgaaagcaacaagcagcttcagcaaaggaggaactagagctcaagcaactggtacaggatgctatcaataagcgtacgaaagcactgtcacgccggaaaagcagatcgtccgggctggaagcagctggcgacactgaggggatggcccgtgtaccaggagcaattacctttgatccgccgttggtcataacggacgcagacgagggtccattagtgttccgagcggtatatggcaagaccttgttgaaacgtgtacatggagcgagtacatttatagtgaggcctgtggttccagagagccgaccctgtgcccctctcctagtcttgaaggagctgtcaatcaatgaaaagggagctgacgccctagccttccgtgagcaaatgcggctgagcgaggacaagcttgaaagtcttaagaggcttcggcaccaaaatctagttgacttttatggcttcaagatccagacgcccctgtactccggccactcggaagacagtacttggacagtattcgctttggttgagcatgcgaacaagggctcgctgtccgagtttctggacatagttggtacggtaccggttgaaatgattcgtagctggactatacagcttcttgaagcactcgaatactatcatcgacatggctttgtccacggaaacatccattgtgggcgtgttctgctgttcaggaataccacgggtggtacaattgtgaagctgctctcgagtattgaagaagctctaccagacgcagctggaaacaaacggcttctcatggcatccaaatctcccttttggtttccaccggagctaactcaagggaactcttctccaacgatgaagactgatgtttgggacctcggaatagtattcctccaaatggccttcggaaaagacgtgcttcaacgatatacttcggccaatgcactcgcggacaaccttgagttgtcgcccccgctgcatgatttgctacaggagttctttaggccaagcccaaaaaagagacccacagcatttcagttgcagccctcggagttctttcgtgtcgacagtcctttgatcatgcggacgagcgcctcgagttccatgtcattatcgcggcgtccgcgctttgaatcctttagcggcggcctcccttcattttcacgctatcaccaggatttcgacgaagctggacgcttaggtaaaggtggctttggtgaggttgtcaaagcacgcaacaagctcgacggtcgtttttatgctgtcaagaaaatctcacataaatccgccgctgcattgaaagatactttatcagaaatcatgctgttgtcgcgcctgaatcacccatatgtggtacgctacttcaccgcttggcttgaggaggattgtgatcagagtgacgaggaagcaatctcattcacagacgggtattccgttggtagcagacgttcggaggaattcgagtacagtactacaggcggtcttgatttcattagttcgagcggctacccaaacatagagtttgtgccggacagtgatgaagaggacgccggaacgatatctactagagaaaagggctcatcgcctgaaacctttggcaccgagagtggcacgggcaaagaacttagccgcgtcaggtcgggctcgcatggccggccaatgctcactgcgctatacattcagatggagtactgcgagaaacacgtaagtaattcatcatgcgcgtcttttttcacttttgtaatcagaggctgatactgattctgcaagacgcttcgagatcttataaaaaatggcctctatgacgatgtcgacagatcctggcgtttgttccgccagatcctcgatggattgactcatattcacagtaatggcattatccaccgcgacctcaagcccgacaatatattcatagatgcagctagcaatccgcgtattggagattttggtctagccacgagcggccagttcacaaccgctgtacgctcctccgcagcggcagatttcggaggcaacctcactcgaagcctgggtacaacttattacgtggcaccagaaatgaaatccggtttcgcgggacactacaatgagaaggtcgatgtaagtttatcttgtcactttgtgtggtcggttgtcagttctcgattcctaattgagccagatgtattcattgggagtcatttttttcgagatgtgccatccattgccaacgcttatggaacgcgatcaaacattacgagctatcagggaaagacatcatgtgctgcccagcaccttccaggattccgagaaagtagttcagggggagatcatcaagtcgcttctaagtcatgatccagccgaacgaccatctgcgtcagaattgctccatagcggtcagattccacttcaggtcgaggaggagactttcagacgcgcaatcatgcatctgctctctgatcctagctctcccgactacaagaagatcctctccgctatattttctcaatctccaaaaaaggtcgaggatattgcctgggacatgcattcacgtgccccaccggcagcgaacgagcttctcatgcacggtcttgtcaaagaaaggcttacatcgatcttccgcaagcacggtgccgtggagactacaagacagatgctgtttccgaaatcccaacattacaacagcggcgacgtaaggcttctggacgcatctggtaatatgcttcaattacccttcgatctaacgctcccgaacgcacgtgcaattccccggcaagacccttcactcgaaaagacctttgcttttggtactgtctacagggatacacctcacggtggtgaaccaagaactcataaagaagtggatttcgacattgtgtctcgcaataccttagacctggccttaaaggaagcagaggtgattaaagttcttgacgagatcattgaagaatttccaccattgaaggccagcgctatgtgtttcctgataaaccattcggacttgcttcagctagttatggagttttgccgcatcaaacc

SEQ ID NO: 3854 - DNA, 3512 bp, Emericella nidulans
aagcccctccagtttatcgtcaacgagaacggtactgcaggctttatgggagagcacagcatgatggatggcagcccaacccaccgtctcaacgaccacctcaatgcccttatcttcaacaacaagattgatctctcagcgaagcctgtgcgatccaacctgcccgatccccggcccatcgacttccacctaaatgaagaagttcaggaagcgattgacgttgcggccaaggaacaccgccagcagattgccgcccacgaactgcgcgtccaagcttaccagggctacggcaagggcctgatcaagaagttcaagtgcagtcccgacgcgtacgtgcagatgatcatccaacttgcctacttcaagatgtatggcaagaaccgcccaacctacgagtctgcctccacccgcaagtttgccgagggtcgcacagagaccatccgcactgtctctgacgagagcgttgccttctgcaaggcaatcaccaactcctctgttccccgtgaggaagctgtccgtcttttcaggactgctctcgccgctcactccaagtacactgccgaagccagcgacggcaagggtgttgaccgccacctcttcggtctcaagaagcttgttcgtgagggcgagcccctgcctgctatcttctccgacccagcctattcctacagcagctcctggtacctgtctacctcccagcttagctctgagtacttcaacggctatggatggagtcaggttatcgatgatgggtttggaattgcgtacatgatcaacgaaaacaggtaagccctcacctacttttgaaattatatcaaagcactaattcgtatagccttaacttcaacatcgtctgcaagcgcatcggcgccgagcgcatgagctactatctcaacgaggcggcaggcgatatccgtgacatgctgatgccggatcttgccgccgaggccgagaaagccaagctgtagaccagctctgtcttcttttccgctttcatcctgcaaagactgttttgtctcgttgctgtaaaaaacctagacgattcggtttcgtcatggccatacaattgcatagaagtttgtgtttgtcccttaagagatatctgctctagctagccagttgatattaatgttgatgtattctatgtcatatatttctatttgatatcttttatggcataaccgcatattttgcttgtaggaaacggctttgttggtagtcttatccgaataaccagactcggtaaatagattccaataatcaaatctcccccttctcaaggtactaggtcatttgaagttcagcctagcttgggttcgtcgtccggtttggagaatgcggtactatttttactcaccccctactaacagttggggtccatgtaaacacagctctgctaactcagactacgacggatatccaacaaatttcgggttagggttttgatctgcacgccacgcgagagatcacgcatagagcgggcgcttgatttcaggttctaggaccgtagtacagagtacgtacttggcgtaaaagtgaaactcgggctgaaacagcagtttgggcgtgcgggccccttgctttgaagtcctgtagtaagtacagaggcacgtacgcgtacgagtaggaagtaaggggtgcgtttcgcgtggttggtacacgtgttttctgattcttatgcttacttcgtaaaaaacttggagaatggaaaagagagcgatgcggtgtatatcgagtcatcattttatcttcgactgggatatctatgttttggtagatacatgttgagttgagctcgttatgatgctgttgctttaaatagtcaggtccaaggacatatccggtccagactggtataagcgctagcagatagtgatgggtgtaattgatgttgagggtcacattcaatgaccggtagtatgatggtgcaacactacgctagttccctgggttacgttggtgatgcatctggggtttgagtaactcggcacgtagcccccatgcgcatcttgtcgacggtcggcgttccaccagtgccaccgacgggttcgttccatttccaggtcgggaaaatatagataaagtcttgactcttgtctctcgactcttgaggcggcagtcaaggagtctcccacaacgtactggcccaatcaagtcttgtctgacaactcaccgtcagattctgcgcttgctgcttgggattctctgacgctagcattgccggacatccgagaagaggtcatgatgttcgcactttgtccgcttaattggcgttctgtgtcagtgttagtgagacaatttatggcatttaagtttgagcttctttcgagcatcgttagacaggccagaaaatcacgcacctagttcccgaattcgctggcgtagcatctggttttcccttgcaagcgacgcggcttcggcttggaaaaagctgctttcctctcggcttaggctaccccgccgtcctaatccgtcaccggggacggcgacccactctgatgcgtcccgggataaatcggtcggccgtagactcggggagtgtgcttggctcgggcggcggctggacaaagaagaaggcaactgagtcgaagttcggctgcccgcaaagttggagagcgaatttgtgtggggaaacgagacagagtgctcggtagaattcgtagcgtcgccaagaattgcagactgttgcggatgttgctgttgctcaagttgctgaatccggagctcttggttcctgataatttgaagaagccggttctgggcattgtcaaccatcaaagacgctgaaaaagaagctgtctgccttaccacctgggcttcttgctcctgctctagttcctgatgcagctccccaagcgaaggagcgcggtggtgatgaggatcaccaaagccactaacggggctcgcggcaaaattgagtatattcgaccggggcccatcagacggtgaggccgacgggttatcgccgatcgactcactgagcctattgccactactgttgacgttcacgtttccagatcggcgacgctccgacaccgagatcgggtgatggcggtgcggtagctcggaggccatagtgctactgttgaagtggttgttgttatggctcgtcgacgtcgaactggcgccggttgaaggaacggcgtccaatagactggagagagtccgtcgttggcgtggggaagcagatgccgagcgagaaggaggtagagaattgatgtccggagacatggtctgggtcggtcaaacgatcaaactctcgtagtatccgaaagcagaggatgaaataaatgtagtgtatttgcgaatgcggtacgcttatgatgacggagttggttgagctctcactatcttgctgggctgactgatggaccatggtcaagcctggagcctggagattgaggggagcggccgcaaacagtaggcggtcacaaaacacgaaaacagccgccagccgctttatccggatacatactagcgggcgcccagaggccggaaacagccaaaaggac

SEQ ID NO: 3855 - DNA, 3109 bp, Emericella nidulans
cgatctaccaaaatctgtaacctggaatccgatccactctagcaacctgaacagcataaattataaagaaaagtagttctcacccgtgaactgcaacactggtcttccatctgtagaaagtaggagggaaaacgaaagatctcagcgagcaaatgcttaatccaaatgacagatagaatgatatataggtataagtagagttacttagtcttagtaaagccgataaagggagaggggataagtaagggtagatggtaaagatccccctgcgtaaatgtcctggtgttttaattgcttggatggatctaacaagcatagacacgatagcgataaacagaagaagaaaaaaacgcatccacattaaaagccagacgaccgtcgagagcaggtagtcatgcgaatacatttaaaggaccagactccgcccatcatgttacttgatactcccgatttgcgtcttccacaaagctcggccccagcaggctctctgcgttatccgttagacaaggtctcacacatcaaagggtcttgtcgaatgggtttcacaaccgcggttagtgctatcgtttcgtgtggaagtaatctgagtgaaagctcatgatcctgagtcggagggagcatgtaccgaaagatatccatttctattcttaaggtgtgaattctcttgatatagtgtcatcttcttggtactgtatatatactattgagtccgaatagcttgacctccccatgagttgtagtgccgggaactaactggcccttgggcttcgcctgtgagtctagagtcggaaggatgagtctgggaaacatagggctctctgaagagcgtcctcgaatgatgagtcagcagtacagtcagcccatccgggaccggtggtatactgccgagggcggtgggagctcccgacgtcatccagcgctacattttatcatcgcggcttttgacgaggacgaaatcatagacttccagcagccatttatctcttttcgatataatatgtttccgacagcaagtcgactagctgtcaagccctcaggcttttttaaacggagcgcagaggagctgagtcggttgtcaagaattggtgtgtttcgcctccgcaacgcctgttaactgaggtattaaccaacctagcatggaacaccgaggctcttagcacaccaaccaagccgtatactctactcgactttgaagatgaagcatccgttgcgagctgcaagaccatggccgaccgtgctgtgggagggttcagtaccgccagcctcgactatatccccgccgattcttcaacaaacactcctgcgcacgcgaggttccatggaactatctcaaccaagctgcccaataactggagggtagaaaggacaggtgaatatcccgcgcatatgaggatgatcagagaatgacaagttctttatcaggatacgccgccttccgcaaccaagaccggggcttctggctttttggccggctatactgggaccttgacccgtacacctacctagcactgcgagtcaaatccgatggccgtcgctatactgtgaacattcagaccgacaccatcgtcgagaccgatatccaccagcatcgattatacacccgccaccaccacgtgcggaactccgaatcctcatcctacgatcccctttcaccatacgcatcacccgaagctgcagagtcgcccgaactcgccgaagccaaatatcccaccggaatcccgcctgctctctccgacgttccaccgccatccactattatgtcgtctatgtccgcgacgacatctggttcgaccggatgggagacaattctgctaccattcaactcctttgtccggactaatcatgggcttgttgtagagcctcagacttcgatcatcagacagcgagtgaagagtgtgggcattggtttaaccgatcgggtcgaaggcccttatgatcttcgcatacatcgtatctgggctacaaacgggatgagtgaagccgagattgaggaggagcgtcgaatttgcggaacagctgccttacctgttgatgagggtgtccgaacggggtgggttgcatcggatgacgccaaacttgagaaacatgggaagcaagagcacaagccaaaggggctgaaggggctacgcgatgagtgggactaagcgactgaaaagtctcaggattgtacagtacacatataccattatattttccaatataagaacacaaattacgaaactcacagaccagccagcgcagatcttagtttcccccagtgatccgctcccaagcctccctatacttttcactcgtcttctgcgcaatttcatccgtcatccgcacgccagacttgcccttaagcccttccttcaccaaccagtctctcaggaactgcttatcgaagctctgctgtccacggccgacctcgtacgaatcttttggccagaaccgagacgagtctggcgtgagcacctcgtccgccagaacgacctcgttcgtctcctcgtcaacgccaaactcgaacttcgtatctgcgatgatcacgccccgagtaagcgcgtaggcgtgcgcggtcttgtaaagcgtcacagcgagctcggcgattttcgatgcgtacggttcccctacgatttcgacggctgcagcgagagaagagaattagtccacttatcaagcactattgtaccgcaacaccaatctgaagagaagcaaagcaatgtgatagaggatcccgcacctttatccggatggatattctcatcatgctccccctgctccgcctttgtactaggcgtataaatcggcccatcagggaacgcctcactctccctcaggccctctttaattggaatgccatgaaccgtgccagtcttcttatactcgttccacgcggagccggtgatatacccgcgcacaatagcctcaatgggcaggatgcgcaacttacggacctgcatggcgcggttctgcagcacaggatgcaatgactagaggatctgcggggggaggtcaagtgtgatgaaccgcgtgctgagggaggggagggctgccgtgaggatttcaaaccacttgcgcgcgcaaagggacaggaggacgcctttttgagggattccctgacagttttaag

SEQ ID NO: 3856 - DNA, 6444 bp, Emericella nidulans
tgtctacgcctgtcgacataggttgattagaaaggttggctcatcgattgagggcatgatgctggaaggtactgcttgtacgcgttggccagaagcctgactctgttctttatagatggagatgagaaatatgcgttgcgacaggcttagcgtttctcaactgacgacctcaatgtgatttccttccccatgcatgtgtgttccatctgagcgatacccattcgcggtgcaattcgtgttgatgttaagggtctctcgctatgatcccatttccgttgacatgggtgcctattgaccttaccatattccctgctgtttacgcacatcgtccgtcgctgctaccgataaaagcgctcggtgtaaagatcaagaaaatgagtttgtctggaggaagtctgtcaagcttagatgtgtctttgacgccgtgtctcagtactttgcagacaatctgctgcaataatgctctgtattctttgatgagttgattctggcttaatactgagataatgccaatctgatggtttctaggcctcggtaaagatgttcggtaatgttacctctaacaatttgaagaatgttgctggtatggtggctcctacgaaggcatcactgaggcggtcctagttagatctgaaactatcttattaccggatctaggatagaacaacgctgcctagtacggtataaatgaagcagtaattattatcttgctagaattcattaatcttaatggaagtttcgttcttctcgtctgccgtgattgctcctagtagttgggatgcggatggcttaagccataatatccatcaacacgccaggatgttaatcgaacatagatatgccagcctgtccaagggccaacgtagccacccagtatatccttgtcgaccatttcacggactctggtcaatatatgcctcggccaactctgcacataccaatcgcgcttcaaagttgtaagcaaaaaggcataataggcgaggataatcagactcaatggctgcttctgctgcagacatctgacgaagtcattgctcatcctgtaaagccagttgaaaacgaacctgaaccgcagttcgaacgttgaggaacccattggatttgccgtacgttgcttcgtagatagcttcgacctggtctgaaggcttctaaatatgtggcagtatcttcgctattgcttgacgcaatcgagtcccgtacgtgacccaagggctctccgcaatcaaggcgtgagaatccttcttcttcacatcttgtcctcgggttttccattggcgtcgcgatgttagtctgcgggcaatggaagagcctgtacattcctgaagagattacaaggcgtagccgatggaggttaataaaccattctatcagctcttcgtcagaatcattttccattccgggcaataaagtcatcgctgacgtgcaatcattcgaggtatgccatcaggacctcccacaagagtgtgtaagttatattaatacagtctgcctatcctggcgtgaaatgtaggcttgacagaaaacggaatttgagtggctaaaaaataccagacgaagcatcatcaagcaacagcggcactatggcttttcccaagcgttcttgcagcttcagatgtctgccaaccgtttcagacggacctgtttatgtcacagcggattgcatagatcccatatatgatactcctatcctaacgagtgagacagacgagaccctgcctcgtccccacaggaaggttactgggtacttcaacggcaccacggcagatttcaatatctatctaccggtgaaagtagcatgaaacggcagatacttccccggtctatcctctgcagaattccacggccggagaagatactgttgccttcaggttcgatagcggtgcatatacgacccagacatcagccggcgcgggataccgcgcgacgggccgccgcaaagttcttcaaagaaatagcacgggagttttacggtgatacagtagagcaggtctacggatatatctacggaggcagcggtggctcgctgcagactgtcggggccatagagaataccataggcgtgtgggaccgcggactcgcgttgattcaggccatcccatctcgaacccagacaacttctgtatccgcgctcttgcaggcctggtattgggcgagaaagcagaccaggtcattgatggggtccaacctggtgggagtggtaacgccttcgctgggcatgaagaggccgagcgcctggtccttctggaggctactgcgctcgggatgccttggctggctgggaagatttcgagggcgcggcaaacatatttagaagccttcagaccaggtcgaagctaatgcaagggctatcttgtggatctattgtagatcaagcctgttgatgggcggcaaagcagagcgaaccacctgaacataaaatgaaacagtccgttgtgcgttttgggggtagagatactcagttcgaaagggatagtgagtaccgtaagccgactcttgcgccgcatgcgtactcctggactgtgtatcagcaggcaaaaagagattccccgtattaaaggtggatacgagggctagttacgtgtggaggacaacaaataatatccgggggaaagcgaaaaaccgctgactggctaatattcaagccctagctcatcggcgctcctctcagactcgctcttcgcgcccaggtgtttatggggtgcccctcctaataagccatatcgcgccatactacgggacggtgaagttttgccagatataacaacctggaatatcgtttgtttcagctaaaaacagcgattctcgaactcttgaatacagactgaatcgacaagacgtagcgttcggactctattccccgaacttctgtgatatataccgctgtaaggggaatataatggggagacctacgagccgcgcttcacattgcataggttccgttaggcacaaattgatggtttggcagacgactcacaattgtgccagtctgtcgaggtcgtcgtctatggcacagacatggaagaaggtggcgacttttcctgctcggatccgagggttagccacttgttcaccaacataagagaaagtatgaaaggcaacatgagctatccgcagagagatgagcgcttaaggaggaggggagagcttgctctctttgctccactactagtctggtttatgactgcttcggcaccatcaaagactggcttcggaatctgacctttgaccagcagcagcgcgaaggccttccttcaatatgtagcccagatattgacctcgatgctccgtgggcttgtgtcatctggcacaacatgactgtgctggcaccttgggctttatgggaaaaaacgaaggacgtaatggttctggaacaacagtatcagtccatgtgcacatggattgccgcgattccagaaaatatgaaacgtcaccgtcacctgtgcgatccagttgtgctacagtttgcggttagagacactatcaagcgctcagccaaagctgaagcacccttcagtagacttaatagagacattggtccctagctgatcctttacaggactgcctgaaccccaatgaacctagcatagagccccagaaagcccttccgaccccgccctcatcgccgatgcgttcctcataaagtcactaaccgtgatgtcgcaggctgtcaccgtccttggtcatagggaggacactgagcagttccacgctcgactcaccggcacgaatcgagtttgcgggggaatacttcagacatgtctattgaagacaacatcatcatgacacagcggactctgcgggaagttcataccctacccttctaggtcgcggtgcgcgagtcaaatccatgggctgttatgacggcataccacaagatcaatggcgtacactgtagtgaggatccgaggctgattcgagatatcccaaggagtgaatggaagtatgatgggctagttctctgcgactggtgggggatctacagcacctcagaattaatcaatgccggaatggacctggaaatgccggggcctacagactggaggtgcaagatcctggcatgggcgacccgatctcgcaaagtttcaatagaaactatcgattcttccgtgagacgggttctgaagctcgtcaacagggtccttgcagctcaatctgagcccgtcaaggattctgacacggagaaaaaccgtgcgcttctgcgtgaaaccactgccgtaccagttgtgcttctaaaaaaaaatgaggccaatgttctgcctttggtgaaggacagcaagacgcgatatgctctaatcggcgaccactggaagaacccggctgttgctggtgacgacagttctgaggtgactccgtactatgtttctaccccttacagtgcatttgtggaggctgtgggagaagacagcttcatctgtgctatgggatgttactgtaagaactccaatgcatcaggccgagcaagactttagctaactgtctctttagcacacaaattcgctcctttactatacagcaccatcacgcagcctggctcagacgcccatggcatgctgcttgagtttttcaataaagatcccaatggctcttcggacgccgaactgctctacacaacgaccacagagaaaactgacctaaaatttgcagacagtctgcctccagacacagttcctgagtatacttcctccggatccgcaccgtattcagagcacccaagaccatgaaatataggtttggactttcagttgccggaaaggccaagcttttcgtcaacagcacggagcgaattgacctatggaccagccatcccgagaaagaaagcagacagtactccttgcttcaatgggttcacgatggagcggtttgccgatgtcgatgtccgagaggaagccacatacgacctggagcttcacctggtcaatgaagatctcggggttcacgttggggctgcgccggttggatccgggaggccgttgaaattgctcgacaagttgacatcccagtcattcttaccggcttgagtgcagattacgaatacgaagggattgaccgcaagtcacttgggctgccagggcgcgtggacgagttgatcgaacgcgtgacagaggctaaccctaagactgtaagtgccttagtccatgctcttttcaggccgaattaccagtgctttgccgctgacatgctgatagattatcattaccgaggccggaacagcaactaccatgccctgggcagataagacgcccactgtcatccattcctggtttggccgccaagagacaggccacgggatcgttgatattctcttcggagacgtcaatccttctgggcgattgccgctgacatttccgcggtgtgtcgaggacatgccgtccttttgaacttcggcaagatggacgcagatatcgtctatgggaagggagttttcattggccaccgctactatgaaatgctgaaccatccaccacgtttctatttcggtcatggtctgtcctacaccaccttcgaatatagcaacctggaggttcctccggtctacgagtcagatcccaagcatattatgaccatttctgtcagtctgaagaatactggccaatgcccaggcgcagagatagtccaggtctatgtgaaagacgtcagcagctctgtgcagagaccgaggaaggagctgaaatcgttcaagaaggttcatcttgcacctggtgagaacatgaaaatcgaagtcacgtcttgacaagtatgctttgtctttctggtgtcagcggacttcaagattggtggctgaggcgggtgaattcaaagttatttttgcaaggagcgctgatcctgcggctgaagttttacagcgaggttttgagctacgaaagtcgttttcgtggactaggctctgagtataaagcagaatgtgaggggctctgtacgtagaaagcagtcgacgacctgcaaaggcgccgatgctgcaggtgaagctctgcagccttcagtacgatatatgttcagtctcacaatcgaattgttttgcccgggccacaatcgcgtgtaaatctgatttcaatctcatagaataattggaggatttatgggacagtgactggatggctaggattcttgacaaagctggacttcgcgatactctgggttggagactggacggcttttattgcgctgtcccatttgcaatagtgaaatacttgaaatcaaatctaaaccataaatgtaatggaggtgaatgtaaatacccctccgagtcaaaacctcggtgataatcacctggggctgcaacattccagtgcagagaataccctttgcctgtaaaattcattctgctggtgtcagaccactgagtggaccattgtgcctttcttatcgtattcgatcatccaagcttccttccccctttggatctagacctatttattgactggggatacctttaattcgccgccc

SEQ ID NO: 3857 - DNA, 3637 bp, Emericella nidulans
acgcggactagcggatgcagggtgccaattagcgataggatctcatcaaactaggtagccctgagcctccccttctgagcagatcctccccaagtattttgtaactcacttgaccctctgactgccatagcacgatatataagtcaactgctttcgcggccctgactgcgagacgcatctccttagagaaaacatcaatcgcgacagtaaggttcattataagagaagaccattaagactgatttcaatacctccagacgcccttgcgtcgttcattaggcgaaacccgcaaggcccgcagctgcagcagagatgacccatgccagcagccgcatcgttgtcatcgcaggaatgatcctcttcctcgtcgcgccaaaccctccagatgacgcagtatactaatgacccctcctcctgcgatctcgtcggagaaggtgacgtttacggcattggagttcgattaggctactatttctcctggatctctggtctcaccgctgtctttttcgacaacccaaaagcagtgcgcgacactcgccggactgttatcttggtctcactcgcagtatttatcatcatcatacagaacacgctgaacggtagcttcgcgcttctcgagtggtcaatagtctttcccatggcaagatgggcacctctattggttctattcttcgcctcaatcacgaatcaggacgacccccccggcaccatatatagagtacacaggtgaggcggcgggtaaaaaagtttaggtgtctcacttgacctgtaacctgccatatcgttgacaactgttatgggctctgtattagtcacgcatccgtgggtatcgttcactcgtacacagcaaggttgccggccagagtgcgaagtgaagggttttatcattgtgtatttcgacttctgtaaccggcacttccagtcttttgtgaattttctggctgtcgtttactgtatgtctggatgtgtaaagccgcaagggcaacgacggacgagagacgcctgcaactggagataatcaagttaacataaccaaaatgcagacgcaacacatctcgtcctctccagaagttgatactacgaacttgatggagatcttgaagaaggcccggcccgtccgagccgccatgatgcagctgaaactccttttagtggccattggtgtcagtgctaatgttttttcggagaaaatccttgctggaaataacattgacctcagtgatgcgccgctcctgagttcgggtcaactgatcccgttcattgttgggctagctggactggtgtcgactagttggtcggtgacgattggagagcggttagcacttgctcataaaaagaggagagagcgggctgtgcctctgaatgagatcatgacgtaagtttctcgtagaagggatactacagtgcagtaggacgaaggttctaatgactggttcaggggatctatgataaatgactggctcggtagtgaagaccaggtttttcgtatccgatcggaatagttctataccacatgtctggtagaagggctggcacgtctgttgcagcgccctgtttctttcgcaagggttttaagagtaatgcataagcaagtcgtgcacggtcttggagcctagatgcacttggacagtttgaagcgattcacaacaacaaaagcattgcgctgctgaggcatcgggcacgatataacccttattgaaagaagggctggagggctgtacaaatatcaaaaactgtgaatagcgacaatatcaaggccgacttgcatctgataagttaacaaaaggctagaccttcgctgacgaccaagcccgtatcctctccccccagaaccaaaagcaaattgggacaggaactaatgctacacaaacgcatccaagtatactagttgttttcgcgacaccgagcctttcaatcacctggttggcgaagagcgggaaagcggccccaaaaatactcctcatcgagccattcacgcccatcgcactgttggccatgctagtgtagcagtcgataatatagttaaacccctggatgaacagcaagtacatgccgcagccggttaggaaactcgcgcaaacggggctggcccaagatataaatatggacgaagctgtccaggcgaaccagaacatcccaatggggaccataaccccgccgacgatcatgggtggaagacggctttcggggatgtagacgccatcaggggtgtggctgtggtgacgggtgtagatttgattggtgatgatgatgcccagggagccggcgaagacgcctacgataagtgcgaggagaggcacgtattttaggctcgtgggccagctgcggtcttcaccgaaggcgacgggataggtctggtagaagagaaagagaactccgtatacgaaggactggtatagtgttaggagagcgaggataggttgcgtagtgaatagccctaggagctgactgttagcattggtatagtgacaggaaaacagatctgaacccacaaaagggtcgaatgaggtaaaacctagcaatgtcccgtatattaaggccatcataatcagacagccgtcgtgaaattcgcattcccagtcttcctacgcaaggcccttgccctcttcctcagaattacaggcggaaacgtctccggaaagacgaaaacacagagcaccgaagcaccaagtcctacgataacaaccatccacatagtccacctccagttgagcaccggcgaccccgaacccataatgagccctcccaacaccgggccgaaagtagggccggagaataccagcgacacagccagcgccatggcattcccacgttgggagataggccagcaatcgcttacaatacctccaaagatagcgactggcgctactccaaagagaccgccgaagaagcggccgataagtacggttggctgacgttctcgcctgcctcagacattatgtcgaaaagcgaggagatggctgattcctagcaacatgggccatttgcgaccgaagcgctcggagaggggaccaaaggcaagaaagccgaagatgtagccctacaatagtattagcacacggattccaaaagcccttgctcaccgatataacgcccgtcgcagtttacatatcctgtggagacccttaaggggtgaatacatcgactttttcatataatcacgccttgaagcttgtaccaaattgcgtgtgtgtcagcaaagggttttatgtttacaatggctctttcatatctgatatgacgaagactcagccgcaagtaccttgagaatgattcatatttggactgatctttgtgagaaaacatgctgaatacttgccttgttaaggagtctttttcaagaagttctctaaagcaattgttttcatggcaaggatgattgcaaggaatcatggttctcatagaggatttttcccttgtaaaagtacagccggtgtaggcttcaatttcattctaagggaattggtttgtatttaccatcttggtacataggatctaaataactccaatgtgatgccttttgcttctattcaagattataatggcatgaatcatagctttttcaggtctgttaaggtcttattttggatttaataccaaggttcttctgcgtcttgtgtacctcttaattatgtaa

SEQ ID NO: 3858 - DNA, 1555 bp, Emericella nidulans
  unsure (1)..(1555): unsure at all n locations
catcgcagttttgtgccggtaggatcccgagacgttctcttcctgttgccttcgaagggttgctgcatggcgtgcagccttatatggctttccatgcattgcgctatcgataaagtcttggtcttcgacaacaattgcgagctcgctatcgtggtaaccgagctgcgactggaagtaaatgtcagtttagctatgatgtgaagcggtaagagtcccttacccgatcgttgatgttggcactgccgcatatggccaccctatcgtcgactatacagaccttgccgtggacatagagttcttcctgtataaagttctctttctccgcttcagggtcaccctcccacacttcatcagacattttcccgccgtggagcattgtagtgtgagagacactatccttgttgttggcagtagaatgtgcttcgtgagccttattccgttcctcgtacttttgtaatctggcaatccgttcttctctctccttttctgcgcctccgtaattgatctcattcttgtcgccttccttgccaacggaggggtgaacactctcactcgtgagggtctctgcaactccacgctgaatgtcattgaacgttacacctgcttctttctccagttcttccaacgcaggagtcttgttgattcgatcatatgctcgcaaattgaagacgaagatatgatctatatgttattagcgaagtactgctttgcgatgaagcttgactcacttgtaggatcaactccctgagccgctatctgaccaaagatggagtgttctccccggttaattgacttgtactggtagtccatgatagcccttgttcccgtcgcctcgttctgtcgaaggtctccggcgaatccaggaatcgccggtatgacaataatcactcggaactttcttccttctttgcccgcccgaacgcaagcatcgactatggaccgccctattgtattaagaatagggctttgttgatcgccagtagcggtgactagggtgtgttagcacaattcaatcccgcataggacattcaccaaagcttactgaaaaactgattctcaatgtaaacaaaatgttcggccttattgataatgtccttgtaagcgttctgaatgctgtgttcaacgaggatgccgctgctccaatcagcactgctgcgtacaatctgtgctgtacaagatccttgcgctcccataggcttggtgttcaatggcttgtaggggtgctgcacataatcaccaactggaaactttgggcgctggacgccaacgaggtcctcatccttgcccgtgcgaccctcgagcaatagccagtcaacggttggatcccgcttatacttgtcgcgctttataaaattccatcggaggacaaagtgctcagcaatgtcgtagacacaatcgcctatcacgcccatagcaacatcatgccaaggcattcgaccatactcggctttgctgagttcattagagtgccattcgccaacactccgcaagcccattatcctgttattattggacacatgcccaagaaagatctccatcctaaggttcnatggct

SEQ ID NO: 3859 - DNA, 6228 bp, Emericella nidulans
  unsure (1)..(6228): unsure at all n locations
taccgatagagcaccttcctcgaccgcgaacccggctttcccccgcggattccccacggcttcgtgaaccaccgatcatcatgcagactgaattctccgcgtgagaggaagcggtagagagtgcgctgcgcgttcccaccacggaagaaccccggccctccgctatcagggacactctcattcgcctcaatgcgaagagggtaattcagctcaatgatttctgtcgggatggacttgatagcggggaaaaggcagtgacagtcaagcccgtcgccggcctgtcgcgcgggaacaccgccaaagccaatctggtacaactggtaccactcgccgtcgggcttgtagcccgagtaaaagaagtgcggagagtcgctgaagcctgcggcggccgcataaaccgggttcttcttcgcgatgagtgcttgcatgacgtccattgtacggccgagcatatgcgttcggcaggagattggggccggcctgacgggcttgagaatgctcccctcggggatgtacacatcgatcaggtcgtggaaaccgtcgttgatcactgtcccaggggctgcagcagcgatcatgtagtagccgatgaacatcttgaacatggtctctgagaggtagaagttgatgctgtggtcgctctgaggggaagttccgctccagtcaaagaggaggcggccacctgggaatttcttcgttgtgcaggtgagtgcccagggtccaacgccgtggccatcgtcatcgacaaagtcggtgaatgtcgtcggctcggggtcgaagtcggtgtcaatgatcttggccatggcgacgcggttgcgcaggaggagctcattgcaggccgcgaggtatatctcgcttccgaatcgtgtggccagctcgcagactcgactagcagctgtgcggcacgcagtaatgattgccatcaggtcggaccggtaccagtcaggctggcgcgagttacggcatagcaggtcaacaaggtccgagttcatgactcccttcgagtacagcttgatacaagggatctggacgccgtcgtcgaagacagacgttgcattgatagacatactgcctggaacaatacctccaacgtcagtaaggtgtccaaactgcgacgcccacccgagcagtctgtgctcgtggaagatgggcaggaggacaatcacgtcattcaagtgcgtcacagcgccttcaatcatgtatgtatcattagtgataaacatatcgccttcttcaatggtgcctttccacgctcgcaggaactgcgtaataaaactgccaaattggccgacgagcatcttgccctcggccgtagtgatcacattgaattcatcctgctgctctcgaatcgcgggggacatactgcagcgcagcataagtgtgtccatctcgctgcggatcgaggcgagggcagaggcgatgagggtggggatcaagggcgtcgattgcaccgtcttcatcgcaatttctggattttcgtcctttgtttcttcgcgtgtcaccccgtccaccggttgaatgaggatatttccaattgagtcgatttctccgtagtagccaggcagaatcagagtgttgctgtctgtttcagtgatgatgcatggcccgttcaggcggaccccctgctggctcactttctcgcggtcccagagcgccgcctcaatctcgcagccttccacaataatcgtcttcgtcgacactagggccgcagccggtggtttgcttgacgtagctttgctgagatgagggtagtcgatgggaggcctggcatcaacagcaacgacctcgagacgcatcaattccagcttgaaattggggaggcagtacttgaactgctggtcgtggagctggtcgaatttggtctgcaggaccttcctccattcctcgtcggccagtgagagatcatctcgctccagctcgactgtcaaattcagagcctgaccgctgtagcgcagatcgatgtggtaggtgatatcaagcgggatttcctggtttgcgtttgaagacagcatagtctctctgcacaacatttccagttcctcaaagcgacgtttcacctcctgcgaggttgttgccgccagttgacgtataaacgacgaggactgcgagtggctcagccttgtagttgcatcgcccagggcgcagagcgtgccaggaaaaggaggcacaatgacaggccaggcaccaagcagcttgccgacagcgttggcatgcagaggcccggcgcctccaaacgcaacaagcgcaaagtccttagggtcatagccctgctctacggagacgagccgcagggcgccgtacatggtctcattcaccagattatttatgtcctcggctgtctgcgtcacaggcagattcatctgctttgcgatttgctcgacagccgcccatgcagccttcgcgttcagcgtgaattctcctcccagcagggtatccggcaagtaacccaggacgagattcgcgtcggtcactgtcgcttcagtgccgcccttgttgtacgacgcagggccgggcgttgcaccggcgctttctggtccgacgcgcagtgtttctgagatgtgcatatacttcgcgattgagccgccgccggctccaacggttcgtatatccacagcgggcgagcggacagttagatcgcctacgactgtctcacggcggagccggggcttgccctggtaaaccaaggcgacgtctgtagaggttccacccatgtcgaaggtgattagatttctatattgagtgtttcgcgttacaacgtctgcgacgccctggacgcccccagcagggccagacatgaggatattcacgggcagctgccctgcgagatccagacttgttagtccgccgtctgacttgagaatgcgaatgacgtccccatcttctgcgagcagggtctgcaaattgctgagatacgtctgaaccacgggcttgatgagcgcattggtgcaagtcgtcacggtacgttcgtattcaccgacctcgcgaagaacatcgctcgagcagatgattgtgatattagatcccagcacctcgcggaccacgccagcaaccacgtcttcatgctcgctgtttgcgtgcgaattcagcaacgagatcgctacagcctctggtctctccttgacccaagccttctgcaactcgccacgaagcgtcgctacatcaacgggaacaaccgtcttcccatcaacagacatgcgctccgaacactgtatcacgcgctcgagagggacaatccgggtcggaggagtatagtgcagccacgcgccgagacccccggtgatctgcgaccggcggcacagcgaggatatccttatggcccacggtgacgatcagccccgtctgcgcgcccttgccttcgaggacggcgtntgtcgcgacagtcgtgccgtggtggatgaactggaatttgccgtcccaagcggatcgctctctcaatgcttgctgtacgcggctaatgccgttcttgattccgatactttggtcttccactgtcgtaggcactttggcccgcgcaatttgcccttctggtgtgagggcatacacgtctgtgaaggtgccgcccacgtcggctcctagacggtagccatcgttgtcggtgttgatcggcatgatgatgaatgatgttgaggattagggataatcttctgagctcaaggagagagggagataggggagagtgtgcgcttgcacgagagataagaagaagagggggagatgcatatagctcctctggggaataagacggcgagggtgatcaacccaccctggagagcggccgagggaatcgaattgcccaatcgcaacagccggtgggccatgatgcatgaattggcgacaagatgaccttgagggacaatctcgtgcagtcaagccgcgtcaactcatggggccaagttctgctcgctgtacgagtcggtcagactgactctaagggtgcaatgaccgttgggccatgactcgacaaccatgtagggtttccgcctgtagttcttcacatttgatatgtgcccgttgcattggcaccctgcattcgttatgatatccctgcacatttcccgcaagccatgggctgttccacgtgtagagatctgcgtcagtgttgtaggagtgaacgtgctgttcgattgggagctaatgccatccctttcaacaccctgttacacttacacgaaccatcgactgcaagctcgaagctcatctactgttcgctgcatttttgcttttttttcggtccaaatgctgaaaatggcagacatggcgagcacccctgtctagtgggatgcatccccatgattagtggcgtgctagtgcatcagtgttgagaaacaaatggtcgtacttggagcatcctctagcctgtgggccacaatccttctcttgcagttccttcctttgcattgatattaggctcgcttcaattatctcgcgtttgagtgggacaagatcaaccagcagagcagtggcagacgggactgattccaaatctctttgccctttaaccccctttgcttgctttgctgattcccctcgtcgatttgttttttatcccctttaccgtttttctgacaagtatactgggattttctttttcgtcgttgcatctttccaaccgcgtcctacttcacgatggcggagaaagatcaggcaagagcccaggaggcttatgacgctgagcgtacaagtcctcatgccgatacgttcttcgacgaggatggcgaggtcttcaagaagacgacgaccggggtcgacttccgcaaggtgggctggttcaatgccaccgtcatcttcatcaagatcctgtttgcgaccggggtgctctcgctgccatcggccctgtatgcactcggcgctgtgggagggtccatcagcatcgtcgcctggggagccttcaacacgtactgcttcgtgatcctaggcaacttccgcctcaagcacccgcactgccactccatcgctgacatggctgaggtggccctgggtatcgtcggcaaggaagtgacaggccttctttttatcattggctacgtcctggtgacgggcagtggcatcgttggcgtgtcgaccgcgctcaatgctctgtcgcatcatgcggcgtgtaccgtctggtggtcttttctagccaccgcggtcatcattgcgactgcgtcaatccgcaagctcgaacacgtcggttggctgagctacgtcgggttcctgtctatctacatcgcagtcttcattgtcgtcgtcggcgtgacgcagcgggaccgaccagcggctgccacgggaaggtcccctacgtctgcatacgttgccatcaaccaaacccggtcgcgggtggtatggtcgcgtcgagcaccattttcgtctcttccgctgggaccagcgcgttcttacccgtcatctctgagatgcgtaacccgaaggaatacaagaagccgctgtattactgtatgagtctggtgacagcttcgtatcttgcctttgggctggtcgtctatcgctggtgcggtatgtgggttgccagcccgtcgcttggggtgtgtattattcctttattatctcttagactagtagttggctgatagtacatagagcgcgggacaaactatcaagatggtgtcttatggcgtcgccctggttggcctgatcgtcagcggcactctctacctacatgtaagcgttcgaaggaaactgactttctccattctctctaatgcatatcacaatccaccaggtcggtgcaaaatacgtcttcgttcgcatcctcggtaaaacttctcacctccagtccaacagcattatccactggggcacctggctagcttgcacaacattgctcggagcgctggcctttatcctggccgaatcgatcccaatctttaattacctcattgcactcgtcggctcagtctgttttgcgccgcttgcgatgagtcttcccggactgctctggctgtatgaccacgggcactacaggaaggagtcgcttatgcagaaggtcgtgtatttgctgcatatcggcctcgttcttcttggtgtcttcttcctggttggcgcgacgtatggagtcgtcaagcaaatcattgacgcctatgcgactggacagatcggtaagcatttgatcttttgatcctggaccatctcgcgtggggtctgtgaaagtggctaacaacataggttcggcgttttcctgtgccgataactcgaactcctcttgatcggcccttcggtccggaggtctatgcc

SEQ ID NO: 3860 - DNA, 3966 bp, Emericella nidulans
acgaatccgctggacgatgaggagaccagcgagaagctagatagacgcatgaaccggcgatctttgattggcaaccttaaccccttagacactgcgactcttgctcaacttcagactgcgagagacggggataatgtgccaagtgacgattttgaacgagcataaatgtttgacgatgacggaaatgaggcgcatagcagggtgaatagtataatagaattttacgaagtagtctcacgcgaggcttatatacgttttcaactgctcagctttttttgtagtactgtagttccttcaatccacaatagactccactggttgccgggatacccaccacgtgatacggcaccctttatcgataaggcgccaactagccgtcgttgatgaaatcatattataggttgcgactaacctctgatcaagcgcgcacactgggtcatcccgtagaagggcagacgccgtcagccccctgagactctagtaactttcacaaagtcacatagtcgatatcgcagacgttgaccatgagcgaccttctcaattatattctctcgcaggactcttttagaaagttcagtaaacaccacacatgacgccaaattttcagcgctaactgttgtgcaacaggaaccgcctcccctccctctattccgatttttcaattcaggcgaagacgaacccggatggttaccgagttaacgtggcagcatgggaacaggccctgacgagagccgcgaggaatgggtatatctcctcacacacgtttttgcaacactccggtgatggaaaggtgcaacggcgcaaggcgaaccatttgacactgcacgttagtgaaggactcttgcgagatttggaaattccggagttagggcggccagtcgcgctgggggctgtttttgtacgttcatcttacattgcgggaattaagtgtggtatttggtgtccagagctaaggcatgttatacggttctaggaagatgccgtgtggaatcggactatggtcccggtgcacttgtataaagccagcgcagcgagtctgcgaaaaccgcaatggggacttattgatacaacaactttgagcccttggaatgttatggtgtgggggttgaagcagatacgtggtgttgttgttggatctggcaccgatgctcctaggttgcagactcaggatttggttctggtaagcaaccttcaggtatgtgcggtattcggacagtcatgacatgattgacacctatacgtgattactgattagggtataggaggcggcagagaagcttgttaagcaggtgttggacgcgagcccttccagaacagatctggttttttccaaagaaagttttgtcgaagcctttggcacgattctaaatgagaacagcgagctttccaataccgactacgacgttctattgctctatttatcccgcgacaagggtgccattgcatatgatggcaaggtacgtgatgcgggttatatactagatatgattaaggctaaatgtatgctagacgatcaggttccggcccacggatgattctccaagagagattactgaacaagatacggcgatttccttgatcaagtctctcacagcaacgatgacgagacagattggaagcctggaaaagaaaatcgccgagcttaatgcaaccgcaagagccgctcttggtgataagaaccgcgtatcagccctcgctgcattgcggtcgaagaagctcgccgagcataatctacagcagagacttgatactctcgcacagcttgagcaaacccagctcaagatcgaacaggccacggaccatgtcgagtacctcaaagtgatggaatccagcacgggcgcccttcgaggtctcaatgctcaactcggcgatgtctccaaggttgaggatgtcgtctatgagctgcgcgaggaaatgtccaaagtggacgagatcggaaacatcatgggtgaagctgggccacagattgatgagactgagattgacgaggagctcgaagggctggagttcaaggaacggaaagcgaaggaagagcaggaggcagagggaaccaggaagcagctcgccgagctcgacaaccttggtctggaaaccaaaggggctatccggaaagcaccagtggggcagaacgtcgattctgccttggaggacagcattgaaaagctatcccagatgtcggtcgaagaaggagcttgaggtaatatcgcagttcccagagttcactcttgctcaattaaacacagaggtactgaggggccggcgcagtcctagccattgctggagttcggaactgtctgaatgtcggtctcgctgacgagaccgtttgacagattcaatgcggcgttttatgggtggacgcactgctggagatgggaatcgcctgggcatcgccctcggtcacattcttcatcggcgaattcaccgcacgatctatcccgcttaatgcttggggaggatctggtaccgggggaacctctgttctattgtcgatagcatcctgaggattcattgtgcttttctcgtccacatcttgcggagttagcgaagcttcgataggctgatcaacgagttgggcgttcgcggcgtatccgaattcgcttgggaagcgttcggtattgttgagcgaataacagcatcgtttttctttcgcgcattcgcgatcaatgccttgaaatctgtgtcatagttcgccgaccactcttccgtattaaaatccttattcattacagcgttcgttgggtcggtgggagtgactgaatttcctccttgggtccgctcccagacgtctaattcacgcagtaactctcgtttcggtttcggtgtcctagagtcacaattggcgttccacaagttcaaccactcagtatgtcgtctttgcagcaaagctcgcgggccccagtttggtatgcccagatccttcaatttctttcgtagcaccgtatctttcagtagagaataatttataacaggaagtctttccggtggttttcccgtggctgctaggaacgatttgcgcgggccaggtgctaacgacctataggcactggattagcactatgtatagcaacctcgcactagcggtatgggaatcttacccaaaagccgctggcttcagttcctctgcagtcccagtacaggagtcaagatgacggaacacggcttcttctttcatcctccgtccacatacagggcacggcaccaagccgtctgcaaaccaaagttagtggataccagcgatgaacgcgttgaaaaacctacccggcatatagtcctcatcattaccatcatctatgacctgaacaggagtagcttgtggctgccgactagctcctcgactctgtgatcgggtgcgaataccctcctcaggaagaccatctgtgccgacaatggcattcggctctattttccgctttttcgatgcaggctcttccgcagccaaatctccactatcatccgtgccagtttgtgccatcctagctagctgtaatatgctcggtcgagcattcttaaacccctccaccagctcctgcaccacccaattgcgacgcaacttcagctcctgatcagagctccggcatgtagggcattttccctctgtactcagacaccggcggatacatagcgagcaaaatgtgtggctgcacgacgtgatcacagggttgtcgaaaaagtccttgcagacctggcagcggagggacgtttcaaaaggcgcgagaagcgttaacggcgtgtcgagccaatcggtcgagtccgggatgtcaaatgtcggctccatcagtacaaacgcgatggtagccgccttccaggtagacttctccgcgaagctcttgcttatatctcggtatcgtgagagcttgggcggattcaggatggcgtctctcgattggggaaagaaatggcggcttgcgccaagactggctgactggtacgcgtaaagtggttcggcgtcacgcgtcgatcacagtg

SEQ ID NO: 3861 - DNA, 3842 bp, Emericella nidulans
gggaaaatgtgaatgtgtaaggaaagaaagagagaagagtaagtatagtggatggaagtagggaagcgagaagaaatgtgatatgatagagagtggagtagagcggatggaagggtgttataaattaaggaaagtgaagaagaggaaagagatgataagtaaagaaaagtgtggagtggaacacagtaatacagacggtaggggaaaatcttgtcccggggggatagcaacggggtaaaagggggtttatggggtgctccaaaagaaatggggaaagcaagggtgtggaatgggaagtgattgggccagaaggatagtgagcgggaggaagatacgagaggggacggggaagaagaaaaaaaagatctgtgtaagtgctaagaaggtcaggtggggtaaaaagagacaataaggggcgtgattttataagtgttctgtgggtaggtaaggcaaatgaagacagagaaacacaaattgggaatgggacaagaaaggaagctcaaaagagatagccagaggacttggtaatgtttgttgatgatcgccgtgatggtgacatgcagaggtgggaggtgttgaatatgccagcaataagctctgctcgggagtggcaccctcgggagaatacagcatgacataaggctgcagcgcacggaagtagacgtctatatgttgccaagcaaggaacaaaagattcccgatcagggctggaatgaaactgtataggaaattagaggacgaaaaggcggttgacgacggcctagtcgacagatgtggagggaagccttcctcaaccccaccgttcacgaaactgacaacgacaaatgcaacgaatagcgcacagattatcacagtccacacaataacagctggcttccgtaaaaaccatggcgcccatcggtagcgaacagccgacgaataaagttcttcgtacccatctttgccagtcatgctttgtctctcggcatcaaacgagacttttgacaaatgttctcggctgtttctaggcggagtatgcagggatgggttaccaactgttccgccagcttctcccataccgtaaaagatctccgggtgtcgtccctgagagagctgccaatagcccagtcgaagtggtctcgacttcaacaattcgccgacgttggtagcagtctccgtatattcaaaatcaggcagcacattcgaccgctggatgatggtgatcaagtctgcaagacaaacaggatcccacatcaatcccgaccaggtgcgaaggaaccgtagcaatagcgttagaagccctattgcgagcagaccgtaaaccgctatcaatgtccaaccaacaggccttactgcagcccagcgccaacttccttcaccatctataacaaaccattttacctggaagaagcagctcagtagtggcaccgcgatgaagttggaaatccatattgtgagcaaggaaaaccccactaacgcctcgccatgcatgaaatgcgaaaagtccggcagtaagaaactctttgacacaatcggcagaccctgtaagacacttttgtacggccgctcagacgccataatcacaaaaggcattgcgcgatatacagcggcctgaataacgaatgtcgaaatcgatataatgatccctagaatttgcgggagaaattgcacaacaaagtaccgcgcaccactccgtccattgtacccccagaccccgtcgtggtcttcggaccaaacattgctgaacgcaattccagcgatcatcagcagaacacaaaagatagctatgctaagcgcccacggccgaagcacaacaggcacaaagtccagcgctgggtagataaggttcccctctggtggctcaatggcaacaaatgcctccgggtctactgaagtctgcgggtccctctgcggtgattgctgctgcggtgcaggcgtcacggcgcgaacaaaatggcccaagctgccgtcccagaccaaacgatcgggaggggtcgattcatacccgctttcttcagaccttctcggatcatcgtcctctccttctcgggtgagctggttgatagcaaaccgaatgtacggcgaatcgtccatccccggcgtcggctctcgccccgcatagctgtcccttacgggctcactgctggccccgtccatagataagccgagatgagcgtttctaccctcggatgactgggttgtgctgtcgatctgcgtcacgaaggtttctcgctgttccgcttgtcgtatcgggctgtgttctgcacgcgaaagagcagcgggcggcgctaggagcgttcgagacacggccggggatgaagtgcgcgatacgggatgggagttcggtgttgcatatcgcactactgtagttcggctgccgccgctcgctgagcggctggtgggtgtgcggctggagaaggagtagtaatcgtctgaagccgcagcggattgttgcgattcggtgcgaatcagctgtggtcggcttgctacaaatggtcaggcttgtacattcaaggtcggcgagcgaaaagggtcacttacagctgactgttctcaagctcacattcccagctgccggcgcaagcatggcggcggggctggccgaggaattatgcgaggagctcacttgcagcagtctagatacattccctggtgcaaattgccgtcctagagaaaagaaccagaaagtatcgagctcaattcgacggttatactggagattgtaggataggaggataaactgtcattgctgagctcgaatgggagacggttggcttatgggtgcgtttgccagcctccttcgagcccagccacccacgagtgagcccgacatcgaaatgaggcgattgaactggaagtcgcgggacacgatatcgcagccgatgattggagatgattctgagacgtaataacgtgattggtcgggttgagctcaaagtgttggagttgtctcttcagtgttgagctggcaaaggtggccaaggcagggagacctacctttcggccctttcgacgtcgatgcggccttcgatgcgattttctggtgttcaaaaactgacattgtctttttggtactgcgagcaatattttatagctattaagacacatctgagcttagcatgtgctgctgccctctccatccacgtcgatggctgccgcagagcagtgagtcgtagcccttgggtggcctgcctcaaccccttccagttctggcattagtatgacagagaagagaatttctatcatacaacatccaccgcttgttgggactcgcaacgtcaaacggagtacagataagcggcaatgactcctccccagccaccggcattttcatcctccgtcgcgatcgcctggtttccactgagcaccatgttgattgtactcttggtatttgtcccatagagataaaccgccgatgagtccgtgatctgaatagcattcttctggcatttcccgctgggcgcgttgcagtcactattattgttgaagaacacccaattgcacccaccatagaggaacaaacttgaagaagcatggatccgctcaaacagccccatccgacacagagcatcgtctgcagcacattgcgcaaaattcgggtcgcttggaatcatgttatcttgccatggggcaggggctagcatgttacccgggccttgccagtatgccgattcgctctgctgcattgtggaaaacacgttgcgcgcatactcaaagttgtactggtacagcgtatgatgttcaaatcccgttccgacaagccaggtagcagctgtcgcttccacgagggcacctcgccctgtggagatggtcagtccgttgctgccgtcaaggtcgtgatctgccgtccatccccacagact

SEQ ID NO: 3862 - DNA, 6019 bp, Emericella nidulans
  unsure (1)..(6019): unsure at all n locations
tgaatcacggacgagtactatggtgatcacagccaacgccttgttcaaagaaaagcagcgcactatgagtctggaatctccgtagcgtccagtcgatcctgatttttgagttttcggtagcactccattcgttctcgtaatccgatcccaggagactatggccagtggacggtaaacctgtccttagcgtagttcatgcaatgcagtgcctgccgccgtggaagacggaggaggccgcgcaagtgttgccctgtgatactccgaagtaacgcctggcaaacgcagtccaatcagcgcggtggccgtcggcgggagtcccggctaccgctgcacctagagttaggttcatgcaaagtgcgatatgcggctagccctgcggtgccccgggccattcatcatatgccgccaactgagaggatccgagactcagtgagagtcacagaagacgtcgaactccgccttgggctagagtcgatgcaaggggacgcattccacttgccattcgcgtgccccattccgatcgactgcgggaaggaccgacgtcacccctggtaccgcacgaccggccgtgacaatccttcaggaaagccaagcgatggttttgggggctcaagacgttaatgtactctggaaccctgaagcgagatgggatggtccgtctattgctgacggaaccacggctgtcaatgggtgccatcttagtcatgctccttccggattggagtacgaactggcgctaaattttctaggccacagccagagccaaacaacctgactcagcggaatccagagactccagggagccatgctaggagccatgctaggccgtccgccactggccaatattttgggctcttccagaattctcgcccggtggggttgagattggtaaggatttaatcccagttgagcttagacgaactctaacaagcatccagctaatcgagaaattatatcacattcttcacaaccgcagcggtgctgagtctgctacgtcgctccatcgctccatcgctactggatactcggctctttgttttccgcacgggatgcgcaacgtcgggatcgaccgaacaatgaattcggcaggctaggagactagagggaggatccctataaccagcggatggtcgagcgttggactttaatctgggttgtggagttgtacacgagaatggaaaatggggatcgcgtgcccagtcgacgtcaatcgagtgccaatcgaatgccaaaccgagtgccccgagtgccccaagcgaggcccgtacgacggcagcaccgtcgaacagagtatctatgtgtctaggcagaagtactgggcttttgggtgtattttgtgctagttctgatgatatgcagaggagggccaacccaattgagtgcagagaattctccgacggacgggtcggttatcgagattatggattctgcttctagtcctcaatcgtgttgattcgcgaccgaaatagcagcagggaggagcaggaagagcaggaaatggcagaaattagcagtagtacgtatgttcatcgagatagtgcgtagaatctgggtcagggggcgtccctggatcggcccacatctgttgccatcagactccagagtcagtcagtccttccagttcaaggttccgctcctcagatgccatctcgctccttctctttcaacttttccaactctgtactctcctttccctatcctggactcctttcaggctttctctatctgcgctagtgcatctagctctgtctctcgttgcccatctcctccacctttcgtctgtcacagtcgcacccctggcctctcccgttccttcagtttcaacgccatcgtcttattctcgccgtattatcctattcgtgtctccaccttactcctgctcctgtccctcctggccctcctggccctcgtccttgaccctgttacgactcccctaaatcccgcccggtttccaaatctacccccctcccctcccctcttttacctctttccctcttttgctcgtcaggcctctgactgagtttgcccatgtggaaacaccgtcccccatcgcgatctgattcaaagtctggcaccgtcgattcaggcgagcgtggattctttggctggtcgaagaagaagactccgctttgtaagtgtcgcgcgttgcacgttgccactggtgactggcgatatccgttgtcgtcattttttcctcctataattgtgcatggctattattacatactcctgatctgcctggttgtgcctgttctgcttgtgattctgcctcgtcgagcttcctgactcttcacgcctcgttgtttcgtcgattcttgacagtcgctcatccgctccccatacgccacggagacgaggattgtccaaccattaccttcactactgcatgcacgacacctccctcatccttccgagtgttttctattggcgtcggcttgttttcttttttccgctggccgtttctgccctccgtccttgctaaccgcatcgctgcctagcttttgcgcgtccggaatcccccgctcgttcgcctttacggccctttcgctcgctttctcgcgcggatcgtgcggactccagtttttctagccacactgcggcttcgcgggctcgcgctccttcggctttgaccgctgattcctattattccgacgcacccagatcggccgctcaattcagcgcttattccaaccgcagtgtctccaggacctcatcgcacgagaccttcaacactcttcctgggaggccaatggcaggattgatggacgtcgaccgcagtcgctcgcggagagagcgcactttcgttggcagcgaatgtgccgtctgtgaagagccgttagaacataccctgcgcggggagcgtgtgctccaattctcgtgcgctcatgtcgcccacgaagcgtgtttttacgaatacctgcgcgagatcgagggtcagtactgccccacatgtgatgcgccattggggcttgactcgacgcgagggggaaacgtgctagatattggtaagcaactgtccgatccacgtgccgacggggctgacggagctatagagaaactgagcaatatagtgcgctccgttaacagtgatgcgatgacgcagcgaacgcgctgacgactcctacaccttgggactcggtcactagccgacagaacccgccaagtgaggtggggggtcggccgtatcctacgagtgacgtgggaagtcggccataccctgctagtgatgcaggaagtcggccgtataaccgcgatagtcgggacacgtacagcaaccgacgggatagcaaagacaccggaatgcagcgtgagcggattgagcgtctggcatcagtgtctcgacatcactcccggaacggtagcgcggctgggtcgtctggcgaatatcatgaaggccgccgtcacgactacgatctccaggctatggaatctgatcttagccctcgcactgcccccacgacgaagaatccaatcccggcccccattgtcactatccgtagtgaattccctaccatcagtcgatctcgtcaacaacagtcgctcacttgcttgatcacggttgaagttccggagggcaattggcgtccagacaccgatgatctgcggactggctcgacgcattcgctgcccaaggatgagccctatccgtcgcggtttccgtccgtgccagagaagcccgctccttttgagccgcaggagaatcttgatgagattgccgaagaactgagggccaaagtagacaactggcatggcctggaatttcaacggtaagcttacttcctcgtgcgtattgtactagctgacgattataggtttggcaaacttcgcttgcatggccatatgcgagtgggcaaggatcgtgaatcttggcaggatttggaatgctatctgtttcacgaaatgcttatttgcgtgaaggagaggcgcgtaccggaacaccactacgatccgcagatggtgaaacctcgaccacgctgcactcttaagggctcaattcttatcaggaagcacctgaaaaccattgaagacgttgctggtatgggtacctcttctgtcatcaaacatgagctaacgtcattagatgagcccgttctcaccttgcacctgtcggtcagcgaacttccgtgtttctatcttcgtttccccaatcgcagtcagctagatatctggcgccgtgctctcctggataacacagccgaatctcttcgaagccctgagcttgactttgaccgccactctggagtagaagaagatgattaccgtaatggcaacatgaaacggcaagcatcgttgaactcttctcatggtgcggcgcgttcgaacaacacggccatcacagactacacgaacatgggggttgaaagtgtgctatcgccgtcgattcacattcccgttgacattgttgttgtgattccggtctcgtcttcgatgcagggattgaagattaccctccttcgcgactctctgaaattccttgttcagaatcttggtccacgtgatcgcatgggattggtgacattcggctcaagtggaggaggcgtgcccctagttgggatgacgacaaagtcttgggggggatggtccaagattctgagctccatccgacctgttggacagaagagcttgcgcgcggatgtggtcgagggagccaacgtcgccatggatctgctgatgcagcggaagtcgtcgaacccggtgtctagtatccttctgattagcgactcgtctacttcggaccctgacagcgtggactttgtcgtttccagggccgaagctgccaagtaggttctctagtcctgtgaagcatagcgattttactaacaatcttagggtgggaattcactcgtttggtctaggattgacgcataagccggacaccatgatcgagctgtcgacgcggaccaagggctcgtacctctatgtgaaggattggatgatgttgcgggaatgcgtggctggctgcctgggagccattcaaacaacatcgcatcagaacgtcaagctgaagctgcgactcccagaaggctccccggccaagttcgtcaagatcagcggtgcgttgcacactaccaagcgagctaccggacgggacgccgaggctgctcttggagacttgcggtttggcgacaagcgcgatgttctcgtgcagcttgtcattccacccgacaacgctacccatgaaaccccaccgcaagatccttgggaaagtctggtatccgggctggaagctctaggcggcggattagacggtgacgatcaacgcgtcttgagtgtagaggaggtgccgctaatccaggccgacctgacttacggcgatttacttcgtgagggtcatctcacacactcaccacgaccgtctcttctagcaatcacgatgcttccaccgagccctcgacacaagggtggtagaccgtcgacgcctccgattcctcctcatccgtctatagtgcaacgccgcatggagctgcttacttcagacatgttgacgcgggctctgacgcttgtgtcgcgctcacagcacgatcgggctcaacacctactgaacgaaacccgaagtattctcaaaggcctaggcaagggtagccttccgcctcttccaccaccggccgcaaaaggcttggccgagccggagtcccgtggcgaaacgcccacctcagactctcccaagtcctccttcgccagccactcgtcggctgcctccgacactgccaccatcaccccagttgcggcagtagacactcagacgatgatggccctcgacggcgaccttcaagccgctctcgagtggatcaatcacccggctgtctttggccgggactcgcgcaaggcggtgctgcaaagcatcggcgtgatttcctcgcagcgggcatacaccttccgctcgccctctgaagagcactgggcacagcgcatctcgggcgtgcgccgtttgatcgagcgttcgaaagaatggcgcgaaactggcgacgacgcattacncagaagaatagttatgacctctcttttcccatttccttac

SEQ ID NO: 3863 - DNA, 2676 bp, Emericella nidulans
atcaccaagagagtcctccttggggtcaggtctcgaaactttctaggatacagatcgaagaggaaagttcttgggataagatgagatcaggtcgttgacgatattggctattttgctcgttgtgaatatgccataatacagtgctaactaatgagtgttcttggatccttggatactctagtcctttgtaactccaacatgtcgattccagtcatactcactatatgcctctgcgtatcgtcgatacgaccctaacaaaaaaaaatggctagtattacattctaaatatagcggcgggttatcattcttccgcgcttcgtcacgtcaactgcgacgacaggtcgatcggttgtcattgtttttgtctcagacgggcgggtattagtagagttgacaaatagacttgcaaccgggtaaatgcagaatattagaggaaataaggaacaagaaaaatttacaggataagagattaagacagcaacagcaataatagtcattacatacttgtaagagccagtaggcggtatgacagtatatcgtatcagggagctatccctaagaggtacaattaggcaaaagagaatatacaggtccttgttttctgctttccgctttccatgaacgaatcgacaagtgaccacgagtaactgtgggaagagatggatggttcttccattgggtggccggaatggcctgcctatctaaacaactagcttactaattaatgactaatcgaggtcgaaccccaggggcagacggtactgaagggcagtatgccccgacaagcacagcacatcccgtgacgtccttggcgaggcgttcctaagggtgtcatacaaaaggtacctatggacccaccatccttagtcaactcagccccattttggagagttccattgcttacggagggcatgcctcatttgctttattgccagtgtataccatccgatgtgagcttaaacccatccctccaggtgtcgtgcaggatattgtccacacttgtgccccgttccaccccctggcaaggaccaccacgggaaagagaggaaagcactagccggtaatagtgggaaactagtgacctgatatcattgacgacaaaatatccttgccgtaagatggttggccgccctttcacatcttcgggttgcgcaaattgcaggaagcgcaaaataaaggtttgtggagcgcaattacagcagacaattcttgctaattccttcagtgtgatctttcaaggccagagtgtgccaggtgcatcaagaggggtatcctttgcttgggttatgacaaatatcgtcactttctctatcacaaattaatttcccagtccacacagactggtgaggccaaaaggcctgttcgccaacttgtcggccaaatcaaacctcttgccctttcgagtacattcagtgtcagtgccgaggttcgtgcgcagctgttttccaacttcatggataccttcttcgcttccagttctagtatcaacggcaagaatgacagtctgtattttctgatggcccgcttccccactcttgccggtgaatcagagccgttggatcgatctgttatcgcgctcgcaaccacgttcctggcgaaaacaaaggatgataggtggctggggcgtgagggcctggaaatatataacactgcgctcaattccatgcaatacgcactgcagcgaggctcctcgccatctcccaacatgctctacgcaacaatcatctttcacacgtacgaagtaagtctctggaccaagtaggcaatacctagttaccaacacaatttccagaccatgaatggtggggatgcctcctcgcgaaactgtttcacccacatccaaggagcagccgctatcatgacacaaaccaacttcaaaactcaggacgtagacagtctcaccaaagcaatgctaacaagacaaaagtgggctacagtaagttgcttggcctagctttataaacccatgactaattttaaccaggcacacttcatgatcaataccgagtacggctctaatgcggaccgggggtgtcttttagtacaacgggaaagtactcccattgatgaaatgtttgggctcgttgctgaatggagcatactccggaatgatctgaacaaaatcgctgcattagaagctacctaccgagaagcagcatatgaaactctactacgtcgctgctaccagcttgagaaaaagcttcacgaggactggctcaatgggccagcgctccagcttgacggagatccctctttatcctgcagagaaggaggatggagcgacacgagtttaatgtcgaactctgaccgattttcctacgaattcaaaaatcttaacgccgccaaaatctaccttctatattgggtaacctcattggtgacaagccgtgtgatctatgaagccgaagtccttcttcatggacactgtgatcccacgaaaatggtttcttatgccacaaagatcctccggtctgtgccatatcttatgcaaagagagaggcagatgtcatccgtccatgttgttatttttggcgtgtcccaggcatctcgatgctacattcattgtgggaaaaaggaagagtttgaacgatgccaggagatttaccgcctgattgcacttcgtgggtttgatatggcctttcatatggccaaggaacatcttgcatactggtattt

SEQ ID NO: 3864 - DNA, 2475 bp, Emericella nidulans
ggacgtctctgagagtcctattggacgataggttccttccccgatcggggtgtcagccatcactgctgttggtagccactcaagcccgggccgcacatcctgatgacttgggtcctacgcacagtctggatcctgtggctccgcccgacatggctggtgttgggggggcagcgcatcgtgttcctcatcacatagctcgtggccgttttccttcactccacgggcagtgtcagcgtcgacgcattcctcaatatgatcgcattctattgcaaagaaggacccgactcaaaagctcttcgccgcatccaaactgctagccttgagtacctttggatgggaccgcgaggaatgcaggtaatgagtatccacgccgggcatacttgggagacagcctttgtgctgcaagcctatgccgaacggattgagcaaggtacctgaaatccaagcagccatagagcgtgcatacaagtatctggtcgagcagcagcatgtggttgactaccctgaagactcgcaatgccacttcttctcccgccttggtggctggccgttctctactcggtaccaaggcaatgtctgctccgattgcactggcgattcgctcaaatctatcttgatgatagagagggattcccgtttcacccggcttacgacagaacaccaacttcagcttgctgtggacaacctcattatggtccagaacgcaagtggcggctatagcagcttcgagccaactcgaggaagcgagctactagaatatatgaacggtacggagctgtttggtaaaatgatggttgaatatgacttcacggaatgtacctcgtcctgtattacggcactggccctttatcaccagcgcaaccccaactatcgaaccaaggcggtctgtactgccattgaccgaggcatcaaatacatattgaagcagcagcgggcagatgggagctggttgtcatcatggggtatagcgtgcacatatggagccttttttgcgttggaggctctggcaattgggggcctgaattatcagaacagccctgccgctagaaggggctgtgacttcattgtcaagcagcaactagctgacggaggatggggtgagacaatagatgtacgtttactcctctgaatcgcaagagaagggggaagcaggctaacggtatccagtccatcttgacggaatcatatacttcatcagaagcctcccatacggttcagacagcctgggtgtgcttagccttgatgcaggctcagtacccaggccaagagcccattcgcaggggcgtccagctcttgattagtcgacaacgagagaacggcgagtggaggcaagagcgcgcagtgggaagtggaatagttacttggtatattattgatgatgtgtcgctctggcagttcctttaagctaacctaacattctagtgagcttctgtaccacagctacatttactcatttcccatccgcgcacttgcgatgtacaaggcgaagtatggcgacgatgcagtcatagattaggtaccctgtcggttgcatcaacttttgttcaatccatttaggacggctgttcaataccttcaagatttgcaagtacctggaccgtgaggcttgtccagtgtgaattattgccattatctacgttcaggtacagggcagcgtgatgaaactatttcatgctttgctgtttgatcattattgtatgatcctgaatacatatattgctgtcagagactttatgcctgcttcctgcatcattttgcagttcctgagattgggcccatcgacgtcccacttgcccagagtcctagcattcgtggtcgtgcccggaaagggtcatcgtccaggtcgtaagtatagtacgtggacgaaaatcgacataatgcaatttctggctatgtagcagccagagtacactactttaccgttgagacataagacctgttgatcttccttaatattgtactgtggattataataccttttcctattcactccatgctcgaaactggacgttcagggcggcttcagaatataggaggaataatatcccctagcaatgcgtaccgcaacgatgtcgtccgtttctggctgtggtagtgcaggtgtgacagctactatgtgcctgcgcaaggaggcagtttcaccccttagtatgaagctcgtacaaaggcagatccgataattgcagcctgcagttttggtgaagagctggcttgagtacggctaaacggacaagaagccctgttatttataacgaaatatatatactatgcttaaagatagccgctgctgcaataggaaattttacacccaaaacggtttgcctctggaaagagcatcgaatataacaaatttataacaaactcactcagattaggatcttgaagtaatcgggtcttattgcattacagtatatacaatctaggagcagagaggcgctagtccaacagctggagaccgagatgattagacaaagc

SEQ ID NO: 3865 - DNA, 3352 bp, Emericella nidulans
acggtatcatggccctgtcacggccgcgtcagtgctactcaaatgctttcgacctttcagtctattcgtttcggactcatagtgagcataggaggcggggtaccggccattccgcatcaggatattcgactgggggatgtggtggtcggtgagccgaccaaaagctctggttctggaggagtgttcctgtgcgacgtcaactttgaatacacaagaactttgaataaaagcccaacgatgttactgacagcgcagtcaccgcttcgagcgcacgatctcttgcgcgagactcggtttcctgagtttttgtcagagatgctactaagatgatgagagacagtatcagacgaggtgaagacgaccacttattccaggcctgccataaacactcgagcccgtgtgatcgatgcagtaattgcaacaagtgctttgtgtttcctcggcctcaaagaggtacggaatctccccaaatccattacgtcccaatcgcctcagttgctcgattcgtaaaagatgcggagcttagagatcgtctagcatcgaaacttgtgaatctctgctttgagatggaagctgccgggttggtggataactttccttgcctgataatccggggaatctctgactatgctgattcgcacaagaacaaccactggcatggttatacagctgccacagccgccgcgtatgcgaaggagctgctctcggtgattacccaggaggaagttgagaacgagtgcgtgatctctcaactttattgatagtgggattatgctcgaagatatatgtcggtgcctgaatcaggaatataatcactagatcaggttggtgggctgtttgaccacggcgagtggcctctgaggagccatagtgaaactgcaggggccggtccagtatagagcacgtttgtatattaacatcgacgatgaagactgtacgtatatcgggacatttaaacgcctatcgatggcttagacatacatctgatagagtcgataacaagtataagagcgttaaagcggctaaagaagacggaagagcaggaaacccgcctcgctctctcatacagggcacactaaggcttccactccacatcagctggatagctcaaggcactagtcccgattgggcgcacagctgccttactggactcgaaatcgaagagttgggagacttcccagccatcgcatttatgaattgaagtctcatcaacaatggattattcttcttatcctaaactggctattctcagtgatatacttcggccttccgatatagcctgtactagggttgctaattttcgtgctactctcgctgcccacttgcttacccgatcctaagcacaggctgatataaggcacattcgcaatatcggtatggaactacacgctcctttgctctttaggcaaatatttgccgtttgagatggtaattccacgctaatagtcatacagcccgacctctccgatgttattcactcccatcttaatcggagcagcctcactcgctgcccaagcctcagcagacacattccaagtatctcagcgctatggcggcccccaaagacccttacagggcatacgaaagatgagcgacgatgcaggggagaagttctacatgcactactggcattatgaagaagactctgtcgttgcaaactcgaccgaagaggcacagaccaaaatagatcggagttccgttctgcctcgctcataccatttccagccgccgttttcgcttggccccgagcgctttgcggacctgcgttcttcgccactgggaagaagggaattcgaatgtccgtctgggacaagcgcttgtacgtctatcaatcggtcagatagctgctgcggtgcggatgagacgtgcgtggtggtagaggacactggattgggggatgtgggatgttgcccttctggccaagattgctctgggacgattgggtcttgcttcgaggggtacactagctgcccgtcatcgcttggaggcggatgttgctttcctgggtacgaatgcgtggaagggggctgtcagtgtgtccatgtctccagcgagattagttctaaccaattcctcaggcgcgcatatcatcacaatcactattacgttatcctcgacgacattaacaaccacatcgaccgagacggtttccgcgacgagtaccactgacactagcactacgactacgagcacaagcacggccactcctacaactacaagcacatcctcgacaggggacctgaccccccccgatcgacccaccagtttatctactaccacaagctccgagaccgaaacgacctgtccgaccggtttctacgcatgtgctgcggtctatcagggcggatgctgtcagatcggccggaattgcgatacgacgtcttgccccgcagtatcctcaacaaccatcgagactgaaggccgaacgattgtgattgccgagccaacgacatcagcaacgacagcagcgaatagtcaagagagcggtgcgaggacatgcgcgactggctggttcagttgtgcggataccgtaggcggaggatgttgtccgaccgggtatgcgtgcggagcaagctgcacagcagcgccgaccgcatccacaacaggaaccgtagctaaggaggctccaacggtagaatcaattggggacactgtgaaatacaattggatacatttgatctgggctatgttcatgacttggctatgctatgataaatgtacttagattattgtatagatgattgacgaaaattgaagataacgagatcaagcacgatcgccgagatgagagaccgaacgcggggagagaacgaagtgggggaatcgtttatccctcgaaaggaaagattttccgtagccgtgacgagcacgaatattattattattattattgacctgtcttcggttgctttgccggcccggttggtaaccgtctccatccatcgtaatcgtccgcgtccaaaccgctccgaccttctcctcacctcctcacctcctcacctcttcccccttctttactctccttcaccccatcttccccctccctcccttatcacaatgtcgagcagcaacacccaggcccctttgcccttcgggtaccagttcgtcgccggtgcgatcgccggtgtgtctgaggtaagtgggctgcgattcaccggcaacaccaaattaggcctgactgaccgcgtgactagattctggttatgtacgatcctcttcctttccctcctcacacacgtggacggaaataatggaatcttcatgttgaaagggttattaacatttgtttaggtacccattggatgttgttaagacccgagtgtgcgtctcacttcacatcaagcccaccgag

SEQ ID NO: 3866 - DNA, 3478 bp, Emericella nidulans
gcatcactcaggcgcggaggagccggaaccttctaagcctgttcagcaggactcccactccaagtctgaccctgaatgtaccaaggtccatgaggtggtacacacagtgaccaggactcgcaccgctgtcgagactgccacccacactgtctggcctcagccggcccactctgaaggacaggagccttctcacaaccagtatccttctgccggaaatccctccagtccccacggccaggagcagggtcctactgcgcctcagtaccagagcgagcaggacggcagcaaacacaattaccccgagactgggtccagctcgtggaactccaaaggttctgaagagtctggcgagcccggacacgccaaaggtcaggagcaggccccctcctctcctcagtacggtggtaagaacgatgacaacaacaaaagcaactccgaaaatgggtcgagctggtccgattctcaggctccccagcaattttcgagctctgagaatggcaaagatcagcagcaggttcctgcagcgcctcagtatcaagaagggaacgacagcagcaagtctgattcagagggtggatcgagctggtcgaactctcaggcgccggcacagtcttccaactcgcagtactccggacagtcaggtacatctgcgcaacagtcccccagcaaggaccagggccaggacaaatcatccgacgagtggtcttccccgtcttcaaacgaggagggaagttacaacgccagccctgctccggccgccagtgaggtctattacggcgcccagtcatcccacgcggcttgggagtccacccctacaagcgagagccacagctcccatggctactcccacgttcagtatcagccctctcccacgtcagaaggtgcataccatgcccctgccacatccgcgatcacagtcgcagaggcctcctccttcagtgtgattcccgtgcacgtacccagcgggaccccccgggcacacgctcacggttctgttgtcgtggcttcgtccagcacgcctgtttcgtctgcgttccgaggcacaacccttctgtacccactggtgcttctcctgaacagaaccaccgcaattcaccctcgccgtccccctctaccaatggagtaaccgagttcactggtggtgctgggcgcgttgccaagatcgagggattgtgcggagtgctggtgggtgttttcacccttctggcatttgcgctgtaattgccgcgctgctttctgctgaggatggggaatgtgagatccttaaaggagattgacgctaggtcgtccgcttctcatctagttttatggtcataacgctcttttagttatgccctttttcgttttttaatgccaggattccttctgtgtatcctacagctagcctgcctgcgggttatattaatgaattttgttcttttgccgaagctaaaaccatgcatttgcctattatattatgttccagaggcccttacggtaggaatgctaagagctatgccatctcaggtaaggagaactatctactgggtcgtttctccactgtgccatttcactctatccaacttcagaggaagatggatcaaccgaaagccttcactcgtcagatctggcattctgcctgcgcggatattgatctgaagcgccgcgtgaagcagctttggcggcgccaacccttcatcgcgccccttcctcatcgccacaaactcctgctcgctgacacccactttcaggtgtttgttacgctctttatgctcgccgacgctggtatatggaaccggcgggcgcccttccggcccgccaggagggtagtcgtggcccgcccagatcttgacatgggaggggaaggagagaaggcgctgtccggatctgtagagactctctgcgctgccgaagggaaaatcgcagcgtgctgtgccaaggtcgacatggaagagggtgtcaccggtgaagatgttgtctaggtaaagtcaataattgctctttcttgaacccgaaagttgaggttgaggttagggttgcaagcatgaaagtgcaaaaagacaaataagaagataaaactcacttccaatctggtagcccatatggtccggcgtatgcccgggaggtgcagcgctgtgaccgttaggacccaagggcgaaggtctcgttgtctctcaacagcctgtcaaagacatttcgatactcgtccggtgagatcccatatttctcgccaaacacccgctgcacctgtccgatatgctcgcctatcgcaatcgctggtctatggtctgcgctctgctcttgcgccagacgagcctggagatacgatgcggcggtcaggtggtcagcgtgggcgtgggtctctagaatcatggatacgctgtagccctctttccggatcagagagagaagcatatcggcagatgatgtgctgatttcttgcgttgcagggtcatagtctagcactgcgtcgatgatgatggccgtgcctgttgatgggtcggcgacgatatactgccacgagccggttttgttttcgaaaatgctgtggatcgttggctccattgaagggctatgtgcattctggcttgatgatgagggcgaggaatgatacctaggcctcgtgggagagagatgtctggatgggtacacggagagctgctggcgggggcctgggcctgcgacagcatgtggagcagcccctacactgggcgcccggcatttagacataccttggacccggggcaatgattactgcctggtgaaccttgctagtctttgcccacggctaatattggcaatcacgcccggagcatcgcttgcggcttgtttgggaatttgaggtgtaggcgctgttcgagcttatgtaccaggtcaaggaggatatggaactagaagattgcgttattttgggcatccttattctttttcactggaacaccaccgaacctttatcatattcttgggagctactagagtcttatactaatttgctttcatacacgatggagaaagtgtcctcattcgttcctctatactccctcatttgtagctcccacatctcaatgttattaacaactgtcttctcaccctttgttttaactttatagattttttgataggttattcccattgtctctgtgcgtggcatctgaatattctctactgttgtcggctataaattctctctactggatttgtagcaatctttctttatctctattccactttttctctctacttcttgtaaatttcactatcattctttcttctcattctcttttatatcaccttactttttgtactagtctacttatctaatgttttttcctacttcactctttctttatttcaattctcttgtctcgctcttttacattacttttttcgtattcaatagtattattctttttatatcataatatttttgatttatttcttatttcatttcttctacattctttttttttccattatctttttccttatattcttccta

SEQ ID NO: 3867 - DNA, 2672 bp, Emericella nidulans
gcatgcctctgcaaacgcgcactgaggctagcatgggcgacctagtgctatccgactagccgggcttggccgcttttttatgccacacgggcgcgcaacttcaatcgcagtgccgttttccactccatcagtacagttaccaaccgtaccggtatagcaaaacttgtatgctgtgaaactgagatacgctgattgcccggatcgcagaatgcgagttgcgtcaatagacccaatcacgttgttgttgaacgccggcgccaaaagcgtggtgctacgcacggtctccatcacaacagaagcgaatatgtccgtggcgacgtgggtgatattgacccttccaggatactgggcgtaacctgacgctgacagagcacaggtgaggtttgacaatgtctcagggcatgaggaagcgccggagacgcgttggggcggataggtcgttatggacgggttatttccgtcccagttgaagacggtgcagttagtaacagtctgagcttgggcagtgatagtggctgggagggcaagggcgagaggagagaaagagttgccttgcgttggctgagcatagtgttgctacgtagacgtatataaagaatttatgtaggaaggttgagttattcccagatgatctgcatcagtctgcgtctacatatgtttgtcgctatatgctgtctctattttttactgcatgttttgatgccttgccgtcgcagatcgatgggggcagtatcctgcgtactccggctcctgctatgcatatggactgtgccgccggggccaaacaccatacaagcccagtaattcgccttggaacccctgcaaagcggcatggtgctcattgctgccttccagaggccatggggccagaaggatctcggcctcgcaggtcagtgatgcgagccaacaccatggagagcaggtacctagataattaccttctggtgctgtgactagtacaactcactagcttcgccaccaattaagccagggtgcaaggtcgaggttctatatactgatattccagttcatatcacacacccctgcccaatcatccaggctgcagtcagtcagtcacgaaacagcacagccatgccgtaccacagtatcttaacgccttccatgctatctttagtttctgtagaatacagagagtcgagcactgagtgctgcgctggatatgacactggcctgagcttctacctttatatcattgcttgaacaagtctagggatcaattctatgagctagtgacagctcaatggcgatgactcggagcgacaatgctggaacacttctcacgcatccgcttgttctctgcccaagcgccacgtaggccatttttcatctacccgggactgtacggtcagaggaaaggttgggcaaggtccagctactgaatgctgcctgttctagaccagggctcaaaaatagcagcaatcagcacgttctcgcccgaatctcgataactcaacgaagccatattctgtcatttctcttttcacctgctactcctcggtatgccaaggtcgagcttcaccagaatgcggacaagaacgagtttgggaggcatcgttctggagagtgtattcttgacgacattcgagtatcgcggcttgcccacggctgtttgataatcaccaaatcaagcatactcttaggcgaattttacatgaaggactctggtgctcgtacagcgacgcaatcctcaaccatgccagtcagtactagctgcaaagtccttgttgtcgcctctgccaatattaggtcacaggccaggtacccacgttatagcctggcttgtatttgatatagataagacgcgacaataacaaggcagcccgagttcgttcatttgtgagggggggcacacaatctcaagaaattcttcctacatagtagcactacatattttttctatcctttctatcccaaaactctttttcttgtaccccgttcacttcctccttttaccctttcctttattctcccttcttattatcattctattttttcttttaatctcttctacctttttctcttctctctctttcatcctcctaattatatttttttatttctactttattctattctatactatttattctcatctttttatttaatcctctcattcctttctctctcttactttctctataaattccttcctctaacttatctttcttttactttctctcttctctttttcttcatctttctatctcttctatactataatttattttcctttatttttttctattcttttttttctcttctctcttattttttccatcctcccttttttcttcatcttccttcccccactcattaccttttatttaccttcatcaccctttctaacctccttcctcccttttctcttctctctcctttactattcatctaatctccttctccatcctcttattatattcccaacttattcttcattcatcttaccctttacttatactttttctcattaattcctcattctacactaattctacttccacttacatactcatatttactcactttatttatctcccttttacctctattattattccctacttttctttcttatcacactccttcttcttatctacttacttcttataccttatcttaattctttctattccatatatcactatccatca

SEQ ID NO: 3868 - DNA, 4024 bp, Emericella nidulans
tagagacggcgataatacgactactatgggatccatgaggctatactgcctggcgggggctttgggggttaacaaggggttaaggactgacgcttacgacaatgacaaccccgagcaccgtaagatccgtctgggtatcgagcagggtgacggtatctccaacatggtcaaggtgtccgaaggtctggctgccatcaaggaggccggtcttgagctttgtgcaccacgaggatctggctgaccgaccagatgagattccgtggtactaccctcttgcaggttccttcaagcatatgacttcgccatgggatttcttcactattgctcggatgacatggtggggacgtggcttggtccaccgctttgtcggcgccatggagaccatcaagctcattccccagggaacacataaaaccggcgatagcctggcgttggccgcggactgccttgtcgccggtggtgagaagaagctcttcactccgatgtacctgatggttgcacgcaagcctgagtaaggcactaatgtacaatgaccagcatttctttcgtgcaggcggtctatcatatttaataatcgtctcagtatcttcttgttgctttcctttgtttcattgtaccgcccgatgatttgtcctacgaaccggagcatgcgctatggttatgatgtatatctagattaatagatcaaaacttctttttcccttcaggtgcgcttgtctaatccgtacggggcgtactgaggacccgacaggaccgcgactcgtcggctttcctgtttagttaggaagcccacagtctaaccaagtatacagcggagactaaccagcctagggccttggactcttggttcagcggggagctgagagacttgcccatttgggcaaaatggccaactggaaatcagatctccaagctataaagtcgggctctgtttctgcttcttcaacgttagattatcttggtctacagcctagttgaaatggcagcaagcgcagagatacagccccaaccacaaccacaaccactgtcacaattacacccacctcacgatgccagagacgccgagaaggccgtgccctcgcagcccgatttgcggggaagtgatagcaatatatttggacatgaccgccaagtagaacgttggaactatcctcgttcgaacgttgtcaagacggtcgcaaccttctgggcgtttctggtaatgggcgcgaatgatgcagcatatggcgtgagatcttctttttctattctcgatgaactatactaacaacctcagcctcttctcccatatgtgagtgtaccggtgttgactcaccgcattcgtcgatttctaacaatgtccagctcgaagaatactacaacctctcctacacgacggtatctctcgtatttctctccccaataggcgggtacacactagcggccgtcacaaacaacacactccaccggcatcttggccagcgcggcatcgcatggctctcaccaggctgccacctgctcgcttacattgtcaactgcgtgcatcctccataccccgtcctcgtggtctcattcatattcgctggactggggaatggactggcagattcggcctggaacgcctggctagggaacatggcggactcgaaccaaatattagggctcctgcatggactctatggactcggcgcggtgatggcgccgcttgttgcgacgagtctgattaccgaggccggtgtgggctggttttatttttattatatcatggtgagcaatgctatcagaatgtctatcgacgagcgcactgatggatactgccaggttgcatgcgccgctatcgagttagcctcctgcctctgggccttctgggattcggacgccgccgcctttagagcagaaaccgaacgttcccaatcggtcgaaacatcagacgaacaaggcggcgtgcggcgcgcactctttgtccccaaatacgcaagggtaacctggctcctttcattcttccttctcgggtacgtcggcgccgaagtcgcgattggcggatgggtggtcacttttctcatgcgcgtgcgagacggcgcagagttcgcgagcgggatgggctcaacggggtactggctcgggatcacagtcggccgcgtcgtcctggggttcgtaacgcccaggattggcgagaaattcggcatcgccatatacttagtcatctctatcgccttcgcgctggtcttctacctcgtaccgaacttttacgcctcgattatcgccgtctccttccaagggttctggctgggcccgatgtttcctggtgcggtcgtggtggctacgcgtctcctgcctcgtgcgctgcacgttagtgcaattggctttgctgcggcgtttggggccagcggtgctgccgttctgcccttcgctgttggcgccgtcgcgcaagcgaaaggggtcgaggtgcttccgccatttgcaattgccttgtctgggggcattctgctgctctggtgtgcgctgccgagaatgggcaagcggtagctattgtgctgtcgacccatatgagtaatcgattgctgaagtggccatcgggctccagctagggcgctttcctgaaacgtaaatgaattgcaggggagagctcctgtgcatgaaaacatgctgggtaggacgagacgggagcacttcctcccaggcaataactaatataatatactctgaatataacgagtacaaaagtacaacgggtaccacgagtacaattgtatatacttactgagtgctcaagtacgcagtagcacaaggaatggaataaatgatgaatggaataatatgtggctttaataatatgtgattttcattgacgtgggactcactgatttgggacccctagataaatggcggtgatctgattaaggctctaagctgaaggcgtcctatagttgtgactgagcctgcgccacagctcggtttgggtttgggctgcgagggggaaactttatagcctgcatgtatttatatttcttgcccaactttcatataatttcagcagaattatatctaactgcccgactcgtcatgactcttatcatgactacgccatattatgatcgaaataaagacgggtccaagttttcaagcagagtggatccccgagtcatctagaaggctccagttacaaggctgtcggtaataccccggaatatacttgtataccttggtatggagactgctcgtatagctgggtgaaccataggcgctcagccacgcagctgtgctacgaccacagctgggccaacaaagtcctaattatgatttaatggttcggcagaattgagtcttggttgaatgttattggccctgcggtcaagtgtcttggataattatagaaccgggctggcactggggcagggcagaatcgtgagacacgtcctgtggcagacttgctttcccataaatctcaccctttccccaattccctcgcagaatttttaatcagtcttttatcccatctctacctctacgaagacctcgtcaatccactcttgtctcacgctcatatctcgaccgcactcgctccacactcgctctatctacctgatctatagattcatccaccaaacaaaatgtccgctacaaccagtacttccacttccgcctcgaccgcggcgacgccaacctgcacgggcaatgcctggatcatccccgtgcaggacgtcgcgtgcgccgtccgctcgacttctggaaactactcttccatcatggagaaatgctgtggtgtagcggaggtggaagactacaatgatgactgcggcttttattgtctcgcgcaaggacagtccggccaggatctgctagattgcattcagagcaacggcgctagctacaatgatgtcttctgcgacggtaacttgacagagacggctacggcggcggtgcccagctcgacatccggtagtgacgacgacgatgacagtgatgcgaccgcgacaggggacgccgccgaaccgacgaactcggataatgcggcgcctgctcagcaggtcgtcgacaaagcagg

SEQ ID NO: 3869 - DNA, 1289 bp, Emericella nidulans
ggcaggagcttgtttggcctgatgcctttccggagtcggagttcccctttggtgcttgctgtctgcattcattttttaccctttctttcttgttctggctgcatttggattatctcatgtcattgtcattgtcattgcagttttcctggttggattatgtctacactatgtcggctcttatatccagctcacccgggggttcaggtgttcaacatcgctgtggttgtctacaaatatggccggagcacgcggtttctgtctcttcctttttggcactggggttttgggcagcaaaagggtttctccatcttctcattcaaagttttatgtttggaattgggttatgtcatgggcaaaaggaatggggagcaggcaaacgtcaaaagagttcttggagtttgatctgaaccgcatctctctcgtattagtgtttggtctggttacttgtcatgatggcttttttctgtatttattgttggttagtccttaataattcacttgctgggtactcgttcagggtatatgtggagtaagattcggccttgcatatcccccaaccacagggctgcagggaataatagttttggacatcactagcacagaaacaacccgacgcccaaagaaaggtcgaacgagtcagatctacgaaaggagcgttgggacgctgttcctgggaagaaaatagaccagaacgcgggggacggatgccgtttaataagcttgtttttttttttttacccagtaatctactgttagttttgagcagtaacaataccttaaaatataagctattttgatagagttaagcaaggtgttccactgacgttccatggatgcgcggggaagacatttagaaacagaaatagaaatattcagagactaggtggaatcataagttccaaactcccaaagtggccaacagccaacagagttgagcgcacgtcatcccgagcaagcttctgtttttgatcttcaaagttcacccctggcttgccccctttccaagatcagcagcatcgaagtgattctggaaaattttcgggagcttcaagctagatagtgaaaggggtctttggattctggaatctgcagtccgcctggacctggccctggctctgatcatgcacgcctaatcaacctaacgatacgcaataccgcttagccgtccgcgtccttttgtgctgccgactccttcagcctgtgacgacttacgggttcttttagcttgtacctccggcgtgtgaattccgtttattaagacttttttctgcaagaattaaattttgccg

SEQ ID NO: 3870 - DNA, 4795 bp, Emericella nidulans
cgatctcctatctcaggtcacgtggagtggcgagaagcatgtatagggcggagtgataagggaaccttgttctcactgaaacaactgaacatcacttatttaactatcatgggccatagctatgggactaatcaatgatagtacgcgtccatcttctttattgccttgtaaagggtaggattaagttaaccatgatgtgttggcataaattcaaaaagagcttcgtcacgtgccactatccgaaaaaagcagtgacaaagaccgcggggaaccaacgttgacgaccgataacaccgaagagcctggtgatagtctgactgcagcaatcaacctgattccctccttctgctgccagcgaagttattttgtagggctgtgcctctcattctagttccaacttcccaacaccatttacgtttggaagctctattgtttacacgcctcgcgctcgcccatgccgctcagcctctagaacctcgccaatcgccaactcgttcaatccaggtaggcactggcaatggagaattacctgcgtgtctggcgacagcaggcgaaagttcgtggccagtatgatgccgccgtattcattggagacaaagtccttgcgttgacaagtgagctcttctcgcgtttgcaccccggcaaccgattaacttcgatgcatagacagtgacgaagatgccctttggctggccgaagtacatttttcgaacaacaactacacgcgagctcttgccatcctctcccgtcaagacctcatatcgcggagcaccgcctgccgctatcttgccgcgcattgctacatcaaacaaggccagtacgagcaggccctgaccgtgctaggcgaccagaacccaacccatctaatccgcagcaacaaaagccgccgcaaaattcagcacctcaatgggcatagtcgaataacactccgcaatgccaagtcacgctatgaagatcgagaccgtgaagatgctgggaacattcgatatgaggcgggcatgtgctaccttcgagggctctgtttcgccaagcagaatgcattcgatagagcgcgcgactgctacaaggatgcggtgcggattgatgtgcagtgtttcgaagcttttgaccagctcatgaaaaactcgctcatgtcgcctgcggaagaacttgaatttcttgagtcgctggactttgactccataacaggtgccgacgcgccaatctcgcaagaagcggccgactttacgagaatgctgtacaccactcgtttatcgaaatactcctctccagcggtgcttaccgatgccactgaaacgttatccactcactacaaactggccgagaatccggacattctcctgtctcgcgcggaagctctatatacccagtgtcggtttgcggaagcgctagagttaacttcatcgattctttccacgtcccgttcctccttatcagcccagacgaccgcaggccaaaaccacctcggtcactcccccactgtatatcctctacatttggcctgtctatatgaaacgggggcaacaaatgcactgtttctcctgtctcatacgttggcagatcactcacctgaggaatcatatacctacttagccattggggtttactacctatcagtcgcaaaaattgcagaagcacggcgtttcttttccaaagcgtctttgctggatccacattccgcacccgcctggatcgggtttgctcacacttttgcagcggaaggagaacatgatcaggccattgccgcatacagtacggctgcgcgactattccaaggcagccatttgcctcagttgtttcttggcatgcagcaccttgcgttgaacaatatgtctcttgcccaagagtatctgtgtgctgcgtatgcgatgtccacgggaacagccaccggcacagttccgtcaataccctcgttgccgtcgtccgagatgtcgcccctgggcggagatccgctggtgttgaacgagctcggtgttgtgctctaccaccagaatcacttggagggcgcggtggatttattccgccaggcgctcggccttgcgacatctcttcgatgcgagccaggcgcctgggttgcgacccgatctaatctcggtcatgcattgcgtcgtttaggtcgatactctgcggcattggatgaatttgacgagtgcctacgaatcgggtctagtggtgcaagtcttgggtatagcccgttccttggtggaagcggaggcaatgcctctggagtggcgtcagccggcgtaagtggctacgaggaacgtgggctgattgggtcattgtatactgcacgagggcttgttcttttggagatgaaccgcactcttgacgctgtcacaaccctccacgaggcggtgcgtgtgttgggggccagtgggggtggtgacgctgctggtggggcgggcgtcgctgggaccctcctttcacgggcgttggagatctgggccttggaaactcgcgaaacagaagccgggctgtcagaagacggcaatcgggccgctaaaagctcgacgcgatcgcgcgacaagggcaaaagccgggctgctcgacggcgaatagccgcggacgactcatacgcagaacagtggattgacgaggtaacgggtggcgtcccaactggccttgactctacgaacactgtcgatgagaccattgaaatggagctggatcaagacgcagagcggctcctgcgtgattccgttgagcatattcgtggagggcttcgtggacgtcgcgagcacatccatcaaccgctcagcagcccagaagtggaggcccagcaggcacagccacgaagtcgagggacgaggacagcacgttcataccaggcgcgatcttgagtattcattctatggagtcttggtctgaacttgggcgttggtcgggcgtttggcctgcttttgcatccggatttggggcatggatggcgtaaatagcaacaaacaatagacgataatatgctttgcttcacctgcgcatacctcgtgttctcgtacttaaagacaagtaggagcttagtatacactactgagtagctaaagccaaggcagcagagcactcaagtggacacagggactattttaacaaagtgctgatcctgagcagtggccccgaagtttcaacctggaactcagttgtctctggtccccacagacccttcctcggatccacagattaacaagcggcatctgaatgcctcgatactattggcctgaaaccgagatcggcctgagccgcgcgactgcgtctccttaattttcgtgctaagtctctggctggcgtcatcggcacttcttctctcaaccccaaacggcaagactgttgtggctgccgcgcaaacacgatattgtggcgtcattattttgcctatacttgctacaattcgttcagagcaactggaaccgcaggaactgacccacgagtgacccagggtttaaaggatcaaggagggagtcagaaaaagggacaggcacgcagacggttagatcgtcgtgattgtcattgcgctcccctggactttttagagcgatggcagactcatttggaggaggagagacgatgcgcccaggaagggttggccacggccaatggtgttttgttcaaaatgaggaagctacgcctctacgatctttacgtccagcgcaggtgtcaataggtgtgttattcgcgtccccattcccttttgctttcccccgtcctgtccatcatgcgactgtcactgtacttacaactagacatattactgatgttcatcttaaccttttagcttcacaatgttccctcgctcttactggctgaacggtggcctgtcggccttatactctctctgcatcttcaacttcgccgccagcattgttctttggtttaccgtcaactcagaccgaaattacatccatcctattctcagccaattgatacccgctgggcattgcgcgtgcgaaacggcggcggttttcgaatgtagcacttgcttgacctgctcgcatcaggaccccatcttacagatcgacgaaaacgaaacggaattgtgggagtttgagtacagccgagacgccttcaatgtcggactgagccgcagccagtgcgccgcttcgttcccgggcctcttcgaggacgttagtcgtgctgcaacttactggcgcacgcagggaggattgtcttctgatgaccttgacgccatccccattaatcagggcatgggccgcgcgagaataacgcagggagagttgtatgtaatatctgtccgagcgcgtggcgaggaccaccggaggaaattacttgctgcattgagtgcgatgcaccgagcccttgtagcagattccaaccgcttggcccggccagaaatagaatttgtcttctcgatcgaggataagctcgtcgacgtcaccagttcggagcacccagtgtgggtactcgcccgaacagcagatgaagaagctgcgtggctaatgcccgattttggatactgggcttgggaccacctgcaggcatcgatcggcccatacgaccaggttgtcgagcaggccgcggagtatgacaatataccttgggaggacaaaaaacaccagcttgtgtggcgggggaaaccgagttttgcaccgaagttacgacgagcacttatggatgcgacgcgtgaccagccatgggcggatgttcaggctgtagactggcaagagcaggacaagtcaaatgttctgaagatggaggaccactgcaaatatatgttcattgcgcatgtagaaggtatgcctccggttcacttgccctatttcatcaatcgtgaggccaagctgac

SEQ ID NO: 3871 - DNA, 747 bp, Emericella nidulans
tattcagtgtcattagggcattctctatattctcgccatgctctctaagattcgcgaattattataggtacaagactcaaaagaccaaccgtcttgccactccatgagtgacagattgtaacctgcaccgaagcaacgccaccactggcccgattacccaagtggtatgctcccagcgcgcctcaagcgcacccttcgcgtcctggcagtacctctctgtaaactgcacaataaccttggcaatcttggagagatcgccgacctgacttcggctgtcgctggccaagctgcagctgcgcgaaattgactgcggttgtgaccatgaccgtatgaggggatcttgttcagaggaaatgggcgggctgttgcaagacgacaccgacccatcgtggcctagcgattcactggcaaaaccggcagagctatgaatcacgtccatcagcgaaatgcatccggatgctaccaggagcgccacctcagcctgatcggaacaggggcacatgaggatggtcaacagccgctggcacgcctcggtcgctgtcaagccgccatgcgtgtaggtaggagcggtggacctaggccgttgctcctggctcctctccaactgctcgacaatcgacagagcaaccctggtgcagtccatgtcggtctcggcggtctccgccgcaagccttgtgttcattggattcttacacggggacggcgacactttggcagattgtgccgatggctggctatcctggatat

SEQ ID NO: 3872 - DNA, 7519 bp, Emericella nidulans
  unsure (1)..(7519): unsure at all n locations
gcttgctcttgcatcggcggtggtgggaaatgacgatagggctgatggccatgcatcatggcctccgtgggccctggctggccagggttcatggcaatggggtgaaaccgcggcagactcatgttgacatggtggctagagacgctgccgttcatgccattctcatgcactggaggcactggaggtgcagcaacggtcatggcgagggcgactagggtgcagcacgaggttagtggactgcgttgaattggttctaataatcagtatagaagatatacaactgcagatagaggaaacttgtagctgaagagagcagtgaactgggggagatgaacaaaagaaagcggagagggacagcccgggggatcaagacttgacaggtcgagcgggataagacagtgtgggaagctgataacccaagagggaaccaggaggggaaacttggtggcaagctggatgaattagatgaattggatgtacttacatgaagcgagtaaaagtattgaagatgtcgcttggcttctcggctgtcactctcagaccaggaagagaaaaacaaagagactagcgcgctgcactttgcccgtttaacgtttttttttctttcgttgcgcttaagagaagactaggaggatttccaatcccgggtcttctcttgcaatggtcagtggccacgcaaggggatttattgatgcgggttggatcctactggacggcagctgtatggatcgaggagaggaacgcaagcagaagcagagggaaaaggcagagaaatagtcacgaaaaagagaccctttgccaaggaagtctcgagttgagaggatcttggactagcacagctagcaggccagtgggattctgcggtcaaacaagccatggaatcaaatggacagaatcggcactggaagctgcactagtgagggccggtatcagatgtagtaataattgtcaatatccataatatccatgctatctacaccgttccttatgcaccattctattctttaacacctgcggtcctgcaggctacactgacacaggacctcaaattttgaatgataaggatcatcaacactgtgcccgtgacggtgcgactgaatattaatctctgctcgatactgggactgacaattgttgacttttccattcttccccacttgaattctgaccctgttattgccagacgaattgtgtggtctactggctctaataggggcgcttgatggatcggaaacccactcctgccgcactagtgacaaacacagtcatctcaacaatgtacctagaatcagctgggccaaagtcaccccttggtctagtcaaagatacctgagtgtcaataaaaaccgtaaaagatccatcatccagtgaagaatgggttggtgtctgagagcaaacaagccaaccagaacatcgctcataggcagatcaacaagcgtgtcgagccaggtcttttagcgattctgctacaatctggcttatttatttttagtttagtggcattcggccaatgggaagcaactgatctactggcattgtgtaacactttaaatgagagggagaactggtctgcggtttcaattgtgtgtctgcgtcttgggtcagggaggcttaggcttaggcttaggcttagttcgaatctctaacagaatctaacagagtctaacagagtcatgcatatgtggagtgcagaattcagaatcagcccgggtcttacagagtcggactgaagcaaggtccaaaattgatccttcgagaatccaaatgaatcaaaatcacgataaacagatccaaaacacgggacacaaagtctggaagactagtactttgtatgtatcactcaggtagactaaatatgattgtgtaccaaaaaatcatcccggtggggaacaccacacaatcaaattcagccagggcagagtcagcagagtcagttgattattactattattactattgattgatcagcgaattaattctcaggaccagtagtgtggcacgagggacttatcctgattgcccaacggtcattccgttacattgtttctccaacttcagatatgatgaggcggtcccgacgccttctcgtcgtcattctgcgcttggcttgtggtctaggtttggagctcggtgtttgggctcataattgtgcatttgtgtacaatcatgatttgctcctgggctgcattgtctctgcacctctcccagtggagaagggccacggctgtacgctgccgataagagtactctagagtagagccggaagtaccctaggattggcagccagaataacatcaatattgctcgcatactattgtttgcgggcgtattacgacgctgctatacttttctgcaaagtacctgtctatccaggttcgaagattgatgagccaatggccgtcgacggccacctgacctcagtgggcggtaaggtccttatttcgcaaaattgcgtcatgtcttgggttcaatccaacaaattccatgagaatgacaagtccaaaacctcaaagtatcgcattcaattctcaactgcctctcttccgcccactgagtaacgtaggacccatccatgcactgactgcacctcaccctgtgagttttacccgggcagtttcccagagtcgcgggccatctcataggtcgtggtgcacattctaacgggaaatgcttcaggatcgaacaggagtggactatcgggatttgcactaaactatccccagagcccaaacaagaattgttgggtacaagcccacttggatctgtggatgttgggttgatttggacagctggcagaccagcacaacaacatagtagagcctagaagtatccagagcggctgatggagctaactgaccgcgcaagctccggttgaaattgaggtacggtagggatccgacttgtcaggcatgaaccagatattgtggccagcatggtgaggcgttgaggcgccgagactcgagcatccatctctgctggatttctgctccaaagcgcattactggctaccttgccttgtctgggcctcaaaactacggctacgattacagcgaaatccaagttttgttaaatcgagaggagaatttcctattctattatctcacatgctccaagcccaccacatcatgcttgcttttgtggtcccaaagccgtaatgtcattaagttacaaattgtaggcaaacccgctgtcccatccaatggttgctccccgaataaatcagtatgcttgcccgatcaaagggtatgaagccaggcgggaaaaagagtaaagacgatcaaacacccgtacaccgagacgagggcacatcaaacaaccctatcagtatgtatacacaaaatgcggaaataaaaggagatcatatctaaaaaaaaacagtagggaaatggtagaaaatacaatgacaaaccatgcagttgcgcatgactgtcaatcatgatggtacatttagggcttgttctcaccctggccggtctcgccctggttgggctgctgctgctgctcagactgggccttgtgcatcttgtcgaagagggtcaagctggcagtctggagctcatcggtcttctgcttgagctcctcagcggtagcagcgacttcaccagactggttcttggcaacgaattcacggagggtgttgatcttctcacggatctgctcagcctcagccttgtcaagacggtcctcgaattccttgagagccttctcagtgtcgttcaggacgctgtcggcacggttggcagcctcaatggccgccttgcgctccttgtcctgagcaccatacttctcagcatcctcaaccatggactggatctcggcgtcggagagaccggagccagaggcaatggtgatggactggtccttgttggtggacttgtccttcgcgtggacgtggacaatggagtcagcgtcaatgtcgaaggtgacctcgatctgagggacaccacggtgggcaggaggaatgccaacaagctggaagtttccaaggagcttgttgaaaatgacaagctcacgctcaccctggaagaccttgatctcgacggcagtctggaagtcagcagcagtagagaaggtctgcgacttcttggtagggatggtagtgttgcggttgatcagacgagtgaagacaccaccgagagtctcaataccgagagacagaggggtgacgtcgaggagaagaacgtcagtaacctcaccggcaaggacagcaccctggatcgcagcaccaatggcaacagcctcatcggggttgacggacttagcgggctcacgaccgaacagagacttaacagactcagtgaccttgggcatacgggtcataccaccgacgaggatgatgtcctgaacctcgctggactggaggttggcgtccttaagggccttgcgcacggggtcaacagtgcggctgatgagaggctcaacaagagactcgagctgagcacgggtcatcttgaggttgatgtgcttagcaccgctggcatcagcagtgatgaaaggaaggttgatctcagtctggagagaagaagacagctcaatcttggccttctcagcagcctcacgaatacgctggatagccatgcggtcgttggaaaggtcgaggccagactccttcttgaactgctgaacaatgtggcgcacaaggctgatatcgaagtcctcaccaccaaggtgggtgtcaccgttcgtggacttaacctcgaaaacacccttctgaatttcgagaacggagatatcgaaggtaccaccaccaagatcgtagacggcgacaacgcggtcagcctccttctcaagaccgtaagcaagggcagcggcggtgggttcgttaacgacacggaggacgttgagaccggcgatctgaccggcgtccttggtggcctgacgctgggagtcgttgaagtaggcagggacagtaacaacagcattcttgacgggcttgctgaggtagttctcagcggtctccttcatcttgcccagaacgaaaccaccgatctgggcaggagagtacttctctccgcgagcctcaacccaggcatcaccattggtgtgctggacgatcttgtaggggacctccttgatatcacgctggacctcagcatcggtgaacttacgaccgataagacgcttggtggcgaacagagtgttttcagggttgacaacagcctggcgcttggcggcaataccgacgagacgctcgccgtcctgggcgaaagcgacaacggagggctgttgtgcgggcacctttttattattagccatcgctcagtactggtgaaaaggaatataagcttgtcgccactcaccttcagcgttctcaatgatcttgggggtcttgccctccatgacagcaacagcagagttggtggtacccaagtcaataccgatgacctggcccttcaccttctcctctgttgagttccatctccgggcagctgtgctgggaagtctgaaagcaggagcacgagcaaagggggcagtgcgcggcagctggaaaagagtcagcttcaagatcgtggtttgcagctatacaggggctaaatcataccgcgcgtgagagacgggatgacagcattgtgacgggattaagagcagaaaggacaaataatagaataatacagtaattagaatgactatgggacacactccaatcgattcaatcgagaggaaagagagatggataggaaggggtaggggtataagatggaggatggagagagaaagagttttttttggctttaagaatctggaggaagggaaacggcaaggaaaaccttaagaggacagcccggagagcttcgggccgtggacgagcagctatgaactaggcctgaaaagggcgaagcctgaggaaactcatggaaatgatcagtcaatttagccaataggaaacatcgaactgagctacactggcccatttcatggggctgatcttgcagttctacgacttcaattacggtgtagatctagtctagcatcttccagtttggtcgaaaggaaaggcgacctgttcaagctctgcagagaggccatgagctacaagatatctcatcatccctattgcagcattccatggtccgttttcaatatgaaagtgcatattgtgtccacgtgaccagttacagcattacgagcttccgaccgaggcttgccgcctcgctccgctatagccggtagacatcaaggaagccacttctttgtcgccactgaagaatatgaagaggcaaggtcaaatgctgtttagtttacctagtaattcacaaaacgacaatgctatctctcgagtcacttgcccagtccttgaaattgcagatttattaaacctctaatttgtaatttaacgatgtaccttatttgaaccgtatgctcaaaatatatacctggaacatatcacacccatgtgcgtacagtaatcgcagagttaattaataccatggtctaacgacgcgagagtccactgaacttgataaaagtagaatatttctcctacttatacgaacaggtatgatgctcgacactcgaagcgcctgttatttcgggttctgcgctggtgctgctagagagttgtatatgtataagcacccgtatagtcaaagccaacccaggttacaaggctcatgacctaaaaaagacttcaaacattctgttactagatcataccaccagtgagcgaaagccaggcctgtgactcgaggccctattactcgaccgccgcaacggcagtttccccagatcttacgtcatccgttcgatgaggccttcacttccactgaacccatccgcccagtaacaccaatatctacctagtaagaccatctgaggcacgcatttcgtttcctttctccattcccctttataggcagcaaacgggtgtggaaagcagagagcatagcctgcgctcatagttacgaattggcgacctctggactgagctgcattaggctggcccgtgccaatctcccaggtatctcgacattcctagaggtccaccacacgcagataatccatctgctagaacatgactatcgttatcccaagctgcgagattaccngtcatcggtggcgccttgtccgcttcgcttttgacccgcgtgacaacaactgcgctttctttcggtttgtcaacacaatgtgtggtccttaccgacttcatcatgactacagatgtgccctgaacgtagtgttggccacacccctttctctcacatatttgttcctactgccttatcatcaattgagtttagccacgattctaatgctcaacaacgccgttttcatcaaaacccactagtgtgcacttactgcagtatagcatgctacccatgcttacaatgcatatataccgcccggcgaatctgcggaagggcccatcatatggagggaccttttcctgccagcttttttgggggtggacaaaacaattttttttttttttcgggggtccaaaaccctggggggggggtggtgataatanannaaaaaaaaaaaaaagagggttgtttaggagcaaccccgcaagtttttt

SEQ ID NO: 3873 - DNA, 6009 bp, Emericella nidulans
aaatctctgtcaagtagcagtctgcgtcttctcggtcttctctctattcttattaaaccgctctttcaggctcagtaaccaaggcaagcagcagcccccgagaatgattacacagtctgtgtacagcatgtgccgaagcgaccgaactgtcagctcggaagtctccaacaatccaacaaaagcgccgtacaaggtcttcaaggatctgtacgagcttaaagacgtcgaaaagagcccagagttagccgggcacgagaagcaggtggatagtgatgaactgcacaaggccaaagagtgcgggcactggggaggcgctgaacccagtagattgtttcttcgggtatgacccaactacccagtgcgcgctgtcagaaatagctgtacgtgtgcttaccgtgtgtagatctatcacgatgcacttgctgcgctgggcaggaatccgcttggaggggtggtctctccgccgctcatggggagcaatggcgtcgttccgctgacgattgttgccccgctgccggatatctgccgacacatggcgaactgcattgctcgcgcgcggaaggaggtgtttctcgctacgaactattggatcttctccgatgcgtcgacgctaatcaccaatgccttgaaggagttatcgaggcgcgccggagagcgcggtgagaaggttgttgtgaagattctgtatgaccggggggatcctaagcaggtacgctggggaatgctgaaccatgttcggtacagatggctgatgctatataggtctgggagaaccatctcactgtcgacgagaaaaagtatgctgctggcaaggtcaatctgccggcgacagatgagatcccccacctagatatgcaagtgatcaactaccatcggcccatttttggaacttttcacgccaagtttatgatcgtagacagacgggttgcgttgctgcagagcaataatatccaggataatgacaatctcgagatgatggttcgtgttgaaggggcggttgtggatttcttatatgatacggcgctgatatcttgggggaaagcgttggagccgccgttgcctatgctttactcgccagcagcggatgctccattaccaagcgctcaggtgtccatcaatggccattctgaggaaaatggctctctgcgacagcatacgactgaagacgagaattacgatgcggacatcaccgccgaaacaaggagagtaaacggattgctaacgccgaagaaaggagagacacggacgcagccggtcactcgtctactcagtacgtcgtcatctaagcataatgctctctagctaacttatatccagaccacacccgtcagaagtcgacaacgggtgatgcgtccgacgaagatcaagaagaccagatggagccctacatcctcaccccacaacacgaaccattctcaatggcgctgttaaacagagaaccatacggatgtaagacttataccggccaccagtgtttggcgtactaactagtacagtcccggaccatacgagtacagttgtgccacagaacgcagcatggctggccgcaatcaaccacgctgaacgctcaatattcattcaaacacccaacatgaatgccgaaccactgctagaacctcttctgaacgccgtccgccgcggcgtaatcgtcacgtgttacctctgcttaggctacaacgacgcgggccaactcctccccttccaaaatggaaccaacgagatgatctccaaccgattatacacgtcccttgagacagacgaagagagattccggctgcggatcttcaactacgtcgccaaagatcagacgcgccctatccacaataagttcaagaaacgaagctgccacatcaagctgatgatcattgatgaggcggtcgctatacaaggtggcatagccctaactcttccccaacccctgacttggtctgacaaaacaacgctactggctaggaaacggtaaccttgacacccagtcctactaccacagccaagaagtcaatctgcttctcgactcggcgctcgtctgccggacctggcttgatgcgcttagccggaaccagaatacagcgaaatacggtctagtcagtcctgatgatggctgctggcacgacccggcgactggtgagatacccgaggggtcgatcgggctagatccggggaggtttgcttgggccaagggggcagtgggggttgtgcatcgggttagggggacaggtgggttttgattatgtatataactgtggtatagccgtcccttctgactctgtgtacatacaatgctttgtgtatgagatgtcgctgaacctatagagtccattactggactaggtacacaaataactattaccacgaggtttattttgtcaaactccacctcaaactgaataagaatataataaactgtaagtgacgtggaaattgaattacaattttatatcctttatgtatgtatatataagcaggggtggtcttgctgagacgggtgtgcaatgggtggcaaaggcaggtgctcttctgatcttctatcaagtgattcccatatgatcgaccgtagaacgttccatctgatcaatatagtgacatatctggtcaaagttggactgccatccaaagccaaggaaggctgttttggctgcaagctgtaagggtccccttgtgccctaaggaaccttgcccgtcctgctaatccatcagccgtcctcagccaatgacaaatttatttttaagtctttatgaattcttacacttgtttacatatatatacactcaggaacctgatcagtcaatgcttgcttaacgtatattcgttcgccgattccatttcgacttagttgatgctgctcttgacgggtattgcctctagcagaggatcgctacaaacgcattgtccttaggaggagtctccaagtttaggctataacctacgacctcccaatcagctgcgttattgagattggaagttgagagcaacattgccactgactaagtgctgtgctgcatgagggtggggatactctccaaatatagaatatactgagacaatcatgattaaggcgaccagaggtgctcggcatatactccgtagagtatacagagtagtatctccacgttggcctggtaggaccgagcgcaaggactctagagcttatccactatgacgcttacagtggggggcgataatcgatcccagagggcgactcccgattggcaaatatcagacgacccatggaagaaatggatgctgtagatgggctgcctaagtcagcgtgacacaaccagtctacaaatatctggttagatatctgcaccagggcctcttgggtattcatacgatttgttggagtatattgaacactcccgcttgacaatccagtagatactggcccacctacccagccctattgtcccatcgttgcccataccaagaccatgctatcttcacttctttctcttccagcaatcctttccttttttctcgcactctgtattatccagctcgtccgttccctggctaaatctccatatggctccattcccggcccggcccttgcccgtttcaccaatgcatggtatctatggcagatgcgacgaggcgacttccaccgcaccaatatcgtagctccaccagcagaacgggcctgtcgttcgtattgcccccgagtatttcagcatctccgacccgtcagccgtcaagcctgtctacggccatggcaccaagttcattaagtcagagtggtacaaggcgtggaatgtcacgcccgatcccgaccagacgtaatctattttctgaacaagtgtctcagcgacacgcagagatccgcaggaaagtcgcgtccatgtactccatgagctcgctggttgcgtacgaaccgtatgtggacaactgcattgctgtgttcaagcagcggctcaatgagatctctgtgcagggcaagaccgtcgacatggcgcactggctgcaatgctatgcattcgatgttattggcgagatcaccgtccgtgctcccaattccgttcccctaaccatctaaatacataatctagagccatccctaattggcaagatagttcggcagccggtttggcttacaagatgctggaaacgatgttggcggcgtcatgaagtccatcgaagacgggctggcggcttcctcatatctcggcttgtatccgtggatctaccccttctacctccgcgtcctcggatatctacggcaagggctcagctacatgaacgaattcagcctgcttcatatccaggaaacaagagcggcgatgaagggctcccacaaggacctcccgtcgtatatggccgtgaaacttgttcaagcgcagactgaaaacccacacagaatatctgactgggatatcttagccactgtcggtgcgaatgtcggagccgggagcgataccacggcgatcagcttgagctcgactctgtaccatctatatcggaaccctggctgtctggcgaaactgcgcgaggaaatcgagtctgccggcattggtacagtgatcccagcattcaagagcacgcaggagatgctatatctccaggctgtgcttaaggaagccctccgcgtccatccggggacgggatttccattgttcagagtcgttcctaagggcggccaggtcctcgctggccaattctttcctggaggagtaagtaccgcgggaatttctaaccatatttccacccccactgaccactttcgaaaactaggtgaacgtaggaatcaacagctgggtcctacactacgacactaatatatacggcgcagacgcatctattttcagacccgagcgatggctcgaagcagatgaagagcagctgaaaaccatggagcagaattacatgccgtttgggatagggtcgaggacttgcctggggaagaatatctctcttttggagatggggaagctgatccccgttttggttagggactatgattttgacatacagggcgagggagacttggaagcgaggaaccgttggtttgtcaagccggttgatttctggatcaaagtgacgaagaaataaaaacgttaagtgattgatataggtattgcatgccactgcatcagtctgggctgggagagtacaacctcatcttcaagctggtcacacagcttacggtgtataaaaagcggaccctgcaaatatgaagccggatttatactttaaacagcttaatctaatgttctgacagagcaactagctcccaatactaggattgcacggagtaagtatcctgtagctcccagctatattggactcatcctgaggatcactcagacaagaaaaaaaggctaagtaggtaacttaatagtgcaaaagctacgagcgcctctttccaacctaatctggacgttgtggcttgtgagtagagagagttaggtaatttattaccccctaacatctacttaccccatcctctctattttgaagtgttggcgctgggattgacacgtgtttatgactgtttcattcaagatactccaacctaagatcaatcggcataactgaaaaactggtctgcagctagccctaagacatcagaaaggcctcctgttctctcctctgctttgccatttcctggaaagctttagtcttctaaaatgcggttctgttccttccctgttatttgatctgaggtatatatatatatatatgtattcattttttacggtgtccgtgggatagcgactttatctgtgttgtgaatacgcggcgtagatagaaccgccattacattagtcacattgtgctttgcctacgaaggatcggatgctatataatgatgtacgcttttgtgtatgggttatctcctacttattgccgctgtttccctatatattttcttcctgctgttaattcagatttggtcattacttattgtgtgctccgcttttttctctgtcttgtctgtatttctctcgtcatcctctttcatctcttactcactctggcccttgtgttctgttctttcttaaccctctatc

SEQ ID NO: 3874 - DNA, 2694 bp, Emericella nidulans
ttggcgcattgacttgcagccggcagggcacctgatgagctggaggcctctgagtgctcccaatgatgtccgtagtacatataatactgtccgctgggctccgagggcccaatgagtacgaggccgactgcagaactcctcacgaggcctgctcggcgcgttctgcttatgctggaggacccgtccgcacattgtggccccgatgacacactccgcacagggcgagaagttattgtgtggccactcgacgccgacatctgggaccacgtcggcgaggaaactcatgtccatcgggcgattgtttacaaagtttacctcaggagctggcaggcgtgttcgtatctagatcgagtaagtatctgttccttccctctcacaaaggactcaagactgaccagccgctcgtcaaagaacatatgtagcccatccaccatactcgtgaagcggtcaattagatatgcaaaccaaaaggtgcgtctcttcgtttcgatatcaatccagtcgttctgggccggagtgaattccctttgatactggtctagctgcatggtttgaggtgttcgaggcatgtcgagctcgtatagtctcatcatttgaatcaagcgaaaagctctgccggcggacatcatccctcggtcgaagtcctgacaggttagctcgtagatcgaaagcaaggcccacgcctgggcttgttccaaagagatttggtggcagggctcatctccgtcgagttcgcccagaagctgcctcgttttcgcatataacttgcaaccttcaacatggaactggctggagagtgatgaggctaacgtccacatagcgtactgcaggcatgtcctctgtttgctcaagtttggttgtttggaccatgatcggtagcggtgagtatggatgattggcgcaaacgcatacgcccggtcgaaaaacagctgatctctacgctatattagcactgttgtcaaacgagggtaagacgtacaggtcattgtgcattattggagagatgaagagaccagattccattggaatttggaccaactctggtacactgtccactggcggcaattgaaggagcgagctcttgtacggaccgtcgcaacatccccacggttccatcgtggggaatgggaattctatcggtgctaccggccactgcaggatatctgttgtttcgggcgttgtggtattgttttcattgttgtctgtgctgctgtcgttgtccacggtctggcagatgggtgctggaggcgtcccctggttttctagctggctctcgagctcctctattcttttctgcagcgtcttgagataccctttcctgggccctcgaggcgggcagctgtctcgcactatgcattccacgccggatgtagcacatgctgtacattgaggtcgaatcctatcgcagcggattcttcgtcgtcgacattcttcgcactgcggccagtttgtcagtatcaaacgcgcgggatacagtcgctgaatgggctatgaggcctactgcaataccaggctgttgtcgctgttggcccgacatggctgcttgaatcggtctggagagtatgcaatcggtcttcttcttctacgacagggagaatctggattatattgaccagggtagatctaaggtatcgtagtatggattaagctgcaatatgtggatgtaagtacagtccaaatggaccattttatcgtctgaaggacaagatgggaccatcgctggctcttctgcccatcaccatgtgctatgaactacttcagctgactggtaattttgttagtacggtggagaggtgcagggatattattctggtatcttagtgactaacattgaaggaatgtataaatcgttaggccaatctttccattggtctggcttacggtgcggcatacctaccgtgtggtgccccattttgacaggggtttcacatgtgccagcgcccttatggtaaggtaacccatatactcttgctagctaatgagagggtacagtattcccaggatgagtgtgagtcggaactcagtactcgctggtgatagtccaggtggtgaaaatacgcgcagtaatgcagtccccttcagcgagatcgccgcgtgtggaaaccaagcactgccattgcgaccggtatactggcgctgcaacctagtgaaactgtacttcgatgcctgggcgaaacacgttcgaaaaaatgtattatgctgtattaattacaagacaggcactgaaggatcgtggtgtttctcgctcaagggtctgtagttagggcttgaagtatttttttgggatcatagaactagggcaactcaaacttctgtcatcctactgtactgcgccctagaagcaggtccagtagagtcggctgtgctactatagtgaagcttagtctgacttagcttctgagtctctgccttggctaactatggcgggctatagtctgctttattattggttctgcaaagtgtctcactgtcttaccacttatggcttactctattttggcccctttgtctaatccatcccgcatgcatactcatcgtatatttttggccccttataatggtctgagttgtaactgaggtatttttgccattggtctattccttgtactgccaactcgaacaatgccaactccaacaaagtctgtgtactcggttggcccaggggattttatagtcgagtagagagatgaggtc

SEQ ID NO: 3875 - DNA, 4855 bp, Emericella nidulans
agtagtcaaggcagagaagattatagacagtctatcggtatcatgctatttgtgggccaaagggaccgtcggctatctccttcggagaggctgagacgaatccgtcggcggtgctatcgtcttcctcgtggggagattgtacgacggattccgttggtgattctgccgccgtatagtcggtaggctcggcgtcgtggtcatagcttgacccccggaggagcggcggggtggttggtggctctcgcatcttgccggcggcacgggaagataggggtctaggggtagcatcggcgcttttgagcggtcgagtttccgatggccttctccaactagggccagctgttgcgctgttgttcggaccaccctgtcgcgtgttcgagctgggaggcgtgagaagcccggagaggaaagaagttgccggactgggtttcgagggagtctgctcggagttcgcattctcccttcccttacgccaactgccccatgctgccgccgctgcgagaggtaaagctcgcggagacgcggttagttcagacagggagcgcaagctcgaaaaagtttggccattcatggctctttctttctcctgctgctgcatctgaaggtttgccttcaggcgaatagcggcatcgcgcacggagtccttgttaaacgacggctgtgacaaggtgttgatgatatcctggaggtcatccagacggacacccagaagttcacgcagccaagtaatctccgagtccctctccttgatcttggttggagcatctttgtcgacagcggagagttcggcttcaagctcgtcaatgcgggtttcacgctgctgtagctggtcttgcagaaccaggattgactctcgtagggcctggggagagatcttctcaggcaccgacgatcctgggttgatcggcagggaaggagtgcttgagtgtgagggcgcggtcggtccagcagatttggctgactgcgcagcttcagcagcggcacgggcagctgactgggcgatctcgagcttctcttcgagatgcgccactcgctcctgaaggtgcttgatcttgtcgtctgagaactgcagccgctcgatgtaatggttctctgtccgctgtctatcttcggaagagttatgcataacgcgagcgtgacgttcacggaggtcattgagaacacgttcatgcagtttccgctgttcctccatagagtactcttttgactcgatggcgctagctacagcagtagcctttgtttcatgcgcttcctcaagtagcatttcgtatcgctcccgggctgtgtcgctgtcgagtttggcattatccaattgagtttcaaggcgtgcgatctgggcctcaagctcggcacggacaatgttgacctgagtggtagcagcctcgatctccatttccattgaggttcttgtacgctgaatctcaactctgctactctcgcgagcttcattgaattctcgctcgaagcggcttgccttcatgtccaattcctggttcttttgcctcaattcgctgacgagctcctcgagtcgttcgttctcctgctgcgactgcccgaatatgaacttcagttttgccgcctcgcgctcctgctcttccagcttcgtgacctcactctcaagctgttcacgcaattttgtttcccggttgtgggatgcccgtagttcactatacttagcgttcaattcttcctctttgcgtcgccaagaggcctggtcacgggcgatctccccagtgagagctgctaattgatcctgaagctgttccattcttccgctgaggttctggcgaatgtgcaagccgtcctcaatacgcaccctcatgttagcaacagtgttgcgcagttgattgttttcagccttgatctcctccaagcgagcattggtttcctcggtttcgcgctttgcgctatcagccatgaagcggtactcatcgagcgtgccctggaaggagatgttcttggaagagagctcttcgagggtcaacctagtgctttcgcgttcctcttcaagcatagcagctttttgctggaagctctcgtagtacggtatcttttcttgttggaattgcagcagtcgtgcttcagcagattcagcagccgcactatgacgcgcagattcctcttcgacatccttgagaagccgctggagctgtgcgatagtgtcctgtgcttgtcttcgcttcctgtactcgttttcggttcgatcatcggcccctctgagcatgtctttcaaattattaatctggagcatgaggttgtcggcgccaatttcttccgcatccgaacgtgagcgagagttgagctgagctgcgacaacttcctgaatcatctcgcgtaagccggcggtaggattctgagagaggttctgcgctgtcatcgcatgtagttcggtgacagtgttgcgaagctgtactatttcctccaacgcgggctgttctggagcaggagcaggctgagcgtcccgtgttgctagagcttccaaaacaacattcttaagcttctcgagtttacgctccctacggcgaattggtgacctcggcctataggatgcatcttcttcatagtcctcatcttcgtcatccgcgtcactgtccattacttcagcagaagtacttcggaatgccaacggattctgggcaggagcggaagtcaaagccgcaagagattcttgaatggcgccaagtgcgttttccaaaggatagagccgttcgtcaatggcggagccgagaagctcattgacacggcgatcaaagaacctgcttcgatatgccagcttgacatcttctccaggagaaaacacatcatcccagtcgctgatgtggtcattctgactcattaactgtcgtacaggtgagtgtgcgttggaggccacgcccttggtaggagtggcagagaactgagactgtgcatcgaagtcgagtttaggtacatggagagtatgagatacagcaccccttccagggctagggctcggaggctcgctcctgttgtctgcctgaacatggcgtttctcctttgacggtccttggactggctctgggaggtggcttgggggtttcggggtactgatccgctcaaccccaatgtcagaatcctcgttaagctgatccataacggcattaagctgttcttcattgggggaatcctggtcattcgcaatatgcgacttattatcctcagctttacgggggatatctttaggctgatcctctgtgttagggttagcagaagccgattgttctgtggataaccgctgcgcaggtgttgatggtggcggactcgcaacagcgtagcgcgaagacattaagcctttattctgctttggtggcgtgtctttgggaggaggtgctggtggttcagcgatgaatggtacaaattcagcaatggacggcttgaagctgaacggctttgctgaggctgaaagggcgctcttttgaccgaactcaacatatttgatttctttggttggttcgggctgttcctttgactcctgatgcctaggttcatcttctgcaactgcttcatgactctgatgttgaacatcatccggcccgaccgcatcggctttagtatcggaaggagcccatgtcgatgcttcactggcgggtgtacccttacgctcaagaggatcattgtcggcagcggagtctgtagtgcctcgctcaggaagagcattttccttgccctcggcaggttgagaagcgcttgacggctgctgaggctgcgagttattggcctcacccaaaggatgtgatatgctaaacctagcctcgccatcatcgcttccaccaacacgtcgagcacgcttgtgtcgatcagtaggaactggccggccacgatcgtccattgtctcttttggtaccttgctttgttcctctcccttcgcttcatccggtcggacgatcggtatcgccttcgattttttggcggagttggcgatttttgttatatcaatgtcgccgaagatcttagtcctaccagggttgaactccggcgcagcgacattcagggaagcagtagacggggctgagaacttgaattcacgggattggctgctctggctgccgtggaaaacagtctcaattttacccggagtaaacgaaggagcagcaacattgagccttccagcaggttgttcagcgccaaaagtgaatacggagtgctccagcttcggaaattggaaggcgttttgctgttggaaaggcaactgttgcgaaggaagttgtcccgttggcgcaaactcctttgcctcgacgttaagactggatgttgacagtttcgaacggtgcccgccagcaaatgagccgttactgggttttggctcatgccaagggaactggtgggcgagtgatccattgcggcgaggagtcccagacaagctagggttagtgtcgatatcagaaccttcatgagctggctccccaggataggcatctccgtaaaaatggttcaaatgctgggccatgtgttgaggcgcgttagtctccggtagtgtccacctagagttcagcagaccgtgtcccccaatattatgatgcattggatcgtagtcaccatcatcaagctctttgtcgatagaatcctccaggtggtactcagaagtgacttgatcaacgcccttctgaagcgtctcactcagattatgaccacggctatgaccacgaggagtgggctgagcgatctcgaccgtagacgcatggaagttatccgggttgggcggaggggttcgcaggggtcgtagttgatcctcggtgtagtcatggtgtatccggtgttgaccccggtcgcgccaagcgtccttttgttgcttagacatgatcaacacacccaagatggaaagcatttggatcgttca

SEQ ID NO: 3876 - DNA, 6089 bp, Emericella nidulans
tatccctggccaaatctccttattcagatttgctgcttcacgaaggatcggtttccaagttttcagacccggtcaagctacattaggcccggcgatgttaccttggatcggggtcattttgtcgggcagagtatggaccggcggtatttatcgctattgcgcaggtaaccttacgacggagttgtcgtcaagtttacgagacatcgtgcccggcctgactgctgcggatattgaataccatggactcggtgatcttaaggagctggtccccgtgcagcggtgggatgaggccgtaattggtattgatcggagcttggtccgaacctggtacctgactgtcgcactggcttgcaccacaattgtgggaagtcttttaatcgaatggcgctcgattaagcagaagcaatcgtgaacggagcgtccagcgcgtgagaagagcaatctcggctcgccccaggatggtgttaattgaattaagagagcttgattggactcggcgcgtggccgtcaagcgcgggaagcgcccggcccgccccttaggccaccctgagacccaccagcggctcctcccgccgaagatagaatagagtcccggcaccgtcccagattaccactgggagtacttttgttaccagatcccaggcatagtggacaccgccagtaattggattcacatatatgatgcgcttatgcactccactctgcttacggtcgaatactctgtaatcccacatgtgatccatccgtccagcatatcctcggttgaatcgtcctgcaatccagacccctattaggctgtcaccattcttgctgctactattctgctacgccagacttacgcatttttgcactttctggaagactccaggtcattctcaccctgaaataccgaggcgcagaaacgacccgtacgggcgaagcaagcatattcttccgcgatcaatttataatcaatcttctaagcctctttgaccatcttttcagaccctctcctcaagtctaaaagtacaggtatgttgaaggtactcggaggcgctcgcacgcagtcaccggcgctcagacgcgggttccatatttcccagcgttctaagggaagtatcagaccaatactggcgtgtgatggtagaatttatattaaatcatagaatacggggatgtcatcgaggatgtgcgagagatcagtagctcttctttgccagcaggtatgcaatgtcttgtcaattggccctcgaccaatccgtcagcccgcagctaaaatgaaataggctataaagaagaccgctccaaaggcccgatgctctgatttgaagactcgctacaaaagctccttgttccaactcttgaagaaatggctgctcgatacctcaagttccgtccacccgctccttttcagcattgaattagcctcgacaacaaaggtcgtccaggagtttatcaagccggatgggatcggtgccaagctccaagaaaagttgattgctcgccgtgaagaccggaaacataagagctagctctacgagtggtggaagaatgtggcctacttgatgtaccgggaccctgtagtgccgtatgtcagctacttctattctccccgcgatgatcgaagtcggcgagaccctaccaagcgcgcgaccgcgatatctatggcagcactggagtttaaatacaagtgagtgtttgcagatttgcatatatcgcagattgccagagtttactttcaacattgggttgggtgcattccgtgaatggttgatacgagctcttctcaatccgcagtatatcagcattggacacagtacctatgatggacgaagactcgctcatattctaggtgccagtgtgctgaagtaaactgatacccagagctgtggctaagtcagttagcaacggttattggattaagaccggttcgccaacatcgaacatctggcggattataccgcggtccaggccaagtgccgagcgattctaccccgcatatttaagtctcagagctagagtgagaacacagccgaccacctcgttcgtctaggatatctttctctcaattttgctctaccggatgatccgatgcccaacgttctcgtcctcggcggctccggctacctaggcttagctatatcccaagcgctcctgtcgtctggcaactacaccgtctggggttccgctcgcactcctgaaaaagcgaaactacttctccagaatgaaattagtcccgtccaagtggatataacagatcaggagacgctggcttctaccattgcagaaaacaacattgacattgtcgtcgagactactatggcgttcgggcaggcaggtgacatgctggaaggggtgaaaaaagccgcaggcaggcgtcaagacggattgcgacagcgaggccacctcggtcccaagttggcctttgtctactgctccgggatctggatccatggatcgccgtcctcgcgagtgagcgatctctcccctgtcacgaaggagaaggcagctcgaatcgtcacgtggcgtcccgcgcacgaacaagccattcttgcatctcgagatgtgttggatgtcgccattatcagaccgggaatcgtctatgggcgtggttcctggatctggagcacatggtgggcctccattttgaacgcaaaacgaagcggagctggcactgaagcaatccgcattccggctgatattgacgcacgaccagcgactgtgcacgtcgatgatgttgcagcgggttttcgtgctgccatcgatcgagttgacggactacttggctcctggccggtgtttgacctagtgacggagacggttggtgcgcaggatatcgttgaagcagcaaaagccgccttgggtgttgaagggcctgtggagtacactggtccccagggagatatttttatggaggcgatgagtacagtgagtaattcagacacaggtagggcaagggcagtcttgggatgggtgccaaaacggagcgaatttgtcttaaacatgtccatgtatgtgcgcgcgtgggaggcggcacaggcatagggtatagaccaagaactggcttgaatctgcagctattcacttctactcactgcaaataagacgtgttgaaaaaaaaaaattatcaaaatgtatagaattcggcaggatgtcaggggctatataagatgatcaggcaatgggatgaacaacaataaagaagccaacattgcttagctgctgccgtctagggtcagaggtactgcaaaaataccttaggctctgaggcacggttgcgcggtggagcctgccatgaattcaggtagtttttccgcgaccttgacagcaacaggggtggtttattggcgaagcacaattgacgagcttttcgtagcgaattgtaagtgccctgtgtcggtggcaagccttgggctgggccgacttccttttcaagttaagtgcagcgtccgtctattggctttcagatagcttagatgaaaaactccaatcaagccctactttattagattaactcgaaactagtttggaagaaaagtgcaaaaaaaaaaataaaaaaagaaaagaaaaagaagagctctgactttagagacaccagctgcattggtaatcactggcctagtcacagccttgtttctctactggcagtcttttgcatagttggttggataaagggacagtcttttgttatcttgactttctcggccactgtgcgcccttcattgctcctttctttgctcgaaaatgttttccacctcggccgcaccgatcgtatgtccgtcatacttagcctacaaataaagctccgattggctctgtggatgggctatgccggggctagggttacggtaatattttggtctacaagcgacgcaaatatcaagtcaaataacccggtgggtgcttgaaccttcatcctcttgggctctacggtatgtgttcaacatgactatattctttgatactcgctgatccaactatcgacccactgctcagcagttccagcataaatattgcgacgcttggccaaaactactcttactacttgatatacctgataatctggatgaacatcagatatatactggctaaagttgtctcaagaccctcgccgcgccattgaggcggactctggatgcgcaatctgaggattgtccgtcatacgtggagtcgcgccaacccgtcatgctgaagtgtgattatgctgattccactctttttggcatatacaacagataatctgcaaattaatgcacagccccaataggaccgagcaccaacagctaggaccaattagtcaaactaacaagcccaatgcagtgaccaacatcgacccgtttgtatcgaactaccgacaagttggactcccggctggcttcaagacagcgttggacggattactctgcgagcaaccagatgcaacaccaaggagggtatcgtccacggcggcattgtaggcggcaccgcagtttggatcgctgcgatcgattagtagctgtcgacgttctgtaaagcgtagggttgatcaggggaatgcatcgtacctcgcgcctccgcttcattcgcaaagtaagaccagatatcatgcgagaaacagtcctgcgtgtatgcattgcccaccgctgtacctgtgcaccccgccccgcagcggccattgcaggagtagctaccgaagccaagtatcagctgtcctgcatgttgtgggcgaacaaaatagggtgaatgttcacgtactctccctcgccagcactatttgtgccgtagttgctaccaaccacaccagaaaacgtgcatgtttggccgttgctgttggtccaggttgcagttgcagtggaaccgaccgtcaggcaagtaatggcgcgcttgtttaggatctgttcctgcccaggcgcagaaggagtggccatagataggagaggcagacagccgagaaagattgtatagagacaaatcatctttatagggccaatgctggtgaagctcagtcatgctatattggtaagttcctggattcatctgcatctttatatctgcatgccttacctttcgccatagttagaatggcgttatcaatccactcagtccaaaaaccacaagccggagatgttttcggagaaaatttcggcagaggctttaccgtattgcggagtagagattgtatataacggcgtggatgacagccagttcgccataatgacgacttcttaggtcatgtggatctacaccagaatttgcctttacggccacggatcgcatcccattcaggttcgcggtccgaacctaaagaaataattcaactaatgctagtaagaagttccaaattagttgtagcatcctcgcttagaattctgcagaggacatggcctgccatacgtacctcagcaaaaactgtggctaggttctataagcaagaaataagcaagagatcttatcgccggtatccgacgaacaaactctcagtgtagtggaactcgtgcccctcaccgttaagaactaaggaagaactcggttcttgatgtcttcatgtggtgggggagtcagtcgtgttctggtagacggggcactcccaagacaatgccctacctcaatgccccatccgcggcaaagtgctgaactttgaagattctaaggttctaaaaaaagaaaaaagaaaaaagaaaaaaaaaatatagtctctctttcaccagccacatcactctccagtccacacctctttcagatagcggtagtccagacaggcttcttccactcaggctcctagactcccctcccgcattgccgcttgtaccgacagagaaataccttaagagaaacaccggacgagttcgctattgatgtgtccctgagccttgaggaatactaaaactaatcaggcgaagcaagtactgcctttctatggtcggccagtgaacgttccctgcataggggattgcgttcatagtggtctggtacattatattacggcgaccgatccagcagttcgagattggcaatgcattacaaaacgttctgttgaattagagctgttttcaacttggagtacgaagaggttgacactgacagtgtcagatgtaggacactgggtataagcagatgcgctatgtatcaga

SEQ ID NO: 3877 - DNA, 3177 bp, Emericella nidulans
catatagaccccctaacagacggctataccgtaagggtactcagagatccctgtctctgactcgtgccccatccgaacggcgagcgcctgatcgaatccggggacgagtctggactgatgctattgcatcagagttttggcaccccagtcaccaggtgagactacggagtcctgaagccagaaacacgccaccggtcccgaatttgctgatgtccgcctgctccgcaccccaaaacggtaattctccgcctctccgcctatctgggttccccgtgctagtctggacgatctagccgaggaatggaaggtgggtcagggctaggtcgagagacgcgtaggcaaaaacagggtgaaggaaactctggaaacccgatccgatcccactccacatagtatgagggacgagcttagaatagttgctgtgtatgtgtatctgaattggaccataggtgcctggatatgtctatcatcccatgatccctatacatcgtgatatctgtcaataaacgcctaaccgccactttattcccgcaaacgggcaaatgtaaaggagtaccgggattccgtacgtataatcggaggccaatatacggtacagatggccgacccgactctgggcacccctggtccggggcaagggctggtcgggacggcgccggactgagactttggttgacagctcgactgctgcagtcttttcctatcttctttctccattattctccattctccgcatgatggccctcgaaccccagaccctctcagaggatcatctgcccgtgacagtttgagtctagcctcctgacaggtgccgccgatatggtattaaaagtcctagacacagccaaattgtctcagaatttctattcagagaaccgtctcatctcctgattcttctcaatcatcaccgtcttcttcgtctctgtcaattccttcgtttttttctcttcttgtttatcccatccaggtctttgtgatgaagggtgaaaagaagacggccgagggtgtcgctgccccggcctcggaacaggttgtgagtcccaagccagccgttatgtcgatcctggtcatagaggctccgctaatcagttaatccttgcggtaacaggagaatacgacagttcatacggtgaccggcagcgaagcgttcaatcaggcccttatccaggaaaaaccacacctcctgagtccaaccaacctgctgctgtgcgcctgtttgatggtcggattctgctgccagacaatgaacggctacgacggctccctgttcagtggattgctcgccaataccatcttcctcgatcacttcaacggtcgagacgctggcatctgggccggtctggtttctgccatgtaccagatcggcggcgtcagtgcgcttccgttcgttggtccggccatcgacacctggggccgtcggtttggaatgttcctgggcagtttcatgatcgttcttggagcggtcgtgtccgggaccacgatcgcgaatgcaagtgtgggccaattcatgggcggccgcttcttgcttgggtttggcgtctctatcgccgctgccgctgggcctatttatgtcgttgaaaccacacatccagcgtggcgtggtatggtgactggctattgcaacaccttctggttcatcgggtctatccttgcgtctggcgctgtccggggttctatcacccttgacaataaccagtcctggctgatcccgctctggttgcagctagtcttctcaggtatcatcatctgtacttgctggatgatccctgagtcgccgcggtggctgtatgtccacggcaagcaagagaaggccgtcgaggttctgactaaatggcacggccttggcaaccgcgattctctctgggtcaaattgcagatttctgagtacgacgctcacttgaacatggacggttcggtaagtgtccaaagactggacctcgcctgatcgggccggctaacacaagctcgacttataggacaagaaattctgggactaccgcagcttattcaaccgccggagcagtatctaccgtctctgctgcaactgcttctttgccatattcgcccaatgggctggaaatggcgtgctgacctactatctagttcccgccctccgcggcgccggcttcacatccgacgtcacccaggcaaatatcaaccttgggtacgcctgcttccaattcttctgggcccttgtcggtgctgcctttgttgactcgctcggccgtcgtcctatgatgctcttgggtatggctgggtgctgtgttgtttggattgccattctatctgcgtccagtcaggtaaataactcggacggcacactcaacagcgccgcatccaacgctactctcggctttatattcatttttggcgctgccttctccttcttcattacccccctgcaggccttataccccgttgaggtcctatcatatgaaatgcgtgccaagggcatggctttctcctcgcttgcggtcaacgcagcaggactgctcaaccagttcgcatggccggtgtccttggacaacattggatggaaaacttacattgtgttcgtcgtctgggacgccatccagacagtgatcatgtacttcttcttccctgagacaaaggatcgcacggtaagtcttgttatttctgctctctttccgtccgtctacaatgtcagcttactaacgtgctatacagctggaagaactcgatcagattttcgaggctcgcaatcctgtgaaggcttcgactaggaagacagctattgcggtcgatgccgaaaacaatgtcaaattttagggtggagcctggcttggtgtgggcgatattagacgttggcctgtgcattgtatattatctgcatgattacagaagagcataggagcggcaatttgctatggtaggattaaacactatcatcttatgcagttggtcccaacaagccattcgtagtaatatacctgtatgattatctagcgtagactgccatctctcaccccacataatctaatttttacttcatggtaatgaatttttaataatcaaatccctcaaatttatagtagaacacggatatccaggagtagaaccctttacgataaagaaatatatatacttagagctatccatgagtgcttgcttagtgccttatgtgagctaaggcttattgaaattccagtataaagt

SEQ ID NO: 3878 - DNA, 2530 bp, Emericella nidulans
gtgaattcttggtgttctccaaaagtgcccgggttcgactctactatgatcaagggccggaaaacacgagagaaaagcccgctagctcaccaaaggctttagtagggctgattctagagatcaatgaacccctggggtcggaaccctggattatcatgcaggctgctcgtgaaatgactagcaaagcacctcatctcctgcattgatcaagtcattgtggatcatatcttgctcatgagctctgatcctgtacccctcaccccgaaggccatgatcagtctcatttaagcatacattagtccgtctgttcccacgagcttagtagctgagtttgaactgcaattattggtgctgtcaacctcccatccttgcataacagtactgattgaccgtggttggccgtgctcttctctgtgcgctacgctagcatcacagaatggcagagacagcggttcaaccgccgctgtcgcaggcggttgggtacattgtcgtcgtcctcatcggagccatcatcgctctgggtatgcaaccgccgcaataaaagctagccgctgaagctgacttggagtagtgatgatgttggttaccaaggtgctcaaaaagacaactggggaagacaacaaaaagaccgagatgtatgcattcaccctcgtcggggcgtcctatacttgctgatactgatatattgcaggtttatgactgccaatcgaaccgtccggactggtctcactgcctcagctgttatctcggttcgcctctccctcgtccagtctgttctcaatttcgtctaacaaaagcccctagtcctggttatggtcaactcagctgctcggctcttctttcaccggctacgactatggcgtttctggccccttctggttcgctgccggttgcagtcccatgatcgtcttcttcgccctagtgggaatttcatgcaagcgcaagatcccagaggcccacacctcgctcgaggtggttcgcattcgatacggtatattcgagcccttatcgctgtggctgccacaggctaaacgctctcccaggccacattgcccacgctgtcttcatggttctctgtcttgtgaacaatatcttcgccagcgccaacatgcttctcggtgcatcggctgtgatctcggcaatgtaggttctggagtagaccgtcaatctgagcctagccagctgattgccacagcaccggtatgcatataatcgccgcaacattcctgctgcccgtcggtgtgactgtttatacatttgttggaggcataaaagcaacacaagtcttttcctcgcaatctcttggcagatcaaggctaacgctctagcagtttccttaccgactacttccacacaaccatcattctcatcattgcctgctatttctcagtcaaggcattccagtctgaccaaatcggctcggttggcaacttgtacgagcttctcaaatcggctggccagcggcaccctgtctctgggaaccaggatggaacgtatttaaccatgacctccaaagatgtgagcttatctgtttcggcgccaagatcgcgaaggcaaactaaccctatcttagggaattctcttcgggattctgcacacctgctccaactttggtcttgtgattgtatgacaaacccgttcatgtcgcgattgagtgctaacttatgcagatggacacgagctatttcatcaaggcgttctcagcctcgcccaaggcagttgtcccaggatacgcgattggaggcgccatgtacttctctattccatgggctctcgggacggtgatgagctctgttgccctggggttggagaaccagcccaatttcccaacctaccctcgagtcagtgtcgcttggaccattatagctatatcgtcttccttactgacatgtgctatagagaatgacttcctctgaggtcagtggtggtcttgttctcccgtacgccgccatgaccattgcaggcaaaggaggagctgcagcggtccttctcatgatcttcatggctgtgacatcgaccctatctgcccaggtgattgccgtaagctccatcctgagttttgacgtatatcgcgagtactttaagcgatctgcgacggaccgagatgtaatccgtgccagccaccttggcgtcatctttttcgcggccttctgcgctggattcagtacgatgctacactacgtgggcgtcgatctcggctggacactgtacatgcttggtagggcattcaaatcccaaagctagacctcactgactgacgatgactgctactattacaggcgtggttacctgcccaggaatcttccctatggtcttcaccgtgctctggcgccgacagagcaaagctgctgccattttgtcgcctatcctgggattagcaactggtctagccgtctggcttaccactgccggtcatttcggaggcgaggtgaccgtcgctaccactggccaagtgccaccgtgcgtctatggcaccgtggcctcggaaatctcgaaaatcctctactccgtcctgatcacgcttattcgc

SEQ ID NO: 3879 - DNA, 3217 bp, Emericella nidulans
tcaaactagcgggaaacattgccggtcttgtgactccaaccgctatatcaggaagcttagctgttcatctaaaatagatggagcccatatacaatgactggacttgtaacatcttacggtcatgctgccgagtcaccgcgcagaggcacgaggattccagaattcgaactagatgtaaccaacaacgaatagacggatataaaaaataggcctgcagaaaagatccgagctcaatagtttaagaacaatgtctagtattggaactttgtcattactgacatgaatgttattagtgctcagaactcgacacctgaaaaaaaaaataaaaataaaaataaaaataaaaaccaagcatcacaccgccatgtagtcgttctaactacctgtacaaagcctaagttcacgacgagtcaaggacaatactttagatactgaaggacaaaccctctttagcagagataatactgccagtacaccagccaaactctgggttacagattgtcgcgacaaaccccgctatctcctccgcgtaggctgctcgtccgccgaacttctcgcccagctttttgacctcctcgctgtcggtctcccggacgggaaccaacggggtcaacggattccactttgccagatccactttgacttcatctggcgcggagaggtacatatccgtcatggcgaggccggggttgatggcgttgacagtggtacgatctgcgagttctcggcaccacacccgggtcatagcttcaatagtgcccttggtcccggaataaagcgtcgtgttctccgctccgaccttggagtttatactcgagagcatgacaatgcgtcccgaccggtcggtaggcaggtacggcttgcagacggctgtcagcagaatcgaaccgaggacgttgacttcgtagatgcgatggaactcgaccgggtccacggactcgagcgggccgaggaacaggatggcggcgttgtgtacgaggatatcaatatggaatctgctctcaccgtcaccggtaaagaactctttcgcggtggatatgagccgctcgcattcctcttccttagagatgtcggcacggatagggagggcgcggatgtgctgtgtttcggtgagttcttgggcgagccattccgcagctttgtcggaggaggtcgtcgcatagttcatgatcacgttgcagcctttgctggctagattgcggacgatacaggcgccgatacctggttgagtgagccattggttgagtaagaaagcaaataccagggtgcgtagagacgacgtactccgcgcggacccagttacgagggcaagcttgccctcgtaggtccgaggaaccgggaggccatttgaaagactgcccatgataggatcaaagttaaaatagagagctgtgaagctgatccaagaaagcggatgttgttgggggtgcgtgtctaaggtgggaggggggacatggcgatacactgcaagagggccaggggggaatgctattcacatagtgcctggttataaatcgagagtgaactccagtgcgggctatgattggcaattggcggtccgtctcagtatggatcatgctgcagagtttcgactactggtccatttacgggctctgtaggcgctggcttctcgatccaccgcagccttagtgttgcagagcgtggctgatttttcaccgtctgatattcatctcaaagagctcgtttatcagcattcttttcctattgttctactaccattttgacaagaaccctccatcaacgggcaaggtaatcccgttaacgtacgacgagctgtccgacgcaagccacagacttgcctgcgcaacctagtgaggctggccgaatcggttcagactgctaactttcggtgcaaattcatcgtgtgtcgtgcccataatctcgagtgctttggcggacatctcgctcttcgagcccgttagttaactgagaagagattgacgataaacaaacgtagccttacaaagatggcaccgggagcaacagcattcaccctgatccccaggggtcctccctccgtggccgcatgtttggtcagccccagcagtgcatgctttgtgcttgtataagcgggcatatttggctgcggcataaacgcattgatcgaggtaatgttgacaatagaccccttggaaccctgcttgcgcatctgctgcatctcgtatttgcagcagagcgccgtccccgtcaggttgacgtccaccaggcggcgccaatattcctcgtctgtctcaatgagcaccgtcttatcgggagtcatggcggcattgttgatcgctacatctaatcggccaaagaagcctacagtctgggcaaccaggttctggacatcttctgacttggagatgtctgtcttgacgaagcgcacttcgccgagcgatgagagctcagacgcaacctgctcgccctgctcagctttgatgtcggcaatgacgacctttgcgcccgcgcgcaggaacacggatgctgtagctttgcccatcccctgggcgccgccggttacgatggcgactttgtccttgaggagcgggaagatggacgcctcagggaactccatgctgcgtggtttgcgaggcgatttagattaagcctgggttattgggacagaattgacgcgatgattgaagaagggggaaaggataaaagccaactggttaaaatcagggtaaagagatagacgggaaggtgatactggcagtaacaatgcaacttttatgtgtctgaccggctcttccagtgcagatgcaataaccgaagagaaaccgaagagatgccggtcctggctgtacgagggtatcgcggcaccggtcaaagacaggccatggacgtggcgttgcgctaggctaatggattgctgcactatgcatcccttatgggggaggaagacttcgcggagggactccgaatgtgtcaaacagcccatactgagaacctcgtcgggtaggagcctattctgattcaccatgtgaggctgtacagtgttaaataaccgcaggtgttaggcatgaaatgaccggccattttttttgctgtagctcttttacggatttagttgtgagctgagagacatttctattcttgggtaaacaacggttccgggtaacctaaattatcggctttagctgggttccctaaggaaaaacaagtttaatttttgacttgaccttaaccttataaggtacaatttctttattta

SEQ ID NO: 3880 - DNA, 6547 bp, Emericella nidulans
  unsure (1)..(6547): unsure at all n locations
ttatccgtctcacgcctgatctagactctcgcactggcagcatcacatgtcccagcgcttgcctgcttcatgtgtccgctttagtcgaggagcttggacctggtgctttcgatacctggacttgttgccctccgggagcgggaggatcaggcgaaaatcaggagatgttcgaatgcttatgcgccttgacctcgtctattctatggcagtatattagcaatataacggacgctctgcagataatataaattgccgccaagcccccaactgatagtgtaccgctattgctccgagatgaagatggagtctgtgctctgcgaccggcattgccatcgtctgcctgtctgctcccatgagctctttacaggctcgactcgactcatctcgaagcccctcgacgataacccatcccggctgtcacacttgtttcgaccacttggagtttctcgttgagacagtctccggccctcatttcatctgtcccgggactggtctatgcagctttatcacacccaccagaccggtgtcctcatttccatccccacgcaatccacctacgcctccgcggcaacctggagtttcgaaatcactggactagagtgattgcgggtgagatagctcgcacgaattttttcccccctgctcgcacataagaggcccggcacatctcccaagatggcctttcttacgcacgccggcgcatcttggttgttgtttattggatccatgattgcatgaccgttgttgattaatatgtggccaaatactaattaagataaccctcctgcgaatcacggcagttggacgctgctaagaacccggccagctcataggagctttagactaaacgccacaggccaatcctgtcttggcccgatcgcgaggtaagagtactcatattgtactgtcttttagcagagacgatgctgtctgtctccccattgatcctatatcctagagctattgggcagtgtgcgggctggcatctgcactgcgcccattgccccttttgtgctgggccaccgttcccgctggtggcgctgatattctctcacattccttctggctcggcacccataccaaggcgcaagcttgcttgacggtgatggcacaatccatcaccttttggatcaatctggcacatatccactgttatttgtcgatcatatcatcctggctcataaaccgcatcctcggagttagccaaccaaacccctttcatctccaccttacgaggaacctttagaaccgatgacgaagcagctgaaacagcatctcttagcagtcaatcaccatcctgacgaacaaagatgatggatccgtgctgtgggggcgggaggccgtctcatgaagatcgcgactcgcttcggaaacgagtcgagtggcttgatcagacacggacggatcatcgatccatccccaaccccatttcatagctgttacactgcgctaagccaacgcctgcgactatattccggcaccttcgaaatcgaagccggccctcaaccattcacggagctccagcgctgccagtccccgaaagccatcccgcagggccgcatcagccaacaattgccctccgttgtaaaaagagaacagccctgtcgatcagccaattacgcaattgtgagctcatttctcttttcgtgaatccagttacttcgagtatagtttgggatcacggaatacataccttgaacagagatcagactaccccatagtacacctacccgaacatgcaggcactctgtcggaagtattccggccaacgagaagcaacccagcgggtagggccactgggttgggattggggtcgtggttgggggtcatatatggtaagccccccagagcgtgcagctaagtatacccccagggccaggatacaatgaagtacagagtacgcaccccaagtctttagctggtcgggtaatatcctgaattaggccttttaccgtgacccgctactccaactactactaaagtactagtactgacggcgtccagaacgtttacgtagctttttagccccccagagcaactgacctcctaggcagctaggtttttacggccagagtcttagatattgcgcttgtacacccaaaatttaggccaacaaactaattaccgtgctaacagccccgtgcgcaaactgaggacggatgccgggaattagtccaagtaagccgccaatcaaaaaaatcccccagctcttctcttccatccgatgcgtggccctggacatacaaggtttgtatcggatacgtacgtcctcttagacccctggattatagattgcgtgtccggatataggaggatgataacccggccagaacaatgactgaatcggctttatccggcttctcccgtgaaattgtttagaatctttcaaagtaggtccgatagaaccactgcatcacatggtttgtagaaatacccggagagactcggtaccttatctttgctctagtaatgtaagaggtgattggcccgatcccaggtccactcctgtagtctcaagaggtattcaacagtagtctattacttaatgcaatcaagaccccagcgtaagtctattctcctgcgctatagattgcaagcacgttgcaagcacgttcggtgcgcacgcttttgaaccgtcaagtcgctaaaaagcatgcattagcccatcggtctagctggtcattagttagtgcttcatacctaggcccctcctactactcccctatatatgttagccattaagaaaaggccattcaagaaaaggtctattatctctatatctgaactctgcaatctaaaggcaaactcatctgctcaagctcctacacacagtctaatgccctgaatggcttgtggcaatcaaacatctatcactttctcgatctgctgtcacggctttacttcgctccacaatccgagccctaacttcaccacgtgcgatatgtctgcataataaggagacctaagaaagtagccgccgttcaactgcatccattactagtatccacttttgaaggccattctgcaccctccagctgcttgatagtaagagcctaaactcagttctgcgaggccgttaccatgactattcagatcaggtaacgaccgcgtagtaaatcgtcagagcgcttatgatgagttagtgttctgacgattgggacaatccctgggtgacatgactcgccgaccgcctgagtcagagtccggcagcggtgcactagttcatgagtaagtagttcgcgactgactctgcatttctatgtcagtgcatcgacggccctagatccgcgcacgcatccttctgactctgtctttgtgactcttaaaaataaactagcaagttagtcaatatgacaaagtaaaggaacagtaataggactaagaatcctgcaggtgcaggaacgattgaggtctaaaatgagccagccccagcgctggagacgaggacagatccacttggcttcaggaacgggaccaggttagacccgacccagctggaagcgggccccggttttgtcagtgccatgtggcagactctggctaatatttccggttggagactcggattacgggagtgccagggaccgcgcgaatctagctggataaccggtcgtatgagtttgggggcttggaatgtgacacctggagtacacaaggtgggccgtatgaactattacatcacgcgcagagttgatggcaagaggcgttatatattggatccagctaccatatactgtttagctcttatgtccacttttggaaggaaacactgcccttaacggtaataatccgacagggtccgaaagcttgtccatagctttgctggactgagctgacggccgctgagttcagcatatatctacctagtacagatatctcgtttttatggtatgaatgtaatggctctggccaaaggattagtatattgataaatgctatatctcaaagcccaggttattaccttgaggttccactgacaccatgaaccggagccaggatcatcactaggctcaagggccaaatcccccaaggcatgactcctattctccatcagaacgttcgccgccggaatacccccaatctctgtatcatctcactgctgcgttaatgtcctctgtatgcttgaggatttaccgcgtcataaaccggcttggtagcaaggggcaactgagatttgatacgtgaagcaccatatgtattatgtctggcgtgccttttctcaagggtgaattctgtaaataacatgcggctagcatcaaatgcgaaatttgtgacggacagaattatagtgaacagcttctgcatatctttgtatactcttagtcccatgaacagcgccatataacttttcagatctcagcttgcctttatgaaaatgaagaaccaacatgtcctgactgaaacacgtacagaataatggaagaggtgcttctaatatgaaaagagtgttcttcccactcacctttgtcagctgccaccgatcacatccagcgatgtactggcgacggcaagaagcggcctaggatgtatgcgcctagtatcgtcccggttcagtgaaacaagatgatgtaagactatcaatgaagtttgaaagaccggtgaagtcatgtatttagagggctaggtctgaacaacctcctgccacgagagcagcaaagctcgaccttcgaagcgcagcgcatcaacatgatacttccggaccttaggtgaatcgggcctctttgaaaggctatacagacggctggtagaaccaccatgacttattggaataaggcagagtttctcaagtgaactcaagagattgtcaagcagatcacgcttctgggataggtgatgtgaatgacgaggtcattgtcaacgtgaacgagaaggttggccaagagtgctgagtgggacagctcaggtaagacggaagtctgtaaagcattgaatcagagagcaatgtgctctaatggcatttctctgttctaaatggtattcttggcaggtaagactttccgcatgctcgatgctataccaaaatatcttccaggctggcaatgcctcgcacgggaagacatcagtccaacaaagcaacatctttttgcagatagagcaagtatagtattgatgaatctggttcgaatttcgctctacagagtcgagatggcaatgttccccaggaattgaagacatttgtagattctgtacggcatcatttcacgtgtcgtaaaacacgcttctttgaagactctcaggcaaggtggccgagtggttaaggcgctgtgtttaggtattatacctacaaaatccgcagtgggaaacctcgcgagttcgaatctcgtccttgtcagtctttttcgtttcttttttttttttttttatctaaaattagcgccgttaccatccatagttatacccagataaaccattcaactcatgaactggaatactaacataacagttacatcccttaaggaacttacaatacaacttcagccctctaacctttcaaaagtaaataatacgtcttgcttacggttcggtctagacctgatacgcaacgtgcctgcatgctggccgcttagaagcggttagccctattttctggcctgtaaatgccctgaatgcgacgaaaaactcgaaattgaccagaatgtaccattacggaggaacacccggcctagcccttctgcttgacctcgatccttaaggccaccatgtgcttccatcttcaatcgttaagatggcacgtcatctccatgcttgatagcgcaggatggctcttcgtattatacgtagcaaacggctggataacccgcaaaccgcccaattgccaaatgtggcaaggtgtctgtctctacccaaagctgctgatttacgggatgacatcgatcttcccctaggaatacttcatactgtattctattaggaagagtattttcatgacaagggctgaattgaagacaatgagaattctatatgcaaactgaacaaattaatttgaggtcatagcgggaggttaaaagaatcctttctaagggaacagacaaggctttcgcgtcagaacgcccgtgaccttcgtgttgacaattgattagctgtccaagtgaggcaacaggcaaattctaccccgcctcagcaccaggatcatctcgaagatatgcagcattctttcgagctatcacggttgcctctttctactagggatttgctttgaaattagcctcgactctccctattgcccagttagtcgtgccaggagatgaacactttcaagcttgctgactacacaatcgcttggatatgcgccctggtgctggaggcggcagcggctcgagctatgctcgacaagatccacgctccacctcaacagatctctgatccgaatgcttatgaatttggcgaacttaacggtcattacatagtcatagcgtacctaccgaacggcgtgtacggaacagtgtctgccgcaaccgtcgtatctcgcatgcgtttgacctttccccggctgcagcttgggctaatggtggngattgggggtggaagtcccaacaagagcaatgac

SEQ ID NO: 3881 - DNA, 3757 bp, Emericella nidulans
acttatactcgtatatatatttatactttatactaactactggtaaatactggataatcagctttggattaatcctgtacttgctactttatatatctggcctgacttactaccaccctgtatatactgatataatatatatattgggcttgcgtgcgctcagactggctctggtggtaatattaacaatcccttgttatcagctactcggcaaatacttgataactgcctgactgatactggctctggcaggctctggtaataactgcaataatccaaaccctggccatggcattactgacctggctgcagatatctggcctgattagcactggcccttacttgtgctggtatgcctggctggctctgactgggcctgggctgcttctgtatctggcagctcttgctccctgctgggcctgaccctctgggcttgtctggctctgctggtgataattatcctgctcaggatctgacaattaatataattaaaccctaatcctgtgtcatgggcacagctagtaactagtaaataatatatatagattaggaaatatattgggttggttgggctgggtgacggaattatatatctgcaatagtataacacgtgggaaatatataatatgatgggaaggatgattggactcagatctgggtaactcctgctggctggctcggctggcctggtactagccatgatatattggatcctacaagttggcctgcgaactgcaatcattaatacccggaccatggaacgggtactggggctatgggtgggcttggtcccggcgctgccccagcatggcaatgtggtgggctcaggatgggttccccgccggcgcgagccaggcgccactttgacggggcatgggttgggcactttgctattgctgccctgctagctaccagtgcttgactggagctctgtgtgtgctacatggcatgcactgtggttggcttgatgggctcggcccaggcgcggtgccagccctccactgcctctgatgttttgctggcgctcctctggcattaaaccctaatcctggtgcatggctggtgcttccccggcgcggccccgagaatgctcctggcctgcttgtcccgggcgcatagccggcacactgctggtgttgtgccttggctggctcccccccagggctgccctggtgcgacgcgggctgtgcacctatgcaggctctgggctggtgccatgcaggcgttggcctggggttctgctggcgctgctcttcttcagtattgtgctgatctgtcatggcgcccagctggcgcctccccggtgcaatgcgggatatatgtattggctggcttgttgccagcatgatcgcggcgctgccctggtgtggccacctctagtatgatcctgatctccctggcgcctccctggctcttgcccagtatagcccgggctctgatccagtacctcctgttctccggctcccctgggcgctgtgctgctgatataaatcccctggtatgcccccagtgcattgctggcgctgcgcgggcatggcttgctgtgctgtcttgctggctcgtcccatgtacttccctggcatgatgctggcgctccgcccttctgctggtagctcgcgttgcaccagtcctgcccctattctgttctaataccagcttctccctgatactgtgctggtattctatatgccatagtattttccttgcactcccctgggttgcataggtgatgtgccttcttaggttctgtactggtactatgctggcgggttgtcagcataatcctggcagtgctctggcttggtgatattactagtatgtcctggcagtgtacgtgctctgtgctggcgctggcacttttcttgcattgcaatgacctgtcagtatgcctctgcgggctctccccgggcgcggagcccccgataccctggcgtagcgcctcgggcatgactttgccgcctccccccttgctcctccccggcgccatgctggctatgggcatgtgctgacttgctaccagccctgtacaggctttcctcaagcttgttcctggcacacatctagctctatgctggcttgatgctgaatccttgctggcaccccctgacttgattttgataattggctggccctcctggtccccggcgctgcgctggtgacatgccttcttggtctttgtactggtactggctccagcttgatcccggccctgtataggcgctgacagtttgctgtggccccttgcaggtattcgctcgtgctatgggcagtatacacatttggggcaactgataggctgaacccggcccttccctggcctgtgctggcagcgcgctgcagcagcctctggagggcctctatcagttactagcctggccagctccagcggccttggtaccggttcctacaagttctggccggctttggatgggttcctggagggcgctgcatcagcgctgtgccagctgggaccttgttgaatactagctctgcatgggctgggcgtgtactgcagcagttatatctactttgtatcagcctctattcactgtgtgggctctgctatcatgataatatggtgctgttattataccagtgctctggctagcagaaggatggcagggtagccagtcctaatcaatatcagagtggattattgtgcggccgatcacactacaactacttgccagctggcaacaaccagttacctacctctctgtggcagcgcaactccctttgcatcaatataatccctaatattgcgttgaagtctcctgacaacggtgtacagtatttgtgataatccaaggatagctttactaacctggcaatgttgggtggtgatgtatatattcttgtatagcatgtatctgttatctttggcatctctattactgtggcagcatgacgcccatagcctgcaactgctggactatgcaatggcctgactatgcaactggccctactataatagatatacttcagctgtttatattacaggctgatggttggtggggcaggatctgcactggatcaatctgacgccggcatcttagcattgatcatcaatacctaatctcacgacacttgtacaaagcttgtctgagccggcattgtctgcttgcatattataccctaagctaaataagatgctgatctgccggccaatacctcctgtctacatgttgcaactgtgacaacccttagccatgccttgttcacaacatgccggcatcaccccagcactcccccagccttgtgtacaacattctgaatctgccaatgccagttcatgcaagtatttataatatatatacaatgctaccaaccgagctatgccttgataattataatcttctcttcatattgccagtattgtaatcacgtcacgccggcgagcatgacaatatattatatcatcaataagcagaacctctgcagtttaatcagccagtagctgacagcaatgcaatgccatctatattttgcagcatgtttgtccagagtcagagctctgttgttgtcatgttgtcgtcactttgccgtcgtcgcattgtcgtacggtagcattaatgttagcattgtgctcttgcaccgtcagagaccacctttgcatgatcagaagtattgtatattgctcatcctcgctggcgcgtacacagcttgttagttgtgtagtaaataagcttattaccatactgttgctagggatgtgggtgttgccatggtgtggcttcagtattgcattataacacag

SEQ ID NO: 3882 - DNA, 2023 bp, Emericella nidulans
cctaacttggatttaaccgtcttctttcttttccggtaccttcggcttgtctttgcttttctcgtcatcggagcttgagctgctgctacttgtaccgtcgtcatcgctatcagaatcaggctctccatcccagacgtcaatttcaacacatctgcatccacctagaagtacctgctctgattagcggtttcattctcgaatacctgaaccataccaagacccacatcggtataagctttcgccgccgcatcactgtacagttgattccctgtcaagtatgtgttatggctcgaggagataaaataatctgtaatcggtgcagagtcatctggcgggccggcaggacgtaacgcagatgcggaaggactagccatgtaggcgtgaaacgccgctagagagctgagtgggttgttgtccttcgggtcttgatcatcgcgttggatgtccctactgaaattcgagctttccgtagtcaatgattggtatatctggtccagtcgagtcttgaaggggcccgagaatcccgtaataggcttcgttgccggagcctgggacgaaggatctatggcaatttgacccgttcgctcggttatctcgctgacagcggccatgactgtcagtatgatcggtctaggaagggggccactcttagctagatcgacttcctgcacgatggacaagttcagcgattagttgtctgggtttagtcgtagctgcggccgggtgctgagagcccgctatacgacagttgggtagaagtagaacgttgcgacttgtcgcaggagaacggtgagaggtggatgaaagagaaataaaggacaaagggaagttgagacagctgaagcttgaagggccagttggtcgctccacttatggcgcgtgcatggctcggcatgggccgtggccgcctgaggtcgccagatgatcatcctgggaggggcagccaaatgaaacggattggtatgtttattgtacaccttcattgtactcgaagtagttcatagtggctcattgagctggagtaaacgtttctgggcgaaaacggtggtgaaatacaagtgggggaacccttcctctgcagggtactgtgaaagctattcagacccacattgtgatcggtcgctcttttgacataaaacagtaaacaaccatcaaaaaagacgcagcatagaatataagcatacgaggtagctaagacggataataagtcttagttgtgtgtccagtggctgatcaattggctccccgctcatccgtcttaaaccgggagcctatcagcaaaccgctaccggtatatatatttggcgatggcaaggcagtgactcattggagatgaccctccctcctcaagtctgaagctgcatgcaactgaccattgtctgccatggcaaaacaagtcccagtgcacttttttgacatcttgtcaacccttcccggtacgctctttgcctcagtcttccgctagtcaagctgacattcaccaggaccgtgcaaagcatggtcgcccaacacatacaagacgcgcctcatcttgaactacaagggtatcccatacacgcagacctatgtttcttatccagatatcgcgcccctgcttaaagggctatctgttccgcctcacccgaagggaactgcgcctttcgactacactcttcccgccatctgccatccctccgtgaagtctacaccgtcaggagccatgaacgactctctccctatcgctcgtcacctggaagagcacttcccggagcgacccatcttcccgtcaggtgacgccagctatgccctggcggttgcgataaacaaactcatgggccgtgttggctttgcggcgtataggctcgtgattgtccctatcgcggacatcctcgacccgcgtgggaaagagtactatcaccgaacgcgctcggagaagtggggtatgccttttgaggagattcgcccaacggatgagaagcagtgtcaggagatgttagagacggcgaagacggagaaggcgcccacaggcatagccaaaacagcc

SEQ ID NO: 3883 - DNA, 4334 bp, Emericella nidulans
tgggcatccattcggatacttcgagatatactgggttaaagaagaccctttaggatcattgattgggggaactgataattacgaccgaggcattcatgttcttgttggcgagcaaaagtaccgcggtccgcaccgggtttcggcatggctgacatcgctggtccatttctgttggttggcagatatgcggactcagactgtgatgttggagccaagagtagacaataagaagtgcgttaccatgccagcttcattgccgcaaaatgctaatcaaacgcaggatgatcagctatctcgagagcgcagggttctacaaagacggcgaggttacattccctcataagcagtcggcgctgatgaaaatccggcgtgatacgtgggaggctccttctatctaatgttttacactctagcaggccctcacctcatgttagaccatgtacagggtggccgtccgattgcatactgtgcataatatcatctggctcaactcctcactatgatgtttccagtgagaataatatcctctttctattatgacttgtaatcatatccttccttcagccttatcgtttcacgacgacttgctgcagtagtttcaagtattgacctgacttacgtaaggaaacctgaaccatccaatagactgtcatttagcctggccgggttgctagcaactcaggcaacgcaggatgaaacagacgatgatatggtcttgtatgtgtcttttccagagcctggactggaagactcactttcctggacgctagtagcataaggtcggtgtaagagttgagaagagctcaccccccccccccatagccgccttggataagaaagcacggacaatcaggttggttgcaaaccatccatcccacctgtccgaatacaagtatcaacgctgctactcatgtctatcaccggaagatgcttagaacgatattgattcgtccttggaagtgttgttggcgttcggctaccacggaatcggcaacgatcagcgctccctaactgacgcaggtcaccttgttgaaactcgaatatgggactgtatagaagaacattcggggcatcaagacgtcgactctgcacagaatcgccttgctccaggattagctgggaagttgcgagcccgatgtctgattagatgccggtaactatcacgttctagaccaagggtgagttagacatgcggagaaggcagaatggacagaaagcacaccttaacgtgcacagaagtcattttcactcgattgcccattcaccagcacgtttgagcagcaatgcatcctgcgttttatgaacaatcagctcacaatcctgcagtccttagttacggggtgctcatagcattgcataaactgtctctgctcgagtcccgctccgtgtggtccgctggttcagtgcgaaggcagtttgattgtcttttggtgtatcaacagatggagtaataaagaagttgaatggccaaagactgaactgaccaatagactgagggtagctggcctgcaatgtgagtggctggagctcgtgtgacggcgtgcagtggatgcagcctgggcgcgtatttagaccaacagcagcgcttcttcacggcttctgcacaccacggcatctccaatcactgccttatatctctcttcatcaccccaatcatccgtcatgcctgtcattcaatccatatccgtaagggatttgcggcctcattttcaatcccaatccctcgagatgccccctgagcactcgagcagtcatacataaacccaattcaacgccgcatctatcgctgacgacgctggcacaccagaatgctgccattcgtcattctagcctcatctgggaatctcgtccaacgtgacagcgacaacctcctcaaccgtccgcaagagctcgatgagcctcttctcgcagtccaaatcggcggaatcgtaggagcgtacgtgatctttgtcgctatcatcctgaccctacttctcgttgttggccggcgtctgcgcagaacagtccagtcgtccaactacactctgcaggtcgagatgatgaagcccaaacacccaccaattgccgcaagtgccacagccaccaaatccaatgccgcattcaactctgtcgaccctagccctgttactccgaccaacaaatcgcacgggttcaggtcatggacgagcttgaccaagggccagcacttcttggtccaacaacggcagcgtggctaccatcgatcacgaatcagtcgttgcggctgaccggcgcagaaaccaggaccagatggagatgctctatgctgctgtgatggaacatgatgagcggcgtgctgctgccactgcttcgccggttagtccaacggacgacgtcagtctgaaagatctctcgccaaggtctccgacgagctatcaaaatgcaaaccccttctcggactatgctgcaagggttccagaggacaagcctctgccaccgcacccgcaccagcaaccacaacctcagtaccaccacccacccgcgcccgctgtcactgctgcttcacctcccacaagtcccggtggccgctcacgtacttcccgcctctcacgtatctcgaacctctccctcttccactcaaaccgcgaaggcaacaatgcctcgcactcgcaatctggaggtagcagaatccgctccccgcgcttcacaggccgcaaacacggccacaccgttggcatcaacatctcctcccccttggcctctccagaccctacctccccacattccgaccaaatccccctctccccgcgcttctacaaccccactcctcctcccctcccaccaaaagcagacggcccaatcacccgcataaacaccaataacaccacggcctcccaagaacgtcaacaccggactcccgttccgccaccactaaacctgcaggctgcaacccccacaagcgcaaaagcgggccggagtagttcgtctcttcccttccgcgaagcttatcctcaacttctctctgccccacccacaaagactaccattctggagaggcccgaaaaacaactgagcgggccgagaacgggtctgccgacgccttatagcccgtatatgccgtttacaccgctgacgccactgacgccaagccgtattgtgacgaagaagcagcgcaagcgtgaggggaaggagaatgggctgcgcgctctgaacgaggaagatgcagttaggagcgaggatgatatgtgggggtactgaatagtctacaccatctctctggttctagtatgttttgatgtcagtgatttggttaggcttgatctattaggttctatatccaaagaatgaattgctatttagtatctatctacctagatacgattcatcgactccgtagactcaagtactgttagacatctcgttttctccctcgtatttttgctctgccccatcgccactgctgtaaccatcaccaaccctaaccttaaccctctcaaggagccaacaccttgcaactccttcagtctcccaaactctcaacccccatactaccgagcgcgtcctgatatctaaatacttataccctagccatacactctctttccgcgcggtttataccgcgatgttatggtttgtgacagggagcaattcggggtttgttacaatacctacacgccagctgtgtcgacggctcatagtgccggctattttatgaaagcatttttgccctacccgagattgaatcgggtagaacttcttcgtaaaataatctggacgttaagaactattgcgagagccaagaaaaagctggcaaataacaatgaatttgagtcgtattgaaagaagagcaacggcggacgagcgtctcgtacggacacgatatgcagatatatgccagacattcagactagagccgcaggaggcttttgtggcattggcattctgttttcactaacgttgaaaatccactgcggttgattttgacttcgccttcggctacgcctgcgaaggacccttagaacgtccagccagtccatgatgatagtgcacacactgaacaacatctgcacaaacagaacgagcttcatcaaatcttccatgagcttccagtcgtcagccttgaattggtaggcctcatgagcccccgaccaagcagagatcgcccaccatccagctccaaggccaattatgtttagcattgttgcagtcccagagaatgagaccgcataccacacgtccataaagtcgtggactagatggctgtaacgcaacgaaccggtcactacccgtctcacccctctgtacaggttcagtgtgatgatagcgcaaaacgtcaggaggatagcgcggtcgaggtgtgagtagtctgactgacg

SEQ ID NO: 3884 - DNA, 5948 bp, Emericella nidulans
gaggagggaaggagatcaaggaggcgcgacgggtctcgcgatgggtcggaactccaactccacgattaaggagatgccaagccaggagctccagggatcggcgctgatcgagccacggtttgtaacctggtgtctcatgggcgaaggagattggaggactgtgagactaagtgacggcgaggcctcattattgggcgcagggggagtgggggatggggcgggaatgccttcaggagcgagtcggagcgtctacagagtatcacgaatatgggcaggatcaacaggtcacgcattgcatgcattatcaccagaaccatctcaagtagtattaccacagcaagcattcacaagcgagcatccacagaagcaagaccatataagcaagtaccatagaaagcaagattcccaatccagccatattcctagccaaaagtcccagtcgatcacgcagctacacctgctacacctgctcttctcccggcggcggaggaacgtgcgcaccatgggcaccgttccaatccccattcccgtttctagcggcccgactgtctcgtggcgacatcccgcgattcagcgtggtcgtatccgagtgcgaatgctggcgcatggacgaatcccacgaggtcggtcccggaccccatttcgcctcccactcattgaagtcctggcccgggttgacgctctcatacgagaagaaggtcaggaagtaatagaaaccacaggccagcagcgatccgagtagcgggccgacccagtaaatccaatgataacccgggaagctgcggttgatcacgtccggtccgagagaccgcgcggggttcagcgagcccccggtgtagtagtcgcctgccgaacgcattagtccaagatgcaccgagaacggtatcagggggaagcgtaccgatcatctccgtcacgaagaaagcgattccgatagcaaccggtgcaagaaaggtccctttgtgcttgacgaccgccagcatgatgatgacaaagacgagctgcgcggtcaggaacatttcgatgaacaaaccctgcgatatggatgcgcctcctcccagtctcgtcgagacattgagatcccccgggaacaaggcgctgactacgccggccgccgcaatgcccccgacgatctgagcggcaaagacgaacagcccgcggtaggcgggcatccccccaacgagacagagggctagggttacctggacgcgatctggtcgttagcaccgccgaccccttcacccagtagacggcaagcgtacagcgggattgaacagcagccccgtcacccggtaaaacgcccagatgttcaccataagcgagaaaccaaacgccagcgccgagtacagcagtgcatcggtattcggcggcgccccctcgaccggtttcggcgtattcgcgacttgggtgccggcaaacgagaagaacaggaacagaaacgtgccgacgaactcgccggtcatagcgattaaattgttgcgcgtcgtatcggcgagatgcagcatcggcagctggtttcggttgcgccgcacgacgggcgtatcgccctgggtctcctgccttccccagggcttgaggatgtttgggatgcgggagcgcattgtagagttcaatgtatagttcagattcaatgggtaatattctaagaatcactgatattcgtctatgttgcaacgatctaacgagcaggctctcgtttccgctgccatcttatgccatcttataccccgcgttcgactcgggagctgtctgcaacgtcatgacttgacggtctaggtgtccatagctggtcctggaggctcttccatcgatcgggcccgccaactcttcgccatggctctgccgcttcatttcggctgacgtgagcgttgagaccgtggatagcgggcgccgcgagccctggttgtacactggcgacaaccccggtaaatcgtagtatcgcctccaacagcagcgcgtcgatatagatagctgccgtcctgcgattcgtcggtgcccgctgataaggttgttgcaacagccagttgccgtgcataaccactatcaagccaactctatcgctctcaagctccccgctcctagcaggggtcgtgcattatcacctcctggaggccccgcggttcgttgtcgtcgttattgttgatgttgatgttgttgacactcgacagttgtttgtgaagatcttgccaggctcaataatggcaaacagcctattgggcctggcctctgcactccgcggagaaatcttgcggggaccacgccatcgatcatcgaatcaccgcggaaatgctcccacaaaatggcgaatgccgggataagtccgtcctgcagaaaattctatactcccgacattgaaagcaggacagtataaatacggccggttgcctctggtctgacgatactcttcttcataagaatatcttcagatttctgagacacagacagacagccatcatcatgtccctttctcccgaacaaatccagctcatcaaggccactgtgcctgtgctgcaggagcatggcaccaccatcaccaaggtcttctacgacaacatgctcactgcgcaccccgagctcaaaaccgtgttcaatgtctccaacaaggtccacgggcaccagccgcaggcgctcgcgggcgcgctcttcgcgtacgcgagctatatcgacaacctgggggtcctctcgccggccgttgagcgcatctgccacaagcacgcctcgcttgctatccagcccgacgggtaccagatcgtcggcaagttcctcctcgaagcgatgggccaggtgctcggtgacgcgctcacgcctccgctgctcgaagcctgggcggccgcgtactggcagctcgccaacatcatgattggcaaggaggccgagttgtacaagtccgccgacgggtggactgatttccgtgacttccgtgtcgctcgtaaagagcccgagtcggacgtcatcacctcgttctacctcgagcccgtggacggcaagcctctgccgtctttcctgccgggccagtacgtctctatccaggtgcaggtgccgcaactcaaccacgcgcaatgccgccagtactcgctcagcgaccagccaaagccaacctactaccgtatcagtgtacgcaaggaccttggtctggatgcctctgacccgtccgcgcccgcgcatcccggctacgtctctaacatcctccatgacaatatcaatgttggcgacatcgtcaagctcacccatccctatggcgacttccacctcaccgatgccgccgcctcaagcccgcttgtcctgatctccgctggcgtcggtctcaccccgatgacatcaatggtgaacacgctgcgcaccgccgagtccaacacccgccctgtacatttcatccacggcgcacacacgtccgcatcgcgtgccttccaagcacacctgcagtccctccccaacctcaaaacaacgtacttcctgacggctccaaccgagtcggacaagcaaggcgagaactacacatacaagggtcgcgttgatctatccaagatcgccgacgaggatctcttccttggcgacaagcagactgagtactacatctgtgggccgacggcgttcatgctcgatacacagaaggcgcttgtggccaggggcgtggaccagagccgcgtgcacatggagctttttggcacggctggagtgcccttggtttaaaatttgccattacgggagttttaaaacttttgaggccaggccagacctcaattcgtctatcagtggaggctgtggccgatgctgtgtgaggcagggcgacgtgtgacgagagcaattcttctgatttgactgtattttttcgtaatgatatcccaatcccgactctgttatgtaattagaattttgcccagccaatgaataatactctctcctcttgaatttggtttcacgagtcaatggctcaatcgcttgaaggacgcgaatctccgaacgtgccccgttgacgccggattgagcgcatccggaaccttcggccgagctgagttgtagcacgctgaatggtcggaacgcaccgggtcagtccgggagtgggccgtaatattccgatggcataattcataattactcatcaaatagagattactgcattagtttattcattattttattcagctctgtttcgaaatacctcctacccgtctgtcaacagacacgccctcacaagatggcggtgaccacatcggatccatctagtgcatccatctgcgtcaatctgcgttcatctgcatccagtctaaccagacaatgctgaccaagcatagcaagccgatcagatctatagggctgtccaacgtacgatgaatagcaaagcccgttccccgcaacaaaccccgaccgggtcgccatgcatatatctaggagtcggtcctcttattctggccgtatctggcagtgttttggccgtcaagactcaacgagatcgaacacgcgttgtcgctcagaccggccgacgcgcatgataacacaacttgtttgcgaccgccagccccgcgatgctcaggcggagtgagaaagagggcctctggcggttgctctggagtggatgatcagctcgactgtctagcatagtcaattgtacctctcaactggaatcgtcagtgcgattacctaggccggccaactaaacattttcgactgggagagccgcgacctcgagtgggaaccgaccgatcaacttggatgacgaatcgctctatgttcgatcgcttgcactctgacctttttggtctttctgatctctgatctgttcctctgccggagtgcaggtcggttctgtaccggacaatggacgaccgagtcgatgccaacaccagccacggagaccaagaatcgcgaccaggtgacctccatcgacggacctctattcgaatcgacggtcggatcacccggatacgcctggccctgatggagacgctcggctcggttcgcccatccggcggcaacccatggcccgctcgttcacgagattaggattagatcggaattcaacgttgagagaatgtctagcgcggggaaaactccggtcgcttcgctccgatgcgacgctgcagccttcacggcgcaggtacccctagaaggtcagaggagtcagcttctgcgcgacgtgcagtatctttcgactcaccgtctgcaaccgaagagctcggcaggtgatgcctgaagaatttccgtgtggtcccctgtcttttttggtatattttttagagcggcagatgaggcactggtgcagcagcttctgcagtaattttacccgtgcaggtgtcaacggggctctcgacggcagatcgtcgtctccgcagtaactaccactagtctaacggcgggatgtgatttccagagtgcgacctctgtgtttcggtccctctgagtggccgacatagacagatgcgatctacgtaaccgcaagagcagcaattctgactggctcatccgttgtcctgtctctgttcgctgaacattagctggcattggctggctttactgggattcgctggcgttaactgagcataggatgaacacagatgaggcaactgggctaactaggcatatgaggcataaaggcataatggcatactgcgaaaggcataactgacccggatgcggtatcaaacaggctgagacgtcaagacgctgctacggccgcgaccggatatggttatatccggccggtcagggtccagctccaccgcgtctgggagccgtcttccgtccagaaaagtcgagtcgagcgtgacagctgatcgctgaggtgattcgggagaccctgtatccgtcaggccgcgagcccgttggcgcggagggcgcctatgtgcttgcaataccgggttcctgttgatgtcagaatgccgccatggccgatgtaaaactcagttttcgatgtcggtatctcggtcatgacggaggtggtcggcggcgat

SEQ ID NO: 3885 - DNA, 660 bp, Emericella nidulans
gcattgcagagtgcagaaatatgatattcctgcgctcgtcagtatcgcagcgcgtccagactgttaggggaaacgacatccccatcctcaaccaccaaacaatccataagagcacgccgtagcgcattattccgtttcgcagatccgcttaatccttctctgacttgtaatatagcggcgagatcattgcgcgaagccccatccgactttaggccgaggaccttaaggagatccacgattgacgacctccagtctttggcaccaatttgccggcctctgtgctccagtagatcctcgagctttgggttacgggctacggtagatgcaggttgtccggcggtgccagacgagcttacatctctaccgctcgtagaatcagaaggcgatatcctagtcaacaggtccttcgcataagccgctgccgcaagggctgcataattctgccagcgatcgttcttgtgcgagtctgcgtaatcactgataccccgaataacgagagaaggcagggtgggcataacgccggctgcttccatctcgatacaatagacaccgtatgactggcgcaagaactcccgtttctccgcgcttttgacgacctggttgcccgatgctatggggccgtagtggacatgggggacaagactttcacgaggagcgcga

SEQ ID NO: 3886 - DNA, 4393 bp, Emericella nidulans
cataactagggtcgcttgatgccgttcatgtcaaataccggacttgtcgtgcaataggggctcgtttccaaattcttgtccatgacctgtggggagcggatggtgtacagggcagcagcttctagtaccctggcgatgctggcgatgaaggcgactgggtccactttgacgatttcatgggccaaggtattgcattcattaagaataacaacatgcaggacggcctagagcttgatctttggaatgggcctgactcaaccttgttctggaacacagattactcacaatacctcgagacctggacgcgcatgtgcaagcgcttcaagtaagtttcacactttctagtctctctagcctaacaaatactggagctgtaccttgaggattgtcccatcatctcaacttgaaaaaaatactctgcaactacgtcagcagccaaaggcgcatagctgcgcgtaaccgacagataaattgataagtggatcctgatttaagctattcaaaaagcatttatctgttctttaatctcctgcattgcatttgaacccactatagaccccctcaccaggatccactcctgatagctggcatcaatccttttgcccggccaacttgtaccaccccatgaaacacgtctcttaatatccaatttgtagtgatcctctatcgggactctaaccattccataattgctttgggtcaagacctaaatttaaagtggcttgcgggtgttggtgaacactctgtaataacttgaagcatgtatcgtgtaccaactatcgtcgacgttgtagtgcctaggtagcattcgtgtcgaaagtgcaaatacgtaaggtggcaaggtagtgcaagaaagagtaccgagaaggtgctattgacactattgatgcctaccatgcgtatggaggcgaaagcaacagtagcacgtcaactcaaggtccaattttgagacctaccattacgatggctggttacgagccaatagcatccgcatcccagctgcagcaaaggacggcttggctccaactgggaatttaaggcctacactttgtcaagagattggtcgccttatttttgggttcctatctaccaggcatatgggaaagagagttccttaactgaacgctcttcctaacagcggcgcctctcgcaaggggtcgcgtaatcgccctttaccacataaccacgtacctttttgttttcttgtgattcattttcatgaagttcaatcttcatttttcgtccctttttccgactcttaacttcctccagcacgggaggccgcaacagaagaatgatattgattgtaaagtgtttattatctcctctggttatgtgaataggcatttagttgtagtcacactagctgtcttttgcctggattcgtgatgccaacctcctttgccactactatagccataccttgcgtaaactgggacccaatagacaggcaatatgtgagttacaactttatgtttccctgggcacatagagcgcatgcctcttggaaaatatccccggacgacttgccaatgtgagatcctaggaagctggctttttgaagaacaattatcgctagcaatcactaccatgctctgttgaatatctataatgaaaatactattgagatattcgcttcatatgaaacactaatagcagtaaggttcgtagcactcattgtatagagtctagtacttataaacccatctcaccacagcctaagactgagaactgcgccaccctcaacaaaagtcccgttaatgggccctgcttcgccacctccagttgtaacataaagcacatttctatccttcgctgttcgtccaaaaatggcagacgtcggattgggaatagagctagagttcaagcttccggcaataacttcgctattcctccacgagaactttgttatcttgttctggtatgtgttggccaagtatgcaattccagccggagttatggcaaaatcgtccgcttcgacactatcactgatgatgtcaacagggctagtcggacggccagaaactggatggagctggactcgacagaagagattctttggcgtattggtgtagtaggcagtgttcccaaacacttgtaacccattgatccccagctgaacgtcattcaccggcaccggttgcatagtttcgtccttaagaacggactcataggctctagtcttgacatctactcgccagatacagccgttggtggaatcggcggcgataacaatcccattcgcggggttcaatgtagcaagtccattgagctgtgcttctggtatccttgttaatagagagccatgaggggtgtcgccctctctgaaattcaattcccagagagatccgccatctacgcagacaacgaaaacatccgccttgacttcagtgattccagtgacattggaatgaccctcgaaagcaaaggcgagccgggcagagctaaacgaattggacgggataatttcatggacttctggggccgtgagaagagtgaccagcaaattaccgttttgtcgaactgcaatgttttcagcccaggtgcctaacgggaactgggaaactgtggacggctcaatgccggaagtaccgcgacctttcaatgatgaaattgggggttgggctagacagcctattataagaaaaaaggcaagaaactcgtacgccagcatattgagacataaaaagtagcttaaagggactcttgacagattgcgaagctgaatacttgaccgaggaagggagacttgctcttatataatttccctaagggccggatttgctatgctaataagtttggtcgtaccttgaaaaccttgggctagactctgctagtggttaagcgctatcctcatggctgacaattggggagtccaggttggcttatattccataatctgattatatacgcctgcacatggttacttacatttataggtcttatcagatacacggtgtattgatgaacctcatttgatgtttgtattatgtggactatcgtggtatcagcgccggcttcagccatgcgaccaatttctgcaacgaaaatagaaaattgaacttgataaaaagggttgaagttaataaacagtcggtgagaagaaatcaggcggcagatgagaccgtgcgttaggcgaccagcgactgtatacgaaacaagtaagtgatgcggtcagcgatgcggctgatccacacgcaaaagctcgcaagcagcctgttcctccctgctcgctcagagttcatttggactcatcgctcacacaccgcgtttgacgctctgggcgtagcagcaagcatcatagctgcacttgggctatcaggagacgcagtcgatgttcttcgaggcacaaaggatggaggagagagttgggaaacgagttgcctgttatgatatgttgcttgttaagtgatcatcatggaccaaagccagcactaaatgacgctatccgtaatatctaaccggatcatcggcgagacttacccctacggccaagagatgcgatcctccgaaagttggcgccactccatcagccattcattctgactcatgagcttaaccagcagctatatcctagaggacttcgtactattgagctgaatctaatagttattttttgaagatgtaactcggcagcgaggtcggctatataaagccttcctgatcattatgtaactagaaactccaagctatacgttctgagtcgtttgaatctttttagtggtcaatccccaatagtcatcgcctcattgtagctggagaaccccgatattaaggtaacgccttaaaaggattgccgatggtgttaggtataccagtgaagatatataatgtaacctggcaacaaagtcgtaacaaagtctatctgaaaacagcagataagcccggtggttgcactgatgtagtatctcctggaagaagtctcttagatcttattgctcgtctggagcttgttcgagcgttcgcccgaggcttttgattttcaaagtctagccatagcggcatccgtgacacctaaaataatatgagatgcttctgagttattctagctttcattatataaatttattcttaccatactaataatacctcttatagatttagttataattctttagaactacatagctgcttctacaatccaaatcttgatgaatatgatatgtaatttgtataattatatatgctgcaagacttagcttttttatggagtttactaacctgcgggttagcaaaaacctgcgcggatagagggtttaaatccctttctgttgtgcaaaatgctacatttagagggtataatattgactggtgctatgctgctgagtacagagatttcgtctagtatacagggatctaaattgcaaagggcgatgaatttgaacgtagttgt

SEQ ID NO: 3887 - DNA, 8335 bp, Emericella nidulans
tccatctacgtagatggattacattgagctctaccgagactgtcatgtactttctcattttgatggactatagggcatttgtgcactgaggatgacggagcagagctttagatgagaagcaggagacttatgcggttgaaagaaatgtttccaatggctggtaaagctagacagtacccgttggtcaaagatacgtactctgcactagggtgttcaagatcgaattgatgatatgccttcccagaggtctctccaaggtctaggatggatgaaacatagcagcctcaaccataacggtctcatcgttgctctggtcatattctcaaggctaacaagctcgcgtcttacattgtaggccaccaagaaccggtctaaatgacggaattgtgaggaattatacaagttatatggaacatgaaaattaggaaaagaagggtgtgacatgagaagctgactcgtttcatgctgtgattatcacgttggtcattgcaagtcattatttcacataataatacaatagaatcaagcccttagaccgtccccgtcgacaagacataccctgcatcgacaacgatcgtctgcccattcaagtactggttcgtagcagcaaacagcaccgtggcggccatgtcctgatgcttgcccggtcgaccagccgggaccttgccttcatacttctctttgggaagcgcagacttctgcttctcgtcgctctcgctcgctgtcatctcactgggaaagacaccaggagcgatgttgttgatacgaatcttcagtcccgagctcgcaacctcgtgcgccaacatcttggtcaggtggatggtagccgccttgcttgcattgtaagcaaaatggtgctgcgaggccttgacaataccagaaatagatgagatattgatgacagtcgaggaccagccccgctgggcatcagtggccttctggagcagagggaggaaggcagtcgtcgtgtagaaacactgcacaacgttcgtgcggtaagtcttatcccactcctccatggaactgcttgcgtcctcgaagagtgctttgcgcaagtcctccggtgtttgcttgtccgtatcctgcgttgcgctgctaacgcccgcgttgttgatcaggatatccaaggccttttcattgctcgagatctcctcgaccaatttctcgatcgagctcttatccgtcacgtctgccgtaagcggaattatctgcccgtcgatgttcttgctatatagctccgcgacacggttgagtttctcgcttgtgcggccggtgatatagacctttgcgccgttctttgcgagcgcctgcgtggccatcaggccgattccggagccgccgcctgtaacaagggcaaccttgcccttgacgctaaagagattctccagcttgaagtggtcgttgctggtttgggcagacattttggcttcagtcgagacgggtcggaggatgtggtggtaaggtgtcggtaggggaaacgaggctgtggaaagttttgtcgtgattgtagatctcgatatcgaggtgcagggttttgcttggaaaagagagcggagcattatatcgaattaaggttggattgaggatggttgggaggtttatatgcgggttttggtcaagctgaaggtggtttcagggtgacgtctacagagcacacagagctgcaacggaggtgtcatcatacatcctctggcgtgcaagtgtccaccccaccagtcaatttagccataatagctgttgtggattcaaaagtggctactaggacaggtggacctggaaaacatccagacctaaggggaacataacgcggtgtttgttagggcttgccgtcatcaccatgtcatccaggttgcctgaccacaaccctgtttgattcctgctcactgatgagatttatggaccatcgagaagtatttttgagacggagcctctcttcctgccttgtatcacgagtctagagttgcaaatgatgcccgctaaccaaatatgacgtcatattggttatattgtatgcctgggactaagtacactaagtgtgtctgaggcgaccctcgctgcagtcctcgagatgttccatcgaaggcatctgtgtaaatttgagaatgttgctagtatcctacagaggtcgaataaacccctgtggagtcgtcagtactagtacttcccagcaggtatatatcaactaccgtcagttacccactgtataccccgtagtcttgacgttgttgatacgttttctatagaggtgtggatgaggatacttggtacattggtccttgtaaatggctgaagatatcaaacaagtcagttcacaccgtattactattttgtattgctggtatcccatgtctattttattatacacaacaatgccccacacatgcaaaagccaaaatacaaaaataaatcatgcaaacgcatacagcgcgggatatctcgagaaagtgaaagctccatcacagcatatcaaatgcctgggtggacagggagatgaaacgggattagaaatggtatcatgcaggaagtgatcaaagaaaggaagggaaatgagagtgaacgctaagccgctcagaatgcatgcgaggtgggagtactcgagccgtgagaaacgagaatttcggcgtgggaacttgtgattcatatagggttggtggttctggtccgggttatattagatataatttgcgccgctatacttcgcgggcgtattcattggcctggtcgtgacactccgtacggtccgtggaagatggctccgcgcggaagaaataggagcgacgtcgcccagtgcctgttgaacgtctttcacaggtgacgatggtggagacttttctgacaacgcaacttgcggagagcgatcaacgaatgccgaaggaattttcggtaggggaatgtttggaggaggcgcgcttggaggaccggcagtgagcccagtcatgctcttccgccgcgccatgactatagacgatggacggcttggctgatctgtcttgctgggctgatcagagtggttggacgtattcacgacttgggcaatgggcataggttgatgcgaggcgcttggtaccactggtttgacactaactcggcgaggcgaagttgattggcaaggcagcattgcaacatgctctggcagatgcgaataacgaagacggctgcggtcgcgttctcgaggcacattcgcaagcgtatcttcggaatttgacgtacgaagtgacttgttgttttgatcccgccgttctgccagttggcgctgctcgcggttatcaagtggaatagcgaagccgtctcgactgggagattgcggtggagatgaaaacatggacacggtatcaattgaggtatcatctggatgatcaccttggacagacggcagccgaggaccctggtgcctatcttgtcgagctgcaaatcttttgctaaaaagtggcacactaaagtttggagccggcggcgaagcactccgaaaatgtgcctcagggaccgccgactgcgctctaggtatctctgcggcttctgaacttgtcgcctgaggcaggaacattgattgtcgctttctcggagtcgagaaagtcgggctagccggaccggcgacagacaacgttggctctgcaatgatgctgctgtctggaagagggggcgatccaactgcggcataaaagcgtgcgggctcttcttctgtctgggccgtggacaccgagcctgcacgcgactcgggcttagggtgcataaccatcgaccggcgatggagcgaaatatacgaactccgacgagactgatccccaacgctagagtctttgtcctcaaagttcattgattgccgcggttgcaggtagaccgccgagaaccggttagggtccttcttcaccatctgtcgcatgctaggggtggtccgcaattgactctccattccctcgtcatacaccttttcagaaacgtactttttaccgccccgagtctctatttgagcgcggaccgccaataaccaagaactcatttcctccgggtcattgaacacaagaagcatattccgcgctaatcgccgagcgtgggacctgtgaaacccaaaccgcgagagaataggcctagacgattcggcggaagttgtgctactatcctcctcagaaccctgggacacttgcagcacccaatgcttgccgggaattgcgtcgctggcaaacgccacggactttggtccgagaagaagcatcttttcgggtaaccggtcgtgtttaccctcgccagcgtactgcagaatatacccggatgtcgcaataataaaggttttttgggtccattcgcccttttcgacgttctctgacagagcgcgtaggtatttttgcttctccttatcaagcttcttcttccgcgttgtaggttcctccacgggttcctcattcgccggttgactggcttgctgatcattatcccgcaaattcgcttcccttgccctgaaagtagcatgcaggcgcatgatggaatcgctcgacaggaccggagccgggagagtagcatgcttcagtgattgcggataagctttgaagagtggaggcggcttccacgccacatcttctgcaggtaattgatcctcttcatcagtcttcgttctatgttttggttgcaacttggaccgtggtgtatttgtcggcgcagtgggcgtggcgggagtaggagcgacggaagctacagcagcccgaggtgtttcacaatcctctgccttgggcgatgaaggcaccgcttcctcggctcgagactcgttcaccagatcctgagcctcctcgatgcccgaaagcctgacgtccgacttccgagctggtttctcgcgactgaagatatggcgcaggcttgatctggaagattgccgcttaacatgcggcgcctgcaagggaacccgctctgttttgttgttctcaaaatctgaaggccgaggacgctgcttgaggggcgatgcgacattgacaatctgagagttaggacggctgaaattggtttgtacatgcaagggtgctacttgatgacctctccgttcgctgacagacggctgagatgatttggtgttgagggacatcgctctgacgttttgctgctctccccgtcgaccgacgacctagcgacggaaattatccttataatactcagcaggattgggagggagatatatcaatgctgacttcgcgcaacatacgacgtcagttgtgcaaggtatggccgtgaaacaataaaaggagtggttgagatgatccgtaacgatggcggcagaagtctgaatgattcatttgagtaaatacattcaaagagcgatcatagatatcgtagacgggaacggcgcgaggagcgagatgctcggtaacctggttagttaagggtatatatatcaagggaatgactggaagtgaaaatcgcaggaccggtcgaaagttgctggccccatgcgcgcgggatcggaagctttctgaaaaagaacgtgcacggtgcgtaaagcgtcggcgctggacgtgggcttaagtcgagaactgcttcaatcaaacgcccgtcctcaacaagtccattgtcgtcacttattcagatgccgaatgccagaaggagatgaagaaaagcaaaggaccgtgaggtgagtgggaaaacaaagggaggatagatgagagcgaggagcaggccagagggtgactagggaaaatcgcccgcctaggaggaccggaaatgagatgactggcctgcctttgtgctgaaatgaactaagcgccaaatcctatccactgccggggtgttgagtccgttgactagaaaggtgactaaattacttagggttatttgtgatcaagtctgaaacggttcggacgaatcccgcaagaaccgtgggactgagaccgcagtcgagatctatgatctatgggactcatggagccaactcacaaggcgagatggcccatctcgatttggtcttttagatgagaccatgagatggggactcaaccaaactgagtccaccatctgacacttcatggtttcctaacttgttttcgagttcggataacccctgaatcagctgtttctaaccccactctggaaaacggttttcggctgagagaagctctagagcagtttagccctgtgtgtgtcttccgcccaagccaatgagctagcgaaaatcgggaatagaaatggagctgctcgagaccaggctctttccggagtcttgagatcgcctgcgaaagggggatcagcatccgccacaaggatcatacgtcactcgcacttgccttgagacaaatcgagcacggatttggtgcttcgcatttcccctgtcatgtcagcccttgttccgggatagagaagaggtaagctgcaagtgcagagtgcagacgaatcgaagcacggagtctgggtcgtcaaacgtcaacctgaaactgaaaacggtaccacaggaatcgagacaaagtgaggctgactcatcaccctccgtctccacctcttccccataaggattagattgcgtgcaattatgcatacgcaaatatgtacaaaggcgaacaaaagtagcttgattacgataatgtaagtagcatccaccgatcccaaagcctacgtcgccggtccacacttctggccttggccttcctgcaccgcgcccatcaactctgccgcctgctcgcagaactgtgccattgagatatccttatcggtgagaccgcgaggatgatgagtggtccagtggacgtccacggacccgattctctgaagctcgccggttagcatgcgatgatacctattgctcaggttccgcgactcctgtgacttacgaccgtcattgttgcatggtgcttctttgtagcgctttgcgatgcaatcacattcaaaaaactctgcgatacatcagcttcaagtactgaaatggaggcgggtaagatgaagaagaagaagaagaagcttacgacggctttgaaataagatcgaaataagaagttttcttgatgccgatcttgtcctcatctaacctccacccttgatcctgcaatccattcagctgcggacgcagctgctctgggtcaaatccctcggcaaattgaggttccgaactcatagttgaagccctgcggatgctgatcccgttcttcaattgaggttgacgagagacggtagagggagcacttgctcgcagatacggcaattgaaaaggaagaagtggctgtcgagtcgagtaattgcgaagacacgacggacggaagcttaatattgaccttcgaaggtgttgataacctttaaaggcggggttcattttgcagggtgcactggttgagagatgcagagctcttccaatgacaccgcagtctcacggaatcctagttcgagtcacatgaccaagtgcacatctagacagtgagcgtctggcaataatccaaacatgagcataaccgaacatagaattatactgtcagacgtgaggctacagtatagcagacttgccattggcgagaagattcattacacaggtctcaattcactatgggccataagtacgtgcaatcaattaaagcttggtagctagaataatcagatgggtcaaaagccaaaggagcaagctgaattacagatcaagcgagaattgattacaatgcgccagtggataccaagcaagtcttgtatgcaatcaaggcatcacgaaaccatagcgatctgaatatggaaatgcgggaaggaccgcttgagaagaacattagacggattaagagaagtagggtaccgaagcatcccttcacagattgtaaggcaaagagaaacgcgagaaattgtcgacaaggagaccggacgagttacttcagggcagctagttgctgtgacgagaccaagttggaatatccgggtatggcttaactgattcggtctcacacgtcgaagtcaaatcacattcatcatcatcgtcatgattttgaatccttgcaattcattacacctccgagaagctctgtcgcgcagaggcactgcgcgaagtgggacgtgacgccgcgaagctgttctgtctgctgcccagtgtttggcggatacgcaagttctgttgcgatcgtgcaaaggagtttgccctcgagcctgtcgggacgcgtgaaagtctgccagtgtggattgcaccatggctttgtagttcggcctttgcgtccgataactgttgggcgaaaggcgacctcttgcggagtgtcgggccgtaccagtagatagcgtacacggcaatgaccaagaggaacgagatgcagactagaataatggttaggacattgctgctttccttggcgcaaacgtgaaaggggaatacttcagagaatggtagaacatattcgagatg

SEQ ID NO: 3888 - DNA, 3983 bp, Emericella nidulans
  unsure (1)..(3983): unsure at all n locations
caatcgactggactcaaactctgtatagcaggtttgcatcagaaaaattgaaaatataaatgcttctatctagtttgcaggataacttaacattcaacaccctgacagcgcagttctgtatccacttgcaccgctacatttcaagataaggttgatatctagactaagaaggcaagatcaaccaatattgtcactggtataatgcaagggttcacagtacggaagaggcatgaaatatcactgctgccaaacataaccagcttcctctgaatgcatgataatattctacttcgtgagtgccactttaaacatgaagctaatcagcaagtttatgatagagaaaaaacaaattatatctggctgactgacctgatattatgaatatttacgctacattactaagcactgcgatgaggggcgagagactctatagaatcatcggtccgtccggtaaaggcgacctcatctgaaaatcttgctctaatgagcagaaaaatcgctttatgcatagctgaataccttgatcaccactaaacgttgcattcattttttgtgtgagagcgacagtcggaattcgtcaataccgatccgatctcacctcgcttggtcgggccttataagacccgagccctccttcttactacggcagactgttacaagatttgacccctaacgttgccaactgacgccggcgccgaatactaacagctctggctgcagcgaggaaggcactcagcatgcactcttggtgcagataatgcgcgcgcagatcatcgttgatggcgtatccaaagacttgccggtaataaagggatcgggaaccactatagcaacccggtctccctatatctacagggcctacagtaccagctaaacgttattcctgagcagacgcatcagacgcgtttcaaaagactgagaacatcttgctctcgtcaaatgctcagctggaaagtagagtattaactgcccggcacagatatcctcttgtatctctaccactacaataatattctagaaggccctgtccatgattatgctcccgatattcaaccgctacgcatcttcttccgcctgcacctttgactcccccggctgggacctgctcctgtacccgagcaagtcgtcgacaagctgccgcggccaacgcagttcgggttatgaaagcagctaacagcaacgaggtggacagctttacgatggtatctaaagctctatggtcttgcgcgctaactgggccgcttggctgcctgatctgcacgcaatggtggagtgggaagcggccaggagaccatgtccctgaagacgcccgtggctgtgccttgccctgccagagtacaattggatgctaatcgacagctgggtcccgatgtatgatctccatggatgcgaattctcctgcccttgtggttctttgtcgagtagactgcagactgtggactgtatactgcatatacgccggggcatactttggagtacatcccagaacgagcaggcatgtattttggaatgtatagactacgaagggagtaaggagctacttggcatgataaagcatatgactgcgaagaatgacaagtgagcgactggtgcgaaacgctcggcgataccgcgaggcccgccccggccgtccctcagcgcagcgcgggcgcggactcgcgcagcagaaggatccatatctcgggagtttgtaaagcccgagacgatagtttgatttgccactaactgactataaaactgcttttaacaacaaaccgccgcctattcagtctgaccctcaatttcttttctctcaaagcgcggagcatcacaggacagatagcatatacataaatacgtgcacccaacaccggtcgatgagctcagtcgttgatacgcggtcccttcagcctccatacagccaggaagacggcttgactgtaaacaacgcagtcgcagaagcagacgcaagtatggatagcacctctagatcacccacacagctcccggagccgccgtctagcgcacagaatgccgagagcagtatagcaacgccgacatcgactgcgcagctgctgcccaactccacagacaaacaccgcgcgctcgaccgtagccctaatactaacgantanncnctgggcctggcccagcgcccagcgcaggccaagaggcccaggaggccgctcctgaggagtggatcagcggagtcccgctgctgctggtgaatactggagtaacactggtgatatttctgatgctgctggatacctcaattatctctacggtaggcagtcctgtcttctgtgcggagtttttgctgaccagagtctaggccgtcccgaagatcactaaccagttccattctctggatgatgtggcatggtatgggagtgcatatactttggctaggtatgaagtgttagcgatacaaacgacgcatcttggggctgaccttgacgccagctgcgcgttgcaaccgctgaccggcaagttttacacccatttcaagtccaaagtatgtaccctagcctgttctatcctaccactccaggccagaatctagctgccttggccgtgttctaacgcatctagatcgtattcctcaccttcttcggcgttttcgaacttggctcgatcatctgcggtgttgccaactcctctacggcgctgatcatcggccgcgccgtctcaggcatgggcacttctggtctaatcaacggggccctgacaatcattgccggcgttgtgccgatccacaagaggcccagtaagtttccaaacatcctacagtcttgcctacttccctggcggagggtgctcagctgctgacggtattgggtgtcgcagcgctgattgggatcatgatgggtgtctcacagcttggcctcgtccttggaccgctggtcggcggttctttcacgacgtacacaacctggcgatggtgtaagtcttcctatcggcgagtccgctatcggccattctaatgaagaaatcatctaggcttctacatcaatcttcccatcggcgggctggtggccatcctgctcatcttcacacgcgttcccgagcaacgcaggaagcctcccgcgctctccgtccttccaaccctacataaaaccctggacctggtcggatttgtgctcttcgctcccgcagcgatcatgttcctgctcgccctcgaatacggcgggaacgagtacccgtggtcttcgtccagggtgatcggtctctttgttggagctggtgcaacggccctcgtcttcctgggttgggagtaccgcaagggcaaagaggcaatgatcccattccatctgctgacgattcgcatcgcatacacgagctatatcgccacgggtgtgatgttcgggctggcgatggcgatcgcttactacgtgcctatctatttccaggctgttcgagacaactcgncgctcatgagcggtgttgatttcctcccatatgttcttggccaactcgtagcggctgtcatcacaggagttctcagtacgtaactccatcatcgcactgttcttggtttgttgcgtgcaaaggctcatagttgacactcgtatcagttggccgactgggctactacctccccttcgccattgtcggtgcaattctcagcgcagtcggctccggccttttctccttgctatcccccacaacctcaactgttgcctgggcggcataccagatcatcctcggccttgggcggggagcatcaacgcagcctgttcgtctactctcacccaaatcgaacctgagccctacccttgaacccttacaagactaagaggtgtatgctaaccagagcggccatgctagacccttctcgctgtgcaaaatggggtagcagccgacgacctctcaacagccatggcaattctcacattcagccagacatttggaggaagcgtgttcctcgcggtagcaaaagtcatcttctccgaggggctgaaatcgcagatcccgcggtacgcggggggtgttataacacg

SEQ ID NO: 3889 - DNA, 7310 bp, Emericella nidulans
tataatcagccagttccacgaatccacactacactacactgcgctacgcacgtccgagcgtccgccctccagccacagcccgtcaccagagtctcctctcgtgatagccgtcgatttcctcgttgaaaccagcgtcaatgcttttatcttccttgcgcaccctgtcctttgcaacatagcggtatccctctgcttgtttgtggcgtccaaccggtgcttcgcgagttccaattcagtccctggggctctggcaccccgccttctctcataagcgacacggaagtcgatcctctccagacctgaccgacttgcgagctcctcctatactgctgcgaacgcgccagcaactgagcgtcacgtccgaccgatttttaagtcctgtttctaccaatcgtttgcccgcaaatcccttgaggtgagctgccattctatatactttcctgttcctctcgcgtgtcgggggagatccgtgtttgcccccctgttacctcgttgggcttacctgctcggccacctaaaggccgtcttgctatggctgcaaggcaatgctctaactttcctattcatcaaagcttctttgtcttcagtttttgttaattcatcgcctttttaccaatgctatctcctgtccgcaaatgctcatgtgtccaggccgacagaaacaaacactcctaagagttgtcccgatccgccagaccgcattcgcccaccacttccccctcctgctagcgtgtggcatcttgctgcactggcatcgagaaccaggtccgagtacatgtggctttcttaccagtggtgacaatgaagggtttcagacagagagtggtgagtttgttgcgggtcacacagtttcgcgtggctgggctcgattacccatcatttcgctgagcgctggattatgctaaatgtcctaccccaaccagttgtcaaaaccgaaagataccaaatcgtcgaaaaagaaagaatcggcgtcgcaagcttcacaacagaactcggcaaacctgggatttcaccatggccaccagtccggcttctcccaaccaggtcaccccgacgtcgtctactacatccgtgaatgatattagaggcaaggcccctgaagatgcttcgcaagccggggggtttcctcctggtgagtatcctattgcgcgaagcgtaggtgtccttttcaacccgttactgacggaggttcagctactcccaccaagcaaggacaaccgatggctccaagtgtagtgatcagccctagcggaccggtacgtgcttgacgcgaagaaatcactcgcttctttgctctggatctgtcgagttcttccgtgctgactcgcatcattttgttgcagcacgctcctccgcccggtgccgccgagaccatgccaggagacctagcccctcctaggaagtcccatgtcttcgatcgcctccaaacaaccccgaaggatatgtcggagggtatacggactcccaagcgtcaacattcttctcgatttgatatttccgatcagcgccagcgagagctggagaagcttcctggctttcatgaagtgccgccgaaccgacgccaggagctctttatgcaaaagatcgaccagtgcaatatcatattcgattttaatgacccaacggcagatatgaagtctaaggagatcaagagactggctctccacgagctcctagattacatcgcaaacaaccgctcagttataaccgaaccaatgtaccctcgcgtggttgagatgttcgcaaaaaacttgttcaggccaatcccgcctccaatcacaccccaaggcgaggcatttgatccggaggaggatgaaccagtattggaagtcgcctggcctcacattcaggtcgtttatgagtttttcttgcggttcatcgaaagtcaggacttcaatacaaatatcgcaaaggcttacatcgaccatcattttgtgcttcaggtacgacatttggttttccttcagcctaacaccactgaccgtctttagttgctagagttgttcgattccgaagacccgcgggagcgcgatttcttgaagacaaccctacatcgtatttacggaaagttcttaaatttacgttcatatattcgccgatctatcaacaacgtctttttccaattcagctacgagaccgagcggttcaacggaattgcggagcttctggaaatccttggatccattatcaacggctttgcccttccacttaaggaggaacacaagttgtttttgaccagggttctacttcctttgcacaaagtcaagagcctcagcatgtaccatccacaactggcatactgtattgttcagttcctcgaaaaggactcgacattaaccgaagacgtgagatttcccagaagtcttccttgctacatttgactctaactgcgttcaggttgtgcttggtttgcttcggtactggcccaaaaccaacagtaccaaggaagttatgttcctcaatgaagtcgaagatatcttcgaagtgatggatccagccgaattcgccaaagtccaagaaccactattccagcagctggccaagtcggtcgctagcccccattttcaggttcggttaatgcggcgctctgaagatgctagccgtactgatatgtcttatgctaggttgccgagcgtgcgctttacttctggaacaatgaatatttctgcaatctggttagtgacaacgttgaggtcattctaccaatcatgttccctcccctatttgagaactcaaagggccactggaataggtatatatttcacctttcatttctatcatcacgctaaccattattgcagaaccatccacagcatggtatacaatgcgatgaagatgtttatggagatcaatcctcagctctttgacgaatgctcgcacgagtataatgaaagacagaatagcgccgagatgcgcgagaaagctcgacagaatcgatgggaaaaggtcgcggaacgagctatgcagcggcagaatggcgtcaacctgccacgtaactcaaccacagccgaaatcccgctgcagctcgatgacgtcgatgctctcactcaggaaagccagaggcgactccagtctctgaaactagatgaggccggttcgaaagatcgacggcctagagagggatctatcacttcggtaagttatcagcatgtttgatcgcttgctagccttgacgattacatctgcaactcccaaatgtcataacttttatctctgtcttctgttctccgctaagcgtttgtcgtttcatgtacagaacgcgtgattctaacgttggaacgtcctctattccagagacgacgccgtggctcccttgaaggcggcggaaggcgacgcagcaacagtggtagtggcaccgagattcgggctcggcgtcgagccgttgggtctgcagcggtcactggtttggcgcgaagcaactcgacgaaatgacttgctacttggatactatactccacaaactcctcatgcttttctcccggcgccactgctttcgatgttcacaccaccatggccctgcaccctctcatcgccccctctctcccatctcattccattatttcgaatccttctttatgtacatggctttgatattcttccgttccgcatggctggtcagatcttaagtcagcggagattctagttggactattagaactgtgttcgggtctggaaaacgggtgctaatggcgtttctcctaatcggcattgatgtcgacgacctgttttgatgtttataagatgaaatattcaggcgtagcctgcaatccacgttcataccatactcttgccttgaaagttgagtagtttattcgtttcgtcgtacctggcacgtgctttaagcgcagattcaatctccattcattgtttagacgcgtaaaatgatagaagcgcgcgccaaacgggccgtgagtaaaaccgagccgcgaaattgccctattaggactagtgtttctttcggggtctctggccatgcccgcgtcctgctagctgctctccgtcctggctctcaaaagcgtagatttgcgcgatcttgactctggatttgagccttcattgtcccgctcaacaccttccacgctcattcctcagcgttttctcctcacctctccgctctctaaatcgacttgaaccatcttaatatttaatgacttgacgaccccactattccagagccgcgctttctcatgcgacacttgttaatcccgtgtgaagactgagcttacctgccgtattcgccctccgcctatgcctaccacgcacacgcgaacgagtgctggctattgattgggagccggcctagtggcctggcagcttcttatttcaacctgctgtgaacccctctggcgagggccgcggtagccatggagcggaacattgatatttatgccagcaagctgggtgatgagaagctgggtatgtttgcgagtaacagttgcgcatttcgcaggaaatgcgagatgtcaacgtattatctgtgagctggagctgactctgttgtacttagatatgaaacttcgggccaatgttgctgtcgaactgcgcgataacatcgagcccctctgctcgccggccacctattcggtctttctatcgaagctgtggcctgtattcaaaaatatcttgagcggggagcccgtgttcacaaatgcgtctttggtgcaggtgagttgcgaggatgtcatccggtcttgatgcgtcgggaggatgaggcttacaattgttggttttgctagaaattacgaaactgcgttctcgaaaccctgcatcggctgccgatgatgtctcccgatgtcgaaccgtatgccgctgatatggttgatttgttaatggacctggtacggatcgaaaacgaggagaatgcggttctgtgtatgaaaactatcatggacctggaacgcaaccaagcaaaggccaccgcacaacaagtacagccgtttctcgaactgattcaggagatgtttcagacgatggagcaggttgttcgtgatacattcgacacaccaagtcaagcgacaccgtcgggaatgccttcaactcccggcgcctctgctccgaacttccagtctccccggcccagttcgcctgctgcctccgtccccgatattggctccgaccagcagacatcgaataatgttctcctcaaaggcatgcattcgttcaaggttcttgcggagtgtccgatcatcgtagtctctattttccagactcatcggacttccgtatcggctaatgtcaagctctttgtgccgttgattaagagcatcttgcttttgcaagcgaagccacaagagaaagctcatgcggaggccgcagcacagaacacgatctttaccggcgtttgcaaagagataaagaatcgtgctgcttttggggagtttatcaccctgcaggtcaagacaatgagttttcttgcatacctgctccggctgcaaccacatcagttgcaagattttcttcccaccctaccttcggtcgtcgttcgtcttttgcaggactgtccaagggagaaatctagtgcgagaaaggaacttcttgttgctatccggcacataatcaattgtacataccggaatatcttcctggataagatcgatcaacttttggatgagaggactctgatcggtgatggcctgactgtgtacgagacgatgagacctctggcttacagcatgctcgcagacctcattcaccacgtccgtgagcatttgactcgcgatcagatcaagcggaccattgaagtgtacactaagaatcttcacgatgatctgcctgggacgagtttccaaacaatgagcgccaaacttctcttgaacatggcggaaaagatatcgaaactggatgataagcgagaggctcggtacttcttgctaatgatcttggacgcgattggcgacaaactagccgctatgaactatcagtttcctaatattgtgaagcttcacaaggcctatcaagcaaccaagaaagaggagccagcgccagagaaatatcttgctgacaaggatcatcccccggaatgggatgaaattgatattttctcggcatcccctctcaagacatcgaatcctcgagaccgtgtacatgacccggtggccgaaaatatctttctttttaagaatttgatcaatggattgaaaaacatcttccatcagctcaagaactgtaacccggatcatgtccagattgatcccgcgaatgttccgataaactggtccgaggtgtcatatggttacaatgctgaggaagtacgcgttatcaagaagcttttccatgagggtgctcgagtgttcagatactatggtgtgacccagccagagccggagataaattcctcttctcctttcgattctctcactagccagtatacggctcccatgccgcgcgaggagaaggagcttctggaaagcttcgggacggtcttccactgcattgatacagccacttttcacgaagtgtttcatactgagatcccttacctgtttgatctcatgcttgaacatggcgccttgttgcacctgccccagttcttcttcgccagcgaagcaacctctcctgcattttctggaatggtcttgcagtatctcatggatcggattcacgaagtcggcaccccagatatggctaaagctcggatccttttgaggatgttcaaactgtcattcatggccgtgaccctcttctcagcccagaacgaacaggtgctccatccacatgtctcgaagattgtcaccaaatgtcttgaactttcagtgaccgccgaagagcccatgaactatttccttctgctgcgttctctgttccggagcattggtgggggccgttttgagcttttgtacaaagaaattctgcctctactggaaatgcttcttgagaccttcaataacttgctgcttgccgcacgaaagccgcaagaacgggacctctacgtcgaacttacactgacagttcctgctcgtctcagtcatctccttccgcatctgagctaccttatgcgccccatcgttgtagcgctgcgcgcagagtctgaccttgtaggccagggattgcgaacgctggagctttgtgtcgataatcttacggctgactaccttgacccaatcatggctcctattatggatgagctgatgacggcgcttttcgatcatctccgaccccatccttacaaccattttcacgcacacacgaccatgcgtatccttggaaagcttggaggaagaaacaggaagttcttgaaccaccctcccaaccaaactttcgaacaatacgccgacgatgctcctagtttcgacatcaagcgcattggccaa

SEQ ID NO: 3890 - DNA, 2682 bp, Emericella nidulans
ttaccaacatcttgatagaaaacaccccaacctagcaagatatttatcagtgcctggaacgaggggtcggtcacaattagtggtccaccgtcacggatcaggcgtgttttgcgcctatccgaattcttcaggcgacacagggtagtgagccttcctgtgtacagcggtctgtgccatgccaaacacctctacaacgaacaacatgcacgtgagatcatatccacgagatctatggactccataaatgcactttactcgccggcaattcctgtctatcagacttcaactggccgaccatttacggcttctacggccaaaggattgtttgagcagctagtcttggaacttctcacacagcccatcctatgggataatgtcgtccaaggcgttgttgaccaggcatacgcaacatcagcaactagctgtgatgttttggtcttccgcatttcggtgccaatcaacgatctgcggactgctcttggctctaaactgcaaggattcgaaacgtcaaccgaggagttgattccgtggattcttcagaaatctgatatggaaatcccgcgaggaactgcacagtcaaaaattgcgatcattggcatgtcatgccgcatgcctggcggagcaactgatacggaaaagttttgggaactgctcgagcaagggcttgacgtagctagaaaaattcctgctgatagatttgacgtcgagactcattatgatccgaaagggaaaagggtcaacacgagccatacaccgtacggatgctttattgatgagcctggcttgtttgatgcaccgttcttcaatatgtcgcccagggaagcacagcaaaccgatccaatgcagcgtcttgcgattgtcaccgcatatgaggcactagagagggcgggttacgtagctaatcgcacaccagccactaaccttcatcgcattgggacattgtatggtcaagctagcgatgattatcgtgaggtcaatacagctcaggaaattagcacttacttcatccctggcggttgtcgtgcctttggaccggggcgcataaactactttttcaaattttccggtcccagtttcagctgcgacactgcatgctcgtcaagtttggccacaattcaggtatggaggtttcacttgaattatagaaaaactaacgttgttaggctgcttgtacctctttgtggaacggtgatactgacatggtcgtcgccggtggaatgaatgttctcacaaattccgacgctttcgctggtctcagccatggccacttcctttcgaagactccgggggcctgtaagacatgggatgttaacgccgatggatattgccgcgcagacggtataggctcaatcgtgatgaagcgccttgaagatgctgaggcagacaacgacaatatcatcgggatcattcgtgctgcagcaacgaatcattcggctgaagctatttcaatcactcatccgcacgctggtgctcaggcttatttgtaccggcaagtcatgagctccgctggtattgacccgctggatgtcagctttgtcgaaatgcacggcactggtacccaggccggtgattcagttgaaataacttcaataactgacattttcgctccgatcactaagcgacgaagcgcccaacaaccactccatatcggtgctgtgaaggccaatgttggacatggagaggccgttgctggagtgactgccctcctcaaggtcttgctaatgtaccaaaaaaacgccatcccgccgcatgttggcattaaaaacagcctcaaccctttattcccaaaagacttggacaagcggaacttgcacattccgtaccagaaggtgccatggccgcgagtgaaaggtaaaaagcgctatgctgtagtgaataactttagtgcagctggtggaaataccaccgtttgcctcgaagagccaccgctcagggagacagactatgttgacccgcggacagctcatgttgtcaatgtctcggcaaagagcaaaatctctttcaagaaaaaccttgagcgccttgtcgcctatctcgacgcaaatccggatacctccttggctagcctgtcttacacaacgactgcccgacgttaccaccacaaccaccgagcttcagttgctgctactgatatagctcaagtgaagaagaagcttctgtcttacatagataaagttgaagcgcacaagcccattcccgccaccgggccgccccaggttgccttcgcctttacaggtcaaggtgcatcgtacaagtcaatgaacttagagttgttccatcactctccatactttcgatctcaacttcttcatctagacgctttggcacaagggcaaggttttcctagctttattccggcagtggatggcagccacgagaaagactacgctcactcgccggttgtcacgcagctagcacttgtgtcagtggagattgctcttgccaagtattggatttcacttggggtcaagcccaacgctgttgtcggtcatagtcttggcgaatatgcggctttccatgtggcgggcgtgctttccgctagcgatgctcttttcttggttggccgtcgtgcgcagctcctggaggaaaagtgtcagatcggcagccacaaaatgctggcggtgcgtgctcctttggctgatatcgagaaagccttagagggcacgaactatgaagttgcat

SEQ ID NO: 3891 - DNA, 1609 bp, Emericella nidulans
aaaggacacggtcaatcacaaagcaacatggcaataagatagtctgccccaggttcacggaaatgttgctggccaccctgtctttccctaccaaactctctgcctcgtcatattaaacgatattacacacgaagttacccattacgagaatattttcatattgattaccggtactgcaataaacttgaaggcgaacttctgccacgaagtctgcccactgcgggcaaccgtgtccattgaactcgcttcaccatgtctacggattatacctacgatgaacaggtacgtgtacagattgggcgcaaaatagcaacgtatatcccacaatctctaatacattcttaagggtcaattcttcccgtacttcgtcctgaccctgactggtctcgtcacctttcctctgacatacaatctcttgaaaccgcccaaaggtacggcattcaaaacctgcttgaatttagcgagttcaataagttgtctaactgacttcgatagacctagaaaataccgctccccggatacggtccgacttcaagcctgaacatgaagacctcattgaggctcagaagcggaaacgcctccgcaaggagcgccgcatcaagcgcatagtcacagttgtcttgggatacgctattatggcatacatggcttatttgattgtgattaccgctcgggcgtaggcgaagatctgggatccctatgacattctcggtgcgtaaagggtaagctctcagcccaatctcgtggtttttaacttttcgccgcatactgacagcctgtcttcagagcgccaatgaaagggcaattaccaaacactacaagcgtctctcacttctctaccaccccgacaagatccgtcccgacccagcgaagaatgaaaccatcgaactgctcaatgaacgctttgtggaactcaccaaggcatacaaagccctgactgatgaagaagttcgcaacaactacctccagtatggtcatcccgatggcaaacagagcttcagcatcggtatcgctcttccgcagtttattgtcaccgaagggaatggtaaatatgttcttctcgtctatggtggcttgctcggtgtactgcttccgtacattgtcggaaaatggtggtatggttcccaacgatacactaaggaaagagtctacgtcgctagcgcgggtaacatcttccgagaatacaaagatgacatcacggatggtggaatcgtcaacgccctttcctctggcgatgaattcaaggaagccatcccagctcaaaaagcagagacgggtctggcaaagcttgaacaaaaggtactagctgacgataacaaattcttgactgaccaggaacgggaagccattaaaggcatggacgacttgagcagaagaaaggctttggccttgttgtgggcttatttgggccgtgttgagttggacgaccccatcctaaatggaggtaggtcgctcttcctctcattgataagacattcactaagttcagtccagaaaagtacgaagtcgcgccaatcgctctgtctttaaatgaagccttcactgccgtttctcttgcctttggaaatcttcgtcctcttctcggttccttccgcacgtctcagaatct

SEQ ID NO: 3892 - DNA, 2710 bp, Emericella nidulans
  unsure (1)..(2710): unsure at all n locations
atagtctaagcgtcggcacttcgcccccaggcccccgatgagcgtaggaactttcggcacctcatcggtagatcacaagctgcatgctcctccccttgccttgaaagcgcgacgggaacactccctggtaattgcagctccggcccacgcagccagcagcaaagttgtgctgaagacattcttttgttcgactccagctccccttggacctccccctattctccgcctcctttgagtgttcttgctcgcccgagtcccaaagtgcatcgtggtaagccgctcgccaggccaataaggtgcccaacgatccagtgagagtatcgccctgtccgccactgcgcttcaggcctcctggtagatcagagacaatgctcgtgactccgtttgaaatgacatcgtgtggtcccttctggattatggtgacgccgcccagggcttgcgagagcttctcgcaggcttccgcttccttgcttgttttgtctccgctctcttttgacgagatttgggctagacttgggacctcgatattaagagccttggctaggcgactgaactcattgacgttaggcgttaggatacagtccttgtaccccttcaccagatctgggttctctgtgaccaggagcaggccatccgcatctaggacaaagggtattgagcgggaccgtgcctccttcatcacctctgtgactactttaagagtaacgccatcccgacctagaccgggtccaataacaagtgcatggagccgcccgagcattgcgatgatcgggcttgcaagagacggagcatcaatggagctggggtccttgacggaagcgctgctcggtaagatcgggtgcaccatcaaattgggtgagtatgatttaatgacctaggcgcgaggtaagccgctatttgagatgttgtttagttgaggagcctacagtagcagccgagctttcgcagataacatgactctgcgaaaaacaattagtagagcttagacaccacctgatgcactcgtaccagatcacaccctagcgcattattagcaatcaagcatcgaaggtcaggttaagcataagcttaaatacctagtctacgtgacgccatagcagagaagtatggtgcgcctgtgtagctttatgggttcagcttattctgcttgcaagacccacggagacgacatgacatactctagcgagcctccaataacagcaactctaccctgttgtcctgtaattattgccagatcagtaggttgtcactgcagcattgtcaggattatttacccttgtgaaatttctccagcattggaggaacaagcttgcgggctttttggaacagcaccttagatggcaccgagatatggtgaacgttagccatagttgcagagcttcccagcgtgaaccgatgttttggcagagtgtgagtatgagattatgtaggaaagaaaagtaataccccgcgaaacatgaagaatgtcanacggctgatgcgctgatgagccggtgatgtcagcgcctagtggggctgatgcaatcaggaactattcaatcttgtactccataggagacccagatatagagcaacctggaatcaagtaaacatcgcatctgtctactgatacgaaaagcagcttatgaaaatagttcaatcatgaaagtatctacatcggatctacccaagtaagaaacggcaacgcccgcataaccacaatgctgaaaggaacccgaaagagagaacaggggttgcccccatctatcaataccgtaacgctcgctgatgctgaagacatagaaacaagaatgaaaatcaaagaaaggagtataggggcagtcaaatgtaatcgaaaaaagtcacttctgcaatgcacctccgggtattccatgctgatgctccaatcccaaacttagcagtcaaacgattaccgataaaataacgaaaatgagaaggcaaggtgcagctggatagcggcaaaggaaatacacgctactggcgcttagaggccagcatggcgagtttcttgcgacgctccatcttttctctcttagctgcggcctctgcccgcatatcctcttcatcctcacgtcgagctgcagccagagctgctgcttcctcggcctccacatcatctatgcctgcctccatgtcagatgattccgagtaataatcatcatagtcatctgcgtaatcgtcttcatcctcttcatctgttccgagataatcgtccattctggatcgtttgttagacctgaattggcctcttcggacgccattccggcttggcaaattggccgtgccacggtaaaccggctccgtagatgtcggccttgcggtgccttgtaggttggttcttcctgctcgcgcttgattgaggggctttgcactaccgaccttggtagcagagacactggaagcagcacctgctttcttagctagctttgattccctctgcttcgcctgcgccttcataattcgttttttgcggtccatcctgctcaacttctgcttgggcactggctgatgtttgaacattccaatctgcgccggagcattctgctgggcaacttttgcctgcgccataatgtccgcgaaagaacctttcgcgcttgcttcgaagtgcccgtggagttttccaataccggcgcatggtgctccgcgaggttcatgcttttcagtggtgctgacttgatggaagccccgtccttagctgttccggacaagt

SEQ ID NO: 3893 - DNA, 2515 bp, Emericella nidulans
agcttgacgggccgagaagcaggcggcatttcgatttcagctgatctgctctgattctaaatacttcagatggcctgggagcaatgaatagcattcaccgaaactaaagcacagtgcaagctatgtcttctatgcaggtatgatggtgtactccgtaggtgtggattattgaacgtaaagataattggataccggtgtcttcggtgtttgatcagtcattcccagcaacgcccagtcggcgattgattgagcttaactaaggactgtcttagtcattctagtggtgccactccattccaaattagtcaagcttgctgggggcgctataaaattaaatgcttctttctctgttcgaagctcaccaacatatcagattccgcacttattatattttcctagccatatattgtcactatcatcacttagatctggtatcgccatggcttctgcacttcagactcccgtcccagccattgacgaatactacaacctgggatcgtttggccacaccattaccaccagcagcgccgacgcccaaacctggttcaatcggggattaacgtgggtatattcgttcaatcatgtagaaggcgcctactgctttgaacaggctattgggcacgacccaggatgcccaatggcatactgggggcttgcatacgcagtcggcccgaactacaacaagccctgggagaaattcgatctgggtgacctgcatcgatcagtgcagcggggttacgaagcttcgcaagctgcaaagagactagcaaccaacgtgaccccccttgagcaagcgctgatcgaggcgatgctgcatcggttcccgactaacgaaccggcaagggactatgcggctctcaacaggagctatgccaacgccatgaagctcgcatatgacgcctttgggcacgatctgaatgttgcagtcttgtatgcggatgccttgatgaacatgaacccctggtcgctatgggatctattcaccggactgccaaatcccaacgcgccgaccctggaggtgaaagccgtccttgagcgtgcgctttcgcaggaaggggacggcgcgaatcagaaccccgggcttctgcatctatatattcatttcattgagatgtcgcccagtcctgagctgggaatcaacgctgccgatcgtcttcgtgacctcgtgccggatgccgggcatatccaccatatgccaacgcacttggacattcttattggcgattggagacgctctattgcgtcaaactacaagtcgacccttgcggacgataaatatttccggagatccggcgccaagaacttctatactttctaccgcatgcacgactaccattccttggtatacgcagccatgttcgccggtcaatccaaggttgcacttgacgctgtgactcgcatggaagcaacagtgcccgaagaggttctccggattgagtccccaccgatggctgactggctggagcagttcatgcctatccgccttcatgtgatggtgcgcttcggtatgtgggaggagctcaagcgcaaagagctgccacacgaccagatcctctatgctgggaccacagcgaccacgcactacgcccgcggaatcgctttcgccgccacaggggatgttgaagcagcccggaaagagcaagatctcttccacaaggcatgggcgcgcgttcctgaaacccgccgcgcctacaacggcaagatggttgacgtgctcggggttgccgcagctatgctagagggtgagattgaataccgagaggccaactatgatcaggcatttgagtcgttgcgtcgcgcaatcgacctcgaggataagctgccgtatagcgagccatggtcgtggatgcagcctgtacgtcacgcctacgcggcgctgatgatggagcagggcaacctggaagaggctgcgcaggtctatcgggctgatctgggtatggacacctctgtaatcaggccgcgcaggcacccgaataatgtctggtcgctgcaagggtaccatgagtgcttggtgagaatggggagactggaggaggctgctgtgattgagcagcctacaaaactagctcttgcggttgctgatgtgccgatcagggcgtcgtgcttttgccgtttggacacgtcacaggcgccagaggttcttgacagctgtgcttccaaggggaaggagaagtgttgctgattggatatgattatcaccaaaacacgcgtgatttgaatagttggggctttatatccaggctgcttgtgattcttctggtacaaggtaatgcagcatgaattagcatttagccgtctttgcaacaacatgaaataacaggatatccgttaaactaacaagcttcagttctgtatatatacgctagccggtttattcatctctcagttgcgattgataagtctcttcagcgcacagggtccccttcggatgttaacctgtattcctgcagccaccaggtgccattagcaggacaggacataaaatcgccaatgtggttaaaatatcctttttcgc

SEQ ID NO: 3894 - DNA, 6242 bp, Emericella nidulans
ggcagaaggggttagatcgatacgaagcaatgaggctcgctgcattcatcattgggccaactggacaaatggcaattggtccaaataacagcaattggtccaagcgtgcagctgggactgttttgtacgggaaggatctcgccgggccctgttagtgcttactggcggcaggtagagggggcgatgaagaatccttctgacactggagatcccaagacgggcgccatagaggttattgcgcactgtagccgagggcgatggcaatagatatgcttctcgaatggcgctatttaacaagctatggtcgcccagccttgggtggctacttggcttgctacttggctggctacttggcatcgttcgaagagtctttctccggcttgttatatccaaacgtcgactgtcaacgttgcctgtctgcagccgcattcttagcacgattctttcgatcgcattggtcccaatctcgtcatgcacgtagatagcagggggaacgccccggtcagacgccgcagaccagctgtggcctgcaccgaatgtcgacggcggaagatccgatgtgaccaggcgacgccttgccgccactgtgagaaggcggctctgcggtgtatttataaccatttgcgtcccaatactagccaatccaagatcagtccacctacatcagcgtcgggattcatctcaggctcgcagctcagcgtgaatgattctccgcagttgccgctgagtaacgacaccaagtttcatggattcgggagtggctccctaaagagcgatctctcattggaatacgtgccttcagcactgccgacaagctcgtctatcttcgtcgagcccaattcgctctcgtccttgtcggagcctctagcctgggaaatcgcgcctccggagaccggggttggaatactggccgagtccgactctcctcttaacatgcagggccagacgggggagttgcgggaccaacataccgcgccatggatggaaatactccactgtgaccctgacgagttctggttcgattctgaagagctacgacggatgtggaggaagacccgcgatctcgagctcttgctagccacgtcaaagatgccttcggaatggctttattggtctccaggccctacagcacctgaagcgtcaagcctaatccccccacgagccacttgcgatgtgctgctggagctgtatgtcaatactttcgagtcggccattcgcatactgcacatcccctcattctatcaagagtatagacagtattggagcagcccggacagcatgagcgatgtctttctgtgcaagttgctgctggccatggcaatcggaacgttgttcgcccccgcctcgccatccgcaggccagttgacagacatgcggcctcgggcactggcgtggatgcactacggacagcaatggctttttcgcaagatcgtccttgacgcccagctcaacctcgatatcttgcaggtcggttgcctcctgcttttatgtcgacagaccagtcctacttccatcggtgatcggcatttctggctatcggaggactgtttagtgcggatggccatgaaactcggccttcatcgtgacccccacatccataaccctgcaatgctcggtaccgaggttgaagtccgaagacggctctgggtgaccctgctcgagctttcgctccaggctagtctagatgccaaacttcctgtcccactgcccagcgatggtggtttcgacaccgaacttccctcgaatttgtccgataccgacctaggttcgatagccacgctgtgcaaccctaatccccgtaccttctttacacattccaccatgcagattctcctagccgagacacagaggattcggattcgtatcctgaatctgttgtactcccctgccacaagtataccgtatcaggaggcgctgaagctggcatccgagcttaggcgagcctgcaataccaacctaagattgctgcaatcttttactcctcaaacaccgggtgcaatgatgcccaccgagttccagaccaagattctcgacctctggacccggagatttctcctcgccctccttactccgtatgccgatgaagcgcgctcggactattccttatactacactcgcaaggcccgcatcgatgcatcctcacttttgctgtcgtatcctctgtctcacagcactgccactggcccttctcccatcggcagttactaccttcagttgcagatctccggccaaggcattttcagaaacgttctgaaacaggccactgcagcaatttgccaggatcttatccaggagctggtcgaggatgcgttcccagtcacagatcgagagccccacgccaagctctgccaaattataagagactcgatcagcatttaccggacacgtatggagctgagccaaccttgtatgcaagagtatgtggcatttgtctgcgcatctgctcagattggagcattacgctccaggtgtgataacaaacatgattttttcccgacggccaaaaaggccctggggcaatgccaccatattcttgagtcaaaccatcggtccaatagcccagagaagtatcgcgcggaaacaatgcatgtgttggatattgatcaaggtatgaatttctggagcgacctactgtcaaccgcgttcgcttcgcctctctcacctccctcgtcttcttccttttttttggagcatggactcagccacacagtcccctgggaagctcctcacagtagagaagtcgtagataatgaaagatagaatggaaaaataaataaataaaaaatggaattcaatccaccgcagcatgaatccaggctttaggcactgtatcattacacgagtaagaatcgcagggatcactaataccctcaaaacgcaaaagactggcgagatcgagatcaaaggatcctatatgaaaacttagaaataattgtttttttcaggaactttattatctccaagagcggaaagcttaccgctggctgtaaggcaaactgagtgaaagtcagatcaggcaaaccccgagtggtttcaacaactgtgccagctgaaactcctgctattatacactcaaaaaatttgaacaatgggaagataagtagtcttgacaacctcagagccaaggaccaagataacgtccagccctagggaacccttgaagctgccggtaccagaaaaactaaattttgaaaaaatcatctgctagacttgccagtaaatccaagctattaacaaataatacaatgaccattgcagactcaatagatgctttaagagaataatagaagcaggggcttttccaagcttgtaacataaatggcgcatggaaaatcaggatgtatctgcggaactctatatcaaagaagtgtttgtgaaacctggttggctgtaaaccatgaccctgatagtgatgttgtacaagactggctaaaattggataatttgtgacaagcttgtctcatatctgtggtgagctgcaaagcctgttgataggacttctccccaggactcgccacaaactgaacaacctctatgtgaagtttgaatgagtttgaagcaatgatagaattgatgcgtctgtctactgggctgtcgaaggactagtctggggggacctgtatgatttattaaccgcgtcagatgtatgttaatttgcaacgccgagatctttcggattttcgagcatcaaacttagggaatcaacgtcttcccctccaataatctgactccgccaacatgaagtgccatgcattccttgaccaaattaaaaagatctgctttagctctctgaaagaagcttcagcttctttagtactaaaacacttggcaaattgaggctcggcggccatggcaaatcgttgcgttgaagcgttcttggtgcaggagaggaacaacagccgagagggatgctgttgactttcaatgtcagagattattaccgagcttggatcggtgatctgcggaagatttcggtcttcggcttgacttggtggagaaatcggtcttcgacctggcgtccggaatatctttatccgacgtcagactcggactaggggtttgcttgtacggagtacaaatgtgtcgactagaaaaatacgactgtctaatgatacgaatatattgtggaagcatgaaggagtctagtattcaggggtgcggatgcacaaggaagctaggctaaatactaatgagatgctgactaagactgtgcagaccgggcaccccaaggacaggggaggaacccatgctccgacaccccccctcgggctgcgcaggcgcaaggaagcatcaaaaggaaagctaggtacatgctgaatatcccatatagtttgtaaaggccttaatatagtctcaaaggatctatatcccttttcccatgtccaatgtaatataatatcccttgtgtccttcctacaggtatctcggtcgaaaggtaggggtcttgcaatatagaactggctggcttgtgatgatatcatggtttgttggctgcattgattcaggctcgtacggcacggcaatactggcttgtaggctcggtcgattctggctcgttggctggttgaatttggaggctcgaacaatggtagttgatagacaagaccagtgaatgtcatgttaaaatctcccctttggtaatagcaggggcttgtcaggttatcccatgggtatcggaagttattctgtatagcaataataacaagaaaggacttccttagcatgagtttgatcaggataggcctcagcccagagcctgggaaaacacactatctctaggtaagaaggtgtaaattgcagcaacatggctgctagaagactggcttggagccaatatataagcctctatagtagaaagctctcaatcttcccataggaagtaaaagtctagagcaaccatcaggaattacagctctgtagactatatacacctttatacttactgtgatggtgtatttcaacagtaaggagacatccttgcctagtacatactatataataagcagtactggccttccaaggttgtttttgatgcctcgtgaggctcttaatcggcatattaaaatgcctacgtggtcccaatccaggggttaaagccacgttgaaggatgctaccccccctcggacagggagggggtaaagaaacagatagcatgttgctcagagcttcgagaatcaattctgcatatttatatccagcaagaaactgaattctcccagcataaagggctcataacctgtggaagcatggaggagtctagtattcaggggtgcggatgcacaaggaagctaggctaaatactaatgagatgctgactaagactgtgcagaccgggcaccccaaggacaggggaggaactcatgctccgacagaaaaggtcggcgcccgccccacaggtcttggcagtcacgacggggcgcctcaccttttaaataccatacagcacaccatgaaattcgaattcaattctccttctctaaatattctattgaccattgaaatttatgctttaaccacttaccaagcgcttatcaattacttgaggctaaaatgacatggattttgaggactttttatttagttttagggaggttgaggatgtttctttgaatattgatcgtgccgaagaggtaagcgtctaacttagatcccaagtacttgctaattagttgtaaactgcttgacagccagatgctcctatttaattaaccaatgctaaaacaaatctactgtaaatattgtatattgaatatacagataaccttcccaaatatcctagaactgatcttaacagatatttatatattattggtataaatagctggtcgcaagaggaagcagagcatttggttcaagacataagtagctctaaaccagttgcaaagtacttgcgaactgattaaaatagatacaatactctcaagcaagtacccgtggggtcaaaagtaatattaagtcaacttttttgaattgctctgtaaagaaatgggtatggaaatactccagggctcagatatgtcagtatctaaagccaagtcttcatacattgcatcatacccatttagatgaggcaatgtgggcagaaatacagaatattcggaagaatattgctcttatcaaagatgatatttggaagcaaaatacttataggtaagtatatctaaactacttcctaagtagttgctaggtatttctaataagtcacagtctttattgcttaaagaaatctttcttttagaaa

SEQ ID NO: 3895 - DNA, 3017 bp, Emericella nidulans
  unsure (1)..(3017): unsure at all n locations
cccgggctcattatagctcagcactctgccagcgccctcctgtcctgtcgctgatcgtgtcttgcggtcttttgcgtcactctcgactaggaccgtgactctgaatccttttgcactcccttgcgtcccctcttcttatcactcacctagcgttttctctcgagcggctcgcctgcgtgtcttttcgtctctctttggcatccagcgcttacacagaagcatacttttggtagctccgctccgtgatccacctgtcggaacttcttcctattcctccttggacctcacttatcggtccctcttgtcaataactgcgacccgtcaccgccgaccgcgtttatgtcgagccctgagacaacaagaggggggcgttattgagcatcaagcgagttggcccggcccaggatgaggtgtaagaagcgtttcaagaaggatgcttgctgtcgataattccgatctggacgtcttgacactcttttgacgctctctctatcttgggtcgttgcctgaatctattgaaggttctactgcaccccgcgttgcctcgtcagctcttcccttcacctctttgtcattcttttattcgcctaacattcactccaccgtgtcatcgatatacacttttctccgactccgtgtgtgaagttgcgcgcatagagcactgggaataacacaacaggaaccatgttaccctctgtggcgcctttcccgccagttcaaccacaccaccacctcaaccgatatcatgaaaccgaatcgcttaatggatcgtacggcttggataattcattcgcatccacaaatccgccctatgactataccaacagtaactcgtttcaatcagtaccccgaactcgactacaatatcctcaccccgtccagcggcccgacattcgcgatcccaccaacccggcggcgttaaccttaaacaacgttggagaacatgcgctgagaaggaagactccgaatgggactcttgccgctggatatgatggtacaccgggagatatgactatccagccgccggcgactaagcacatattggtttcgcagctggaaccaggccagttgatctctccccagacaggcttttcgatggacttctggcaacagtcttctctggatcagttcgtctgcgcagtcatgaattttccgccggtgcataagactgacacaaatcgacggaacgtggcccgggagacctagcacagggcgtctacgggatcagttggatacgctctataaatgccgcacctggaatggactcggtgcttaaccagacgttaccgatgcagccgtcacaacagcgattattctggcacaacggagcgtatgtgccaacagtgctaccggctactttgcaaccgtgcattggacctacagcttctgcaggcactgggccctatggaccatactggccagatggcgcatacattccatatcgcccggccgcgtttcgggagccccgactaaatccccaaggcccttttgtcactccaatcaaccactctgcccctcagtactttgacgcagggcaacaacttttcaatgcagccctaaacccttccagtaacctcgaagtcggcgattggagtcagaattctctgggtgtatccaaccgtgaggtccagtgaagaagaatttcccgccacgtcactcagatcaaaagacatttgactctctgaataatcaacgtgttctgccgtttcatacgcgccagaacaactccgtctctggtttcgcgtcacgccctccgttgcacgaagcttctgcgtcatggtcgggtgcgcctggaagcggcgggtaccagtgtactggacagcttcctggttcccgcgaggccaatgccgagttcaaagaaaaggtattgtcctgggctcatggtgtatatgtcgatcttcttgcatctatccatcgagcacggcgaaatagtgtttcaaatgccactcaggatggtcacactcaacgggtaatgaagcccagtatctaccccaaaccgccgcgccagccaggccttgatttctcccaaacaagtgcgcccgagttctctcgacataatagctatccctccagccagtatgtgcccctgagttcgggaggactgttctctctgcggaatggttcatgaagctaacactctcacaggactcatcattatgaccgtaatctgaatccacagcttcagcccacaggtaatcatttagtggaacgtttacgacatacgggtcgtctaaattctatatccggccaacatttctcttccagctcgttgaatgagaatacgaccgttgtgaacgcggcatcatcgctagagttattgtcacatctttgtatggaaagtggctgggaatggattgatggaatgctcctgngggggttgcctggcgtatggtttaggcgattaccacaaggcgatgagatggtattccagaatcatcgcgcgggactcagcgtgagtattcggcgcttctcaagctcaacgcgaactaactctttctaggcatgtcgaagctatttctaatcttgcagctactcttctggccttagatcggcgagaagaggcattgcagcattggctccgtgcggttaagctacgcccaagttattttgaagccgttgaacatctcataggccttctgtgtagcagtcaacgcggcaaggaagcagttaacattatcgactttgtgcagaactctctacgactggctaagaacggtgactgtttcaaagctgatgaacatgcgagtgaacccgagagcgacgcagaaagccgtgtttccggtgcgtctgacgtgggatcatacgagaaggctacctttgattacgacgacgactttggcaggtcggcctttgttagtcgtcaatccggcgaaggcgctgctgggggttttggctcaagcggctactccgttccgggctgcgacaatggccggatgttggcgcttgttcacgctaaaggaaacatgctttatgccatgggtgactatgcgtcacagcggtagcctttgaagatgcga

SEQ ID NO: 3896 - DNA, 3307 bp, Emericella nidulans
gtgggtatttttccgagccgaggaatctactcccatcggggcagagtgtccaattttttgccaagaagggtacccactatgcggttgatatgcttcccacatcaaggaaagccctctcatccggtcccgccgcgaatcccttctagatgagggacagtgctgtgtggctgctctgtaaataccaaactgctgtgcggtgtgaggcaactgtgtccttgagtggcctctcgtcgacagtagggcggttcctcgatggtgtcgcgtcagtctagcaatcatgatcttccgcgtcatcgtagtcatactctgaatccgagtcggagtcgtagtcttcaagctcggtctcggtaacaatggcaacaggtgaaggtgctcgtcgtcgcacgggcgcatagttctcttcaaaatctgagtcttcctcctcgctgagatcggaatcctcatcggagaggtcttctgatggatcccagtcctcctcgggctcttcaactaatgtttcggcccattggatgtggtgctggttctcggagcggtaagctcccttggtcgctccgctgactgtctgattgaaccagcgttcctgctcctgttcggcgtcggccaggtcgagcatcagtgagtcgagaaggtttgcgtgaccaacaagcaggcgcaggtcgtggtccgcccgggacgcctctcgggtcagcttccggccgggcggtgtgggcgaggtagtatgtttgtgtgatgctcactttcttttgttgccgcttgcgagtgagcaggttgaaataggatgtgaaggagggagcagccaagggtgaagaggcagcaggagacgagggaagtggagagaaatttattgaggacatggtgggaattcagggcgacctgatgtgtttatgatctcagctgtgactcaagcagcactgaataatgtgtccggccgggccccaatcgttcaatagcggctggggcgcaaagcggcggtgaatcaaagaggctgacagtcttagccttatctctttgatacggcggattagattaagggacctttgtgcgttgctgggcaggctccggattcggtcttttctcgtaacgccgtgcctgataggtttgtcaccgacctggctggaagaacggtgaatgcagtatcgactcttgagcgtttggtggctgatattagataatgcgtggatagctgagactacctcgttgggtaggaaataatagttgagtcggtgtacgaaagggatcgatcaaaacggactgaaatcgagggatggtctccatttgatatatccagcagtgggccgctttcttttttttttctcttttttcttttttgttagtctttgtattttggcatttctgattcataatcgtatcgccgagagcaggaacgctaattcgatttgcttctgttcttccctggttcaggctccgtccatttcctaagtccggccgggtgattcgcaggccaggcaggcataaaaattctaatcgccctaacggcgctccgtggatccgatcggcgggtccaagattgaggatttacactcaccgcctctgccgctgggttcaatcagagcttgcagatgatgagtcaggggcggccgtcaccacactatacggtaaacggaaacagcaccccagtccagtcggaatattgtcccagaaagaaaggcaccggagatcggatcgcttctattcgccgcgtttctgccgtattacggtattggtaatctccgagccagtctgacaaagtccatgtcagagtagccgttccgtacaacagaagattccggatatcattcatactcataattattcagcccttgatgactaccctcgttacctccatgcgcggtcattggtgcatgcgaggaatcggttttgcatgggccagcatctcaaacggattacgggggtccggatgcccacaagaccatggctaagactgcctgaagtttatgacagatgcttacagctatccgagtacccgccgcccgggttctaaagcgtagggctgtgatgtgatcaagacgctcagacttggctgctgacagtaggctattcagctgccacgcatcttcttcgtcttcggttcgcattcgcatttggaaacgaaatacgcaaacgccagatcggtcggtcgcgagccacagcacaacgcgtgttccaaacgggctcaaacgaggatgcctagacaggatgtacgactcgacggacgccgaaagcctggaagcgtccaggctgccgcagtcgagagcttgtcgccaatcagttccagcatgctgacactgcctctaagctgggagcggggctgagattgcggaggagccgcactgcccagtgtctgagccaagtgcttacacattgtcgacgtggtcctctgccaattcatggtggatgacttgtgcacgacgccagggacgtgatactgcctgcgcatcattaatggataagacctacgatgatggcttgagatctgcatgtgtcgcaatttgtacaaagtggcttgggtacaagaaccagcacaaaaggcatctttttccttcgccactcggacatttggagaaggaacctgtgtacacaaatggctttatgctctgcacagcgcacagctccatatactcatctaccagtgttatgaaacatccggaaacttatcgtactcgcttactgggggcagccccagacaccacgtgtgaagcccgactgatctcgtcgggtgaagtaaggctatacgaggcctttctcttttcagaattacgagatggctccgtcaaaagctgctaagctcatccttctcgagctcgttcgtcaggggcgctgaccaaacataacaattaataatcattacagatgtcaccccgcggctatctccaggttttcttggtttgtcatcttccattgaatgatgacatcatcaccctggaccttttgaggctcgcattgctattgcttccgaccggcgactagctccatggctttatctccgtaagacccttttaacatggaatcaccgctgacgtgctcgacttcaggtctggcctagagctggaccaactgtcctctcataacatgaggaatttgcggagtacagagaacgacctccctatccacgtgacctttcggcatggttaccgatgcattgatcaccttcagccttcgcttatcattgctcctgaatcgaggcattcaagccagcctcaatatcgtgatcttcaaattcatcactacttgatcgccagggtagagtcatctcttatagtaccatgcagtcaacttgtgtctcacagtacaattaagtctcaatata

SEQ ID NO: 3897 - DNA, 4862 bp, Emericella nidulans
  unsure (1)..(4862): unsure at all n locations
cgacctttgtcgcggggattgcggtcgtcgtgtatcacctcgccgcgcagacggacaagtcgacgcaggattggtggacgaagtcgtggtttgggtatagaaccagcgttgggccggacgggtcggagattgactggagtaaagtgactcggtgggagatgttgggccattactcggcggctctttacggtgcgctctgggcgtattccgggtgggataaggtatgttacctagattaaacaagtcattgctaatcctgccaggcaatctatatcactgctgaactgtcggcgccagcccgccaactcccgctagccatcaacaccgcgatcccaatcgtggtcggaagttacatcgctgtcaacgcagcatactacattctgcttccatgggacgtcgtctccaccagtgacagtgtcgccgtgaccgcgttcaaccaccttctcggcccgggcgtcggcctcctagccgccgccgtcatttgtctcgtcgtcgccggttcactgctcggaagcgccttcgtcggcagccggatgatcgtctccgcgtcgaacaagaactggctcccccgattcctcgggcgggtcggctacatcgggctgcgcccggcctctccatcagacgagtccgacgctcccatcaacgccctcatcttctcaacagcctgctcagccttgtacatcatctttggcaatttccgcgccctggtcacgttcaacggcctgggcgagtacagtttcttcttcctgacgatggtcggtgctctggtgttacggttccgcgagccaaagctgcatcgtccatacaagccaatcgtcctgatccccgtcgtgtttaccttggttagcgggttcgtagtcgcccgcggggcggtctttgcgccgttccaggcggcagtccttattgcagtttggggtctgggattggggttctattgggcgcgcaggtggtggctgcggcgaaggggctgagcgagtcgagttcgcatgaggtctggtcaatcggctcagagattgattatcaggatatcgtagaatgctttctttaactctctttgtttatttattcgtgaggacgcgctgcggctatgcattagtacgacttacatgactttgtagtgggcttagagctcaaggcgacggcctggcgtcgcaggcaattaatatagatatagaccataacgtcatattgtcctggtccaatgcatggtgatcaacagtacatgaaggatcgactggtctcgttctttccagtatactcagtgagacccgcactgcatccgcatggtgcccacagtatccttattgacccaaattattgatttgtctcagagtaatatacaactagcctaaccaagtgctgaaagggtcaaaagcctccgagacctccctgagacacgtaacgactgttccgattctagactcacccatctcgactaggtcagcggcctcgctacctattccgggcaactcaagcccgagtttcgttgtaatagtctgccgtaggcctacaaatatgctacatgatcatgcaagcaaccaaaaatttcggtaggaccagttcttcgagcactacgcacacccttgaccgagttctcatctgtggtacctaggagtagagtaacatttcccggtcatagtgtcctgttcatcgggaaagctatacattcgaatctcccaaagacgacagagtattcgcaaaatacgattgcatacctcgaaggatgccacgttagattactccgattactcttgaaaccaggatatatagaaagcattggtagaggcttcaaatccggcagttggaaggtgacaccgtagtatgactgttagaaaggatgagcagataaagacttaataaaacgcttagatttttccttaactggaagaattgaccctgcttaaagattttttcttaggtctaacggaaagctggcgtaggtgtagtgttattgctagcactgctgcctgcgttgggttcccacctagtaagcgagctttcccctgcgcgacaagattatgcgttctggcagttcatgcaacatctgagcgtaccggtgagctgatctgctctcataacggcttctgttggtacgtaagagatagttttggcgcttgcgctgattgagtatgtattcaccatggcatagatcatactcgtacggcatatggcccggtaccacgaggatcagacaattaactgacccaatgataacaatgaccgttgaagcattccaaattcccggcggccgcgcacatttcgtgggctgaggacgtttatccctgaagcaccggcataatgggatatcgtaggcaccatccttacttacatcgtctattggcgtcgctgcaagtatgtaccaaggaagcgcagagccttagttctatctgtctgacttttcagtgtcctctctccgccgataacggccggagtatagatgcatctttattcctgcgccacgacgcctccttcccaatcctgtccggagtccggcgtggctttcttgtctatatctgaaagcgacagctgggctaagtccagggatgcaatgcttaacacttctccaagatgccaggccggtctagccctgtgagatatcaggacatactatagcccgattcgacaggctccggggatcaataaactcctgacaccggactttatgcccactattcctccttctctgcatccgaccaagccaaaagcttacgttaaaggagaaatataggtagaaacccgtcctttgatcgtattgtacagcctgctcatttatagtggcaggtatctaatatccctggatgaggtaggttgcggacgaagtggtctcctaattctgcacacgcgatatatttcccgcttcacatgtgatttctacactggtgccggctatatattgacgggattcgtggtagtaccgcttggccggataatcaggtacaaggtatgctcgcttcgattccaagagcgcaaccattcagcccaacatgacctgtacaccaaagtacgtggaagacgtaacatactgtaatacaatgtattacaggtttcgggagcagcctatcaatctgatctgataaatgcgccccactggccaagggtctgggcaacccacactaaaaaattctcccttgtcgcccaccttttccaagtgaccaagtgggatggttgcgcttttctccctcgtccagtcaccggaagctcgataataacgctactatgaacaagggtcttggctccatcccgcctgtggagcagagtcccttccagcttccgtgggcccgattctggttgacttccgcaacggcagacaaaccttgcctgaggtaaagtagggcaggccggttaaggcaggctttcattgcgggtcatggacttggttctgacaatagaaaaagagcgacattcggatgttacttactcctggctttcacttggctgacgttgttactgctggacttggtcggctcagtaacggattcgagcgtggctgntnggcgggcaactgcgcacggcagttacagaaattcgtgtaagaaaaagcaagtcaccaccaggatggaataatggcttgcaaaagcaaatggaatacgaatgaatggaatgctcattttcactctttttaactttttcatgttttttatatgaaagtagtttttttgacctttatgccgccatccctaacaactacttggcggactcccatattgcatggcctcccactccccgcgcgtaatccgatagcggacctccccttcttcaatccccggcggcggggtcggataggtattgaaccaagtatcgacgtgcttcatgcccagcttctccataactttcctgcttggcttgttcaccgtcatggtctcgccaaagacctccgtcagacccagctcctggaatgcatggcggatgacctcttttgagccttcggtggcatagccctttccccagtgctcgcgtagcagtctgtatcccgtttctgagcgctcggtgctgaagttctcagttggtttagacggatcaagaggcgtaggcgcgagaatccaccatccgatcggatcaggtttatcctctgcgtatgcgacccaggtgcccagccctgggactgaggtgcaggagttaagtagccacgcgtggacttgtttcgtctcgtcgtctgtgagcgggcgtccgaagccgatgtgcttcatgacctcagggtcctggtcgagcgccttgctgagggggtagtgctcgtcggcgtagggaacgagcttcagccgtggcgtatgtagtgttgcctggggcatggtgaactggcggtgggggtggtagggttcgaacggtggctgttccggatcgtctcttttcaacggatccggctttgaaggcgcgagtttatcagtatgggatattgtacatccaacgcccagcacttcaagatcagaactcttgagcgcgagtatcccgcaccctctgccttatatgttcagactcgatagtccgactcggcatacaggggttggcggctaagcccagggcgcctagacatctctcacgtcttgaacgaaaggaaaggattggctctccgatgcaactgtacccgtgtacgatccgtttttgctgattgcttgcttattgccgctgacaatcactgcccttgttggctacaggccctagcgttagccgtagatgggattcgttcggcaccacaggcactgcaagacaccggccgccagcctggttcgtgtaaggcgccaagggctgtgaagaccatttattctccatgcagtcttgtcagtctgggcattaggaatatgtgatttccactgcgaacaccgcactgctcgtctcttggcgccaagggcattaaatcagattagatg

SEQ ID NO: 3898 - DNA, 1808 bp, Emericella nidulans
ggcagaatatcttccagactgaccaagatgaagcgtaattgctggtgactgtgtaaaacgggcttagctttttcgccattctactcccatatgagtgagcccctaagctgaaaccgagacagcctgcaaccatgcctgcaggtttcaaagtgaaccgacacttaatacgaagattattaccaagtactacgctcactatactacgcttgctatcattagatctttcagaattgcaagggttcaatctcaaatggggcccactagggtccctgtcaattggatctccatctcatctatcttcccttcacgttggacagactgcctgcctgggtagcctctctactggaaatattaagctggagacacctgtcacgaatacgtgtgggaagagatagcctgacaagcctccctctctgaacccttgaccagaccctggtttggattgacagacgcgcggcccaagagagggggcggcttgaacttcattgggggatttctcaatacgacgggcctggcttggctaggcgacccgacccgaccatactcccactctaatttctgtatagttgtggcgcttgtccagcatagaattgttagaatgaacagaatcggagatcagagatctgcattcaatatccaagtcgtagctacatatctcaccggtcatatcacgttaggtgccagcacccgtatgcaaaatgtcataataatatactcaacgccagccgaccatccagacgaagccaaaccaagtagaacgctgcaggcgtcaagtcaaacagaggatcgtaacagagaattcaacagattcgcaacagattcgctgcagattcgcaacagatgcaaagcaacgcaatcaacagcaccgtcccctccgctgtacaacctcgaccgcctcgtccccgtcatcgccagcactactcggcgggaacatgagccagctccgccgcttatcgcccattccgagacgaaaactgcctcccccctcgacacccccagccccagggcccgcggacgagggtcccccgtcaagcggcgagaaagggccgccaggcgacaagacaccgcccgcttccatactccgtcgattccgctgctccaccagcttccgcgcaatcacccggaacacctcctcgacgccctcgccgtccttggcactgatctcatgacagcagtcccagccgatatcctgtccccagaacccgctgctccgtttactgtcaacgcccatgcccattccgagtgtcgcgctcgacgttcgcgcgaacccagatgcggcagacggcgccgcagtcggcggcggtgtggacgcacggctgggatagagctgctcagcgatatacgcaatcgtcctctcaaaaggcacgcgtctgcgcccggggtcgtccgccacgatatcgctctttgtgccaacaacatggatcacgatgggctcatcgtccgacgtcagattccgcttcagctcatgcaaccacccagtcatctcgttaaagctggactcgtccgtgatgtcgtagcacagcaggcacgcgttcgcgccccggtagtacagccgcgagatgctccggaaccgctcctgtccggctgtgtcccagatctgcagccgcaccagggtatctgacgcactgtcgaggacgcgctttgtgacgaaagaggcaccgacggtggaagttgtggcggacgcgttgaacgaatttttgacgtaccgctggacgagggaggttttgccgacgccttgagggtaatgtcagatcggaaattcactgcggtggttattaggagggggatggtctaccttgggcgccgag

SEQ ID NO: 3899 - DNA, 1853 bp, Emericella nidulans
agaacatgcgatgacaatggtagaaatgataacaaagaaactagaagtcaggaagaatagggataaaatagaaatgaatgaaatcaaggagtcgaatacagaagcatgatgaaaagaggtaacaagaggtcaaaatgagaagattaagaagatataattaaaatgggctatataaccacggaaaaagagagatgaaaccgaagtcaacagacagcaaaacatggttagccccaagaaaatagggaaaaagggaatttaaacaacatagacaggaaggggaacattgagaaaacgcttaaacttcgaaaatgagcccagagacagagtcgatgtaacggatgcagcaagacacagaaagggtgccagagttggcgagtcgagcaatcagaggaaccccccggcaattcgctgccgcaggccatgtgatccgctcctttgttatccaattcttgggctcctccacgaccatatcaggtctccgtctcagtctgttgcaaagcttcttctcaagcacagcactaaccctttttcagttaaagagaactactctattatctatcaagaagcctgcgagtcaagagacggttctggatcgctcgggaaacacaaccgacttcgacacaggacagcctcagtcttggtacggtgacaggtcacgctaatctatcaaacacagcccatgcttcaccgtctgctgggagtttacggcccacaacctgcccggtgagcgacaagagacagtattgaaagcagcaaagaaagtacttcctgttggactgagtaggatggctattcgctcatgctatgcaccttgtcagcctaggcaagggcccgtcttttgagatgcgtaagcacggattgcagctgggtcagcattcaacaaggaccaggggagcagatcgagcagtgctgcaggctgcggctttcgagccgggccataggctggaaaggggcattttcgcgtctccgagtccacagctgtcaaatccagattcctgttgaccacggtccatgaatttgaccatacaacccagcttggttgggtctccctgggagtgctcgataggttccaggtcccccgctgactcagagcaacatctgattctttacatatcaacggccacctcgcagagaatttgcacaagtcttgcatatccgccgccccccacagtttgttggaccaacggctgggacaagcaaatctggccgttgagccagagcgagagccaacgccgccgagaagatttggaatctgagatctggaatttgagtgcagctcagcctatcggctggggtctgtaccacatctgacgatggtatttcactgctaggctgtacgctgctcttaactcggccacattccgtgagcaaagtgttggacaagcccatccaggacgggggcttctatccaaccatgctcgtggcatgccatggtgcctgagaagatagtatagccctctaggatccgcttgagatactggcacggggcggcagattgctccctagagatatctcctcacaccccttgtccgttcatacggtattactttgcggtttcttctctcagaacctaacacaataacgtagctatatctcaataaagtatgaatcatcattcatctgccaagttgctcaaaaatgctttgtttacatcatacgattgcccctcgcaaccatcacgagtggagctagttccaaccaggacacggtaggactttaccgaccaagttgcgagtgtatcgagcaattctgtttacaatcgactatacagacaacaattacacctccagcaaccgcagctgcgactgaaattgccattccgggaattgagacggatgcagcccaaagcgtca

SEQ ID NO: 3900 - DNA, 2100 bp, Emericella nidulans
taaaatttcttttcttgaccaaattccttcatgaacaagtcaggaatatgatttctcgggtacacgcgattacttatatcatatagaacaatatcaacatggttttattgtttcgaaaggcagaacgggatctcaatgtagaccctggtcatatactggagtgtagatttgaaagcaggcttaagtgtcccgcgaataggtaacttgaccacaaggtttaatatgtccacagatctcggcctctccacagtaaactcacgactgctttctcgctcttggttgccatactcgtccagtcatggtccgcaaacaaatagcagctgcacgagctgccacctgagtcgactatgatgccccttccctcttaattggacggtaaatagcgggacgaaacccgaaaacttagacctctgcagaggagactcattctagctacgtcacatgcaccaccgacctagatgaatcatcacacattaagctgtcccaatataagggaaccaagctaacctgccaaacgagaaccaggaagaaaggaaccgctcaacgtcaagatctcgctgaaaaccaccaagtgaatcttctactagtaagtcatccagaactcttctttttacctattctttcattggctggtggcttgttggagacgtggtattgggtgccatatgcgtctggttagtacgaattcgagccaatggcgtataacattaacctgacggtggggagctggtgtagagttactgagtagatgtgggtaatgaggtacccgttgagagatctctgtccgagttcgatcaggggtcaaaaagtgtcggcgtcatagttcctggttgtgtctaatggccggaaccgcgtaaggctgatagggcgaggctagaccgatctgaccgagccggccccgctgtctagcgacatctactaaggataaccttaaatcgcagcgcagttttactatgaaatcagaaataaaattcttattgctgagaaagaaaaatgatggtaaagaacttgattttgataatagctgatgtaaagttcaaatctgcgaggaggatcatttccatgacgcgcctcggctaagatgtacgtaccttctccattccatcagctgcgtggccgcctagaatcaggtgcccagtcagctgatgacaattagacctgagaaaaagtttcattggggccagaaaactctggttagagaaagcgaataccagtcgaaagtcgtgtattcgttaaatctagactctagatcggattatactgccgctcgaaatggatggaaaagatcgttctccatcgtttcatcatcgttctggaccctgtcccacctgaagaagcctagtactcccgcagattccgcaggctacactgaaagtgggaacgagctagaccaggttaggtattgttcgtgctcgccgcgtttgataagagatggtggtgcggatcctagcggcgcatcatgcgtcacgctggtctctctcacgtcacttacacagccctggaggcagatgaccgtggaaaagtcagatattcagagccgaacattcataaatatggttttcctcgttttgccgcgagcccaggctaaccatttaattctatcaaatccgttcgccctctcttgcaggttctggttggacccgctgccaaagcaactgacatatcaagtttatatacctcctctatacctcctcacatcgatagctgcaagccccaccaactatacgctcgacaagtacgtaaggccccgatagttcttccaactattacatcccgctgacaccttgcagcagaaactagcacttctgtgcccaagcacaggttccgaatatatttttcaactctcccttcttagattccaaagaatgcagcaatatcaaatggaccacgcctaccccatgcccggctcccagagcccgaagagcattagttccgcatcgctgggcagcggaagcccataccaacgctttctttcgccgtcgccgtcgccaacgcggtcgaccagacgacgtagccgcaccacttcagtcctacctgcagactacgcctatgccgatatactctttgacgcttcccagcacaaccgcggaagacgttctc

SEQ ID NO: 3901 - DNA, 5254 bp, Emericella nidulans
  unsure (1)..(5254): unsure at all n locations
ccaccagctggaacttatttagcccgcccagattaccgttctcccagaattctccccacctttcctgaccatctgcatcttatgcgcggcagctgctcatagtgtcttggcgctgttatcaagccgtaagacggtgaggctctggcccagctccatttaaagatagcgcttatgaatacccagcctcgtcgacacggtaacgatccaatattatggcgtaaccttgcagttggaccagacttgcttcagcccctccgccacggggcccgtgggcagtccttaacagccactaaccgccatcatacctgcccaccaacatcttcaaagttgtggttgggcatggtataatcccctggattctatttctggatttctaggtcgtaatttcatgttcttgttttgagtactaacgaagggagtgatattgagctcctctgacgggtccaaggtctgaaccctaacccgcggcttgggttcggtcgagggcctatactcaaaagccgcgcctgttctgggcaattcgcagactgccaaataacacaaacatgctgtagacctactattttgatcaatcagcaattatatgcagagaacatgcgctgaattggtgatttcaggatcggttcctggcgggtaacccgcgggttgtgtcaagttctaacagagatgaagcttcggagtgtaatgttgtccagaaaattgctctctcgagccatataacgagaaatcaggcatcgtctgattccatgtttcaggaaggtactctggggttcacagaaagcacttgtgcttgggcctcttcgtcacgctttacagcgctctacgtagtcactgttgtcgaacacacgaggggagccttccaaatctgatccagttagacggattcgggactctttttagcatcttccaggtaccttactctaccactactaatttagggccctaccaccgtggaaagtaagttcaaggctgtaggctgcgccatcccagctctgatgatacttaacacagagtcgaggctagatgatcagcctcgaaatatcgttcgtcatcctgtagtaatctcaagcatctgaattgaaagcggatattgtacagtaactgtaatgtgtctaatttatgtatcagcgctctattgaataattatcttaatctttttacccaacttttcttgctttttgtttttgtagccattctttgtaagcttttttcttggacatagagcagcgagctaacacatatatggttgcttaatgcccttcaacgcggcagcgacccatggcttatacaatacagcgtatactatcgattgcactacggtaggacaggttgagttcatgcctagatgtctatcaacgctactctaaatttcaaggagtggttacttctatctgcagcgccactctctgctaccgcagtagcagcaataatagtgttggttatatgctagcccgatggccatctatgccacctctcacttgcagtcagccccttagtcgcagcaggtgcgcgcagtgccccggtttcgcttcccgcggttgatcatcaggtgcattgttgcgtgccacttgcctttgttatcaattggtcggcaagcaaagcggttcgtctccgagctgcggtcaatgtggaacttcaacagcttcgcaatgcagctgggcttggcaatggtattggcagtgctgcgcttgatgaccgacatcacgatcgtgtagtcgtgtgtcggcgcgcgtgcctcaagctcgagcgtgttgttgcgagaagggctcttgtctttaccctcggggacgccgaacgaaaaggtccccctcgttcctttgtagtctgatattacggaggggaaagttagtcagctacaggaccagttaggacgggcctattgaaagatataggcgactccacggcccttttgggtaggtatggtgtggtagaatgacagtgacgtacagaggacttggtcggtctcgctgaagacgtagtcgtgagacaacatggccagatcgacaccctcgctgtcgccggatcgccgcgacaggctccaactattggcctcaggcctgccctgcctgtcgagtaggtacggcagggaaaagtggtagtcgacagcatcctcgcgggctttcatgttcagtgtccgtcttagctcgtcgtggggggtcagcccgttggcccccgaggagccatctctccagacccggcgcaggttcctccctgcttggattgcgaccgcgatgtccttttgcagagcgtcactgtcagtctccgcccaggtgtttttctagattgtgtatctcgcttagccatgaggacttaacttacattgagccagttggtcattaaccttggggcatagtaaatgatcaggggcccgccaaaggcccagaaggtccagcggctaggcatattgtcgcagatcattctcgtgatacccgtgagttcggtgcattggtcctcgcgggagacaaggctgtgtccacggtccaagttcgggcccgcaagctcgagcgcagaattgtcgatatcgtcgagggtctcaaactcggtaatgtcctcccagacgaacgaaccgttctgggtgttacagaaggaggattgctccagggttgcatagaagtcttggacgtcctggagctcgcccagctcgacattacggtcgtgattgagagaccttgccgtcaggaagtctgcagtgaccgagctggtgaggaggaaggagagttcaagggatgacagcttcatgatcagagaagaaaacgaatgtatgatgtgcagtaactagctcggccagtcgctctatttgtacctctgttagaggatcaagttacgttctcgagccagcattagcatcctgcctgtgggtgaacatacccactaccctcgatattaaataacgactactccagtgtcctcaggccacccactgcaagtggttgtacatttcctcaaaaggctacggcgttcgttaaaactggcaatggtcactataccggctgtccagtgtttcagtgctaggtaggcactaatacgccatgggccactaaaatcaatagtgagtgacacctatgcacttctttcagaacttgaacccaagttaaagggagttggattagcctagacgagctttcaaagtcgggacgggctctgatatagtccggtcagtgcgggtgtggactcagagaagcctcaagattaagctgaagaccgtccagagctctcaagcatgcatgaacattaacttcttccctagacaagccaacaaaacgcagaaatctcgcgagccctgtggctgaccccaagcgtgaagccaggtacactaagaggcccacatcctcgataaattctagccaggcgctaagctctaaccacgaatttcctgatgttgggaatatttctgcctaatataaaagacaccgtccaaggcctaataccacagagattatttccattttgtccgtcagcccacaattctccgccagcttcaatgacatcgcagcatcctgcgtcgctaccagcggccaaacagcctccagcctccagtccaggtcggcgtcgaccctctccacgcagtatgtacgcccctgaccctgtttagcagggcagagcacagaagagcagaacattgactgcgtcgctttagcatgcgccatctgctccaataccgttgctgtcgcgctcatcttctctgcgtttcggcgcaatctctcggatcatgaccggctcggtaagccctcaaatgatgaatgcactggactcagtaaactggacctggctgggctcagctgcgactaatgattccaatctatagtgaggctggccgcttcagccgcccttaccctgacggtccatgctctgctcctgatatactcgccgcctgcagagcagagactctcgtctctgatcctctgttttattgctggtccgatgtgcgtttatctgccgttcctgctgctttggtaaaggaaggaaggaagacagagccaacacacgctgaagcgcaaccaactcaaaaatgcccccctacccactatagcgcagtaaaagtaaattgtttccccacacttaaatagcatctttcctcttagttgacctagatccagtcctctgtaccctaattacgttcagcagcgataagaagctactgatacactacgatacatcatacgactttccgaagaatccctagatctggcttgaatttctttgccttgaaatatcatttcccaaaggtacactagaacaggttcgccatagtgtgtagggttggctaaattcttacgagtttgtatgcggccttatcccatcgacgaaaagaagcaaccgggagtcaatctgttatgataatgtgtcaatatctttcgtccgttgagacagcacagtggagtcccatggacaacgtcatatatagtcctgcgtttgtgagtagctgcagtcacaccgtgccggaacagaggccttccaagactatacctaaggtaaacgaagggagtgaagctgcgaggcgatcttttactacctcagtatgaaagaatgtaggaccacatcgtgcgttctcatgctgttgataaagtagtattgtaaatcccgctataaagtattttatagtagcaaatatgtaaaaatatatacaattcctttcacttgaacacccgtgcttcaaatagtaccgtatagcgtgaaagacttataaaagttacaaatcacgcttgtgtaaggcgctcagacagcgatatacggacagctgtcggccagattacttccctttgagagattttgccactacaccaaaaagggtcaacccttaccgtgcttaatcatctgtcaaccggaggagattcctccttactaatcaatgttcagcaccttgtttgtttgcctgtctgtttgatgctttacactgtttgtatggcagggatatctgtttaatgccttatactgtttatatggcaatgatatctcctgcataagcaagaacctttttttttaaagccttggaaaaggtataaattgcctatacagattatagttaggagatcaagaccttcaatgaaattattaactatggatattaattacataactaccctaatatccacagttatgagcccgcattgtctagggactgggatacagaattatacctcttttttttgcatataaagatatctgcagcccgtaccgagccatacagacagctaggagtggttgatattactaaaggacactgcacncngagctactcttcgatatatacaag

SEQ ID NO: 3902 - DNA, 5622 bp, Emericella nidulans
caagagacggtagtcgatagagaccgggagaaagcctagcgtgtgcaggtgcgccgtttgctttgaacgaatgtccttgcgagagagcataatgtggccgcctcgttggatcatcagggctgcagggttcagagtcaggttcacagatgtgcataaagggatggccatagatctcacctatcggacgcggttcattagagacagagggaggatagtatatgtccgcaaatagggggattccgtctgcctgcttgtacatcacactctcaaccgccgtttctgtatccctgctatcgagtcttggtgtatagatctcgttgacggccggcgctctgaaaccggcgatgatcctcaatgtacgtgcctcaaaactatctccatccgtccacgaaacatgctggaacccagccttgcgcatgcttgtgttccagaaggattctgatgcgatgacatgctgacgcccatcctcaaacaaccaccaaccctcaagcagtccaaagacgagatcaaaccaatacatattgcgtgtaaactcgacaagtgccacaaatccatccgggcggagcattctgtggatgtttcctgttgagatctcgagattagtcgtggcatggatgcaattagttgatatgactgcatggaattttccggttagcgagtcggccggctccttttcaatgtcgatgacctgatactccatatagggccggccagcgaacttttttctagcggccgcaacgaaggaaccagacacgtcgctgaatgtgtaagtgaatggtataccagagcgaacaaggtagtcgaggacatggcctgttgtgcctcccgttccccctcctagctccaagatctggaatgtaccagaagactgtctatctgagaaggcgtttcctagaaagctgcaaaggagtcgggagatagcagcgtacataggtccattcaggtacacctccgccagcaagtccctgtttgcctttgaccggaagagcaggttcagaggatcagcggtcccagtcaagcaatcggccaacttagagcctgtaatatgaagtagcgaatgttcagaggcgtgctgcggtgctatcgtattgatctcttccagcaatcttgtcgacgatgtgggatcgacaggcttgtctgagcgaacaaaaccagagtcgctggtcgcaactaacatcccatctctcaggatgttgtataactgctgcacaagcttctcgtgagcgggaagatacccgatcttgggtagccggtcgcctggatgcatcagggcgagatcgcatccaagctgagcaaatgcctcgtcagtataggcaagcacgagcctggattgggcaggatagaccctcttccaaaagtcgtagaaaccagtctccttagtatagatatcgtagtcgaatcgtatttgctcaaacgcgtgctgcgccatttcgaagtcactgccctgcgttgttagcgacgccggaacagacgacaggctttgctctatattcagggccggtacaagggcaattagatctgcaaaggtcgattccatgttcagctgcgacatgtcgacgtcgcagttaaagatctttttaatgtcgtttgccagctcaatgctcagtatcgaatccaggccaagatccgccaggttgttcgatgcctcaatagtcccgtcgtactccaaattttcagccagcaaatctgcgagcctgcttaccgcgtcatctggagtggtaatgccggacgtgacagcgcctgttggcatgtctgaatcagactcaacagagtctgcatcggccaggtcctcaggctgagagccactgtcatgcacgccgaggtacgaggccaagcatttcgaaattgaggccacatctgtcaagagcgcaaattcatcagcagggatagagacattgaatacctggttgatctcagtcaagacttctgttcctagcagggagtctacgcccaggtctgcgaggattccgccgtcgtggatgtcggcgaccgggacctcgacaacgcgactcagtgttttcttgagcttttcagatatctctaaagtcggtcttgttatcgaacgcttggtaagaggtggcagcaagaccctctttggttgtgctctcagggcaggtgactggaccggtacggccaccttgatcggcgcagcatctgactgtattggcacgagagaggaccctcccaagcgacgaaatctggaccctggtaaagtgtgctccaagaatgaacattgccagttctcctgtggctgcattaaagacacatatatcattcacaacctccttctcactcgtcggatgataagaagagtgcacaatccaagaggcatcgacgttggccaggtcctcggtaaaggccgccgcagactgtacgcggtcgaccttggtgcagacgtagacttccttagcaccgacgtcggttaggcagttaacatgaatgccagcggtctggatgaaattgtcgacgagtaatggccgccgtgtgtcggcatccttaacggttgggggcagcctgatcctgcccgtcacttctgctccagaagcatacacgctctgcacgcccttgtagtagtctgcatagctgacgactctgctgaagagctggtacaccactggtccttgcaggatatgacagtctgggtcagatttcatttcctgaacacgcttgctgcttaccaggcggccaaagcgggagaactcggccgctgttttagtgtcgttttcgcgtaggacgactgtccctgaggcatggagctgttcctcagctgagttgcccatgacaggtctactgcagaaacaaaacgtccatgccgtctttaagaagggtgactgttgcagccggaggatgatgacacggtcgcctacacccagcggagcctggatctctagatcctcgacactgggtataatgagagtctcactggtgtcagaatacaccatctgaccagctttgcaggcaagatcaatgtataaaggtgcagggcacaagggctctgcgagcacagcgtggcctttgacaaagaaagagtacttttcgtgctccgtgcttattcggaattcagcctgttgctttgtactatctttgtacttgacgaacgtcaagaactcctcaacagaggtctcctccctcgttgattgggtgactgtagcttgctcggtcattgtgtctttccagtcaagccagtgtctcgtcttctcgaattggtaggggggaagctcaagcggttggtagcactctctctcgctccggtggaaagcccagaactgcaatttatgactggacttccagagattgaccgtcgcatccgccagggctgcggtaccagtctcgcctgcgagattaacagcttggatcagatggtctgaggggacattgagtgcaccacgaatcattccagccacggaacctccggtacccacctcgagccatgtgcatgcgcccagcttggcctcaattcgagcgagggcttctgtgtagtagacaggggtccgcgtgtgttgcacgatcatggatgcgttgaactccgaccaagatgagccactcgagcacgtctcgatggcgtattttggcgtgcggaaggttagtctctcagcgcactgttccagcccaagcagtagcggctcagtgaatttggaatggaagccatgcgagacggcgagccgtttatacctgatagactcctgagtaagagcggcctccaggcgatcagcggcatctgcactgccgacaacaacgtggctggtcggcccattaaaacaggcaatttcgagcgcatcttttggatccttggtctcagctgctttcatcaggcgagcgacggtctggacatctgcctgaaccgaaaccatcgagccatgctctgggccccaggcgtcccgcataagctttgcgcgttctgtgatcaaaccgagtccgtcctttagagaaaggaccctgccgactgatagagcagtcaactggccaaaactgtggccgattagggcagctgggataaccccggcctctatccaggtcatagcgcaggcgtactgggccgaaaacaacgcagagtgtagcagaacaacatcagcgattggctccttccgaaatatagcaggaaaaatactatttaaaccggctgaggtgaggatatcatcgcaattactcagatgtgttcggaggaccgcagaagagtcataaacctggcgactgaggccgactgacctggccacttgaccaccaaatgcgagaacaaccggacgttctgttggagcaaccgtatgcaatgaattattcctgttctcaacaactgctgacagctggtcctccagttcagctttcgaagtgtccgaagtaatcagtgcatgtggatagccacggttctgatagttggcaagctggaaatctagcctaacaagtcagtctggagagcgttctcgcaaagatcggagcagctctttgcagtactccttcagacttgaaacagtattggcagaaacgtaaatgggacactttggtagggtcccctgcttctctgatcttgcaccggttggggcctcagtcacgatcatggcagcattgctcccagctgcaccatagttattgatgcaagctgctttaaagttcgcagaccagggctgcgttgtatgtgggattatcaccttatcttgctccaaaggcgcaatcttggggttcagtgttgtatggttggcctgcattgggatcaatccacgctgcagcatcaataccgtcttgataagtgatgccacacccgacgcgccttctgtgtgcccaatgtttcccttgaccgatgcaatggcgagagggttggctcgattgctaccgccgaatacggttcgaatactggtgaattcgataggatcacccacaggcgtgccggtcccatgggcctcgacaaacgagacgtcatgtggatgcaagccagcctcagagacaacctttctgtaaagttcgatctgtgactcagaatgcggcaccgtgatggcggtcgaattttgattctggttgactgcggccgcagcaatcacccccatgatgttatcgtgatcggccagggctgaagataggggttcaaaaagaccaaccccaccccttctccacgacagtaaccatttccctttgcatcaaatggcttcgttgggccagtaggactcaggaaggaagcggttgaaaggttcttgtagaaggtagggctcgggtacagactgactccccccgttagcgccatcaagcattcgcccgtctgctaagcccggcaggcagcttgaattgctacagctgaggaagagcatgcagtgacatatgtaattgacggtcctgttcagccgaagaaatggatgattattacggatagaaatgccctcagtgttccaaggctgaaaaatgcattgggtgagggagcggccactttatactggagtctgcggcacatagccccagataacacccgacatctctgctggccttgatcccagagagaccagaatactccgccgactctaatgtctgataagcaacctgcagcacaagccgctgttgaggatccatgctcgacgcctcgcgagacgacttcttgaagaaccgatggtcaaaggcatgcgcgtcattgcaacgttaccc

SEQ ID NO: 3903 - DNA, 2530 bp, Emericella nidulans
aataaagtataaagtgatgaaagaaaagaaatagtgattggaagagaatagaatgataataagaagaagaagtggaaaagaaaagaaggaaagaatgtgatagaaataaaagagaggtaggatgaagaaataagatgttaaaaacgatagaaaaaaaggatataataagaaaagaatagtgaaggtaggggataaaaagaagaagagagaaatatgtagtaatgaagaaaaaagtaggagagagggaatgtatatgaaatgttaagagaaatgatagagggaaatggaaaataggagaaattagtgggagagaatgaaagagtagatggatgaaaaaagaagtaagaggagggaaataggaagaagataagaagtagaaagaagagtaaaagagtagagagaaagaggagtagaagcggatgggggtggaaagatagaaaaagatgaagaatatataaaggattaaggaaataagtaagaagaaatgattatgggataaaaaaattaagaatgatagaaagaaatgatgagaaataagatatgtatatgtaagaagaaatgttgattaaaaatgaggatggtaaattgagaatatgtggaagataaagagtagtaggggaaaaaagagaaagtagataagatataagagaataagaaaagtgcttacgagtgaaggagctacatggaagaaatatgtaaaaaggtaccgcgcagctttgcattccatgattcagcaaagatcagagggctccctcggtgccgtcacgtgggaagtctcccgctcaaatggcatccacgtccactggcagttcctacctgtgccagcagacctcatcaagcgcggcctcgttgaggcagccttcaaagttgaggccgagaaccttaagtacccaaagttcgaatcaccttcggcctcgtcatcgtcactgccgcaaccaggatccgagggcctagaccccagcgctgaaccaggcgacttcttccgcctttggatctggaatccttcgccttctcctgaggttgaaaagagtaatgacagcaccgggtccgaaaagaccctgctcctcccccttggcaatgacttccgcttcgacctgcaatttgggcgccgcgttatggcaaaactcatgcagcttgagaagagaatcaactggaaagatgatgtacagtcgcaggaggaagaggaggctgattcggcggcatttaaagaggcatttaaggcgtttgattttacactagagtagttcttttatccaatccctgtgagataccacgataccgaaaggatagatacgatgtgcctgtaagattaatgtttatactgacatattggcaaatgagtacaagatagggaaagggcatcagcaccttgcgttcataacttttatcaagggagaagtagctataaatcatgaccgagcgtataagttgccttcaaaacaaagagcggtatgttcatcagaagagaattgttttgcgaggcccgaactttatacccccacaactagtttcaagcgggacaccgggccaaagagaggatcgagtggaagttaggtgccgggtatatagaccataatcatgggcgtggtcatagcaagccatgaaatcaacgtaaagtaaagagggaaaagagaagaaaagctcactgcaccatatacggtctcaaagaaaggggggtggaaataagagtatggtagtatgcttactgcctatacatccctgaacgaattaggtgttggcttacgcccgctctggaggagactcgggggccggcccgggtcgctgatttgctgcgggacgcctgcagtgaatggtggtgggggtgatgaggggacggatggaacggcagctggggacggccctctgtagctgggcggttgggtgctgaagcccggagaaggctggcggtagggccctgaccgcgactgcgacggttgccggaaaggaaggcaaagagaaggctgtcggaatgggatcgggcgattcatctcggttgttgaagaaactgcgacgcctacaggatattgagggccaggggattaggcctgcggtgggaacggcatggcgtggtagttaccaactggagagtgatctgcgtacggctggtcatatgggctgttgtcgtaaggactatggccacgacctaggttttgggcgtggtagtcgtatggattatgatcatcgtatccatgcgcgtgagaatccgggaagtgttcgttctgcactgctgtcctaataggtggcggtcccatatacccgcctgtgtttgacctaggcgccgatggtgtacgatgaggtggccgagttaccgggtttaatggttccatttccactgactccggatggggacttgtatcctcgactctacgagtaacggcgtggtcccaactaggcatagcaggtaatgcatcctcgttcatctttgagactccggggcttgttggggcatcgaaccgcgctacttgagcacctcgatacgtcgggagagattgcggtgtttggtatccctgttggaaccctggttggtagc

SEQ ID NO: 3904 - DNA, 3913 bp, Emericella nidulans
atccgcgaattaaccctactaaagggatcagattcaagtacttgatcgacgcgagcggtcgggccggtctaatcagcacaaagtacatgaagaaccggaaattcaacaagggtctgaagaacctagctatctgggggtattttgagaatgcgggaagctacggagaaggaacacctgctgtgggaggtcctttctttcctcgccttgaaggtaagaagattctgcagctttcttcatcaggtctgggttgagtccaactgacaacttcaaagatgggagcggctgggcctggttcattcctctccacaatggaaccacctctgtcggaatcgtgatggagcagagtagttttacgactaagaaaaaggccatgacgaatccgagcactcgtggctttctcatcgagcacataaaatacgccccaggaatttcagatttactctcaaaagcgactctcgtttccgaagtcaaatccgcaacggattggtcctacagcgcttcgacttatgctgctccttatattcggattgtcggagacgctgggtgcttcattgacccactgttttcgtctggcgtgcatcttgcgcttacgggcgctctatccgctgcagcgagtatctgtgctgtgctcaggggggactgtgatgaggatattgctgccggatggacagccagaagatccgcgagacttacacgaggtttttgctagttgttacaagtgcgtatgcgcagatccgtgggcaagagcggcctgtgctaaatgagtatgacgagaagactttcgatcgggcattcagtttcttccggcctagtgagtagccacttacctctccatatgtgagtttcggccgactgattctctccagtcatccagggaaccgttgaagttggaggtacgaggttgacgagagaagaggtcgctcagtcagtaggcttttgcatgcaggttattcgcaaggtcaatggagcaattgacggtgaaacgcccgatgtggaagaccagtacggtgagcagacctgtgatcggatcaagaaggccgagctcaaggctggtctggataagtttagcgcagatgctgtgctgggaatgacggtgaatctgcagcggggcgctctagggctggtgaaggtcggctaagtgatttgagagatgccttgctgcttggttagcatgctgggtagttgatcgtagaaaggtgttcatgacgtagatatgggcggttttctctgacagttcccattcagcgtctaatatgttcgttacaaaatctaatcattggggaggtctactttgaagagctgaaacggttcaactcatactaccaaagataggttttgttttatgtatgtactggacttttcttgagaatgggtcctgtgtgtagtacttcctcgacgtcttcctgaaccctgaatcagggctctatgccaccctaccagggtagcactgtcgagactcgatcaatgctggccaatacaaagattccagtccttcaattgggacatcaagtagccctttgcttaaagtagcagacctgagccatctagttcctctgctatccacagggcatagcggagctcaagacgatgtcaagcatctcactaccccataagaccgaatattgaggaatcaacatcgaacccaaatcgggctagacctgttccagccactgcacgatcaattgcgtaagcctaagaatactcactagaggcttagtgtctgctgcgcaaactgtacttattcggataccgcccacctgttctactgcgttacgtgatattttcttggagacagatgtcgtcatgctattaatccttattattatccaaactgatggtgtgtcagtgctctggattactgtatcgcagctgtaatcagtgtggctggcggctgtaatcaaaatcaaacagcgatcttgataagagccctaagccacacccataaacagaaacggacctgctccatgccttagctcacgcacccaatgctagcactactgcacgctctgtggcgccatgcaactagtctcgagatggttggacgagcaagcatttcagcgtaaggcttcgacttgggcccagtcctagcgctaaacgcgaacaggggtacagacagggattccgcactgcctcgccaggcaccatattctcgctctgtgccttgctgcgccgtatggggatttcttagcatattaaggttgtaagatggccagtggcgttgtcttgtggccacaatccttctctccaatagtcaaaacataatggcatcagcagccgatcatatctccaccccaacttcgtcaagggaatcactttcaggaacgtcgactgtagtttctaccacgccgtctccattggcagggacaagcgagctcctcgaatatgttcttccggaaacaccctcgccttgtgcgagcaagctggtcaggcgcgcccacaagcatgcctctcaaagccaaagggctatcccgtataatcgaataactaaggagtttgctcggctgaaccggtcgcctaaatttgcagagcttattcagaaggcttgtggtgagatatcgcctagggaaacgaaggaggctgttaggggggttccaaatgaaccaagcaatgaggacaacgagcactcagggggaaaagaagaccatcaccaagagaccgacgggcgacagccgatgctgccagagaaatctacggcagacgatgcacattcttcagaatcagcgagatcaccgccaccgtcaccaccatcgccgtcaccaccgccgtcgtttacccccaagcgccgcacgatacaagagatattttacgatatggaaaaggtaatgagaaactcctacaaagccgaaatgggacacgcatacattctctacgacgatctgaaccaagaccccacattcaagctgggctcatctacgcaaatcccccagcgaatgaaatcccataaactcaaatgtcgcccttcatggcgctctatccaacgacctgccgggattatcctggcccccatgcgcctcgaacgtctggcgcaaaaagagctgcagaacttcaagtgtgatgtgcagtgccactgtggtaccggacacactgaatacttctggggctcaaaggatgttggagttgaggtgcttgacttttggtctgagtggctgcaaggcaaaggcaagggagagctgaaagatctggagccttacgaccgcagcggcagactcaaggacttctggacagatcgactagatttgttccaggcctcaatcaacgagtacttcagatgcggcgattctcaatgcgcggagagtcaggaagacgcacgcgcctgccaggcctgcctgcgagcaggatggaaaagatgggcagagccaacacgcgccgacgagctcaaatacgcctgtcgaatgagcatttcatctacaacaatccggcgcataatccagagcaccaccagccgcagtatctttggaatatcctttctgatgtttatcgtctctctgatcagtcacacagtctccgcgtggcaatggatatccgacccgcgtgtttttctctgggtcataccactgaggttagggagtagctggattgggcccggaggccgattacctgatctagcctctcccaggcttctatggattcttgatatgacacttatcatagtttgcatttatactcgacttcaacaagatggtgctgctcgtttcacgtttctcgttccacatccgagtccgaatccaagcccggggttcaaaaaagctaaggggaagaagcggccaagtttggacgcaggagatacccttgagcaagaaggtgaggttgaagatcctgcagttggtgatgtcgagtccagtaatgggcggattatgaaagacagccagtctgagttagggggacacttagaatgtaatgcaataggacgttc

SEQ ID NO: 3905 - DNA, 4759 bp, Emericella nidulans
tatatacacatacgatttaggtgacactatagaatactaggatctcacaccgtgctctgcgagatatccagcgctgccgcaacaagtacggcgaggcttgggctgaatacgagagacaagttccgtacctattcattcctgttagtatgccgtccattttcttaacatcaagctaatgaatctccagtacgtgttttaggagtgttgcacctcgatccaacctgcatatagactacgacgtaaacctgacacgtgcgccacctatcaatagagtctactaatatctccgtgcccctggttccatactaatatgtaccattcactgtacttattgtcttcacttctgtacctgttttctacgttactatttcttgttgtatactggtccgaagatacaaatatgtttccctattgggtgactggagccatataatcatgatactatgtttcattatgctgtgaagttacgacgacaatgttatcctagggatatcaaaacacaaaatcacgtgattttgtcttatcagcatcgccccgcatcagctcaaagctcctaagcttcaaccctattgagcaaaccaacaccttgccagcaattgacagttaaaagaaagaaataaagcccaagatgcttattaaagaataccatcacgatgtccctacagttgcggatggcaatggctccatgcgtagggctttcctaaaccttctctaccccgccatcaaactaaaggcacttgcaggaatatacgtcttccacccctctatcccaggataccccaacgcccgcttccccggggtagtcgtattcagcgagatctaccagggttcgtgaccacacccaggaccaacatccgcgaccaattcgcttacagttgcttgaacatgttcagttaccggccccgtcgcgcgcttcgcccgccagatcgccggccagggctacatcgtcgcctgcccgagcagctaccatgaatttacgggccctgaggcgctctcatacaatgcagaagacacagacaaaggaaacgagtggaaggtctccaagaaactctctgcatacgatgaggacgcatcgctttctgtgtcgtatctgatttctctaccaacatgtacgggacgtattggggccacaggcatgtgtctcggtggacatctcgcgtacagatgtgcacttgatgaaagagttaaggcagctgtttgttattttgcaacggatattcattcgcataccctagggaaggggaagaatgacgacagtttggccagggcaggagacattaagggagaacttgttatggtatgcatgtttcgagtttctttgatgatgaacgtatggctaacgggcatcctgcggacagattttcggcaagaatgacacgcatgttcccccagaaggacgggacttgattcgctcgacgctccatgagaaaggcgtgctgtttagcttttatgaggttgcttgggcgcagcgtaagttgtgactatctgtcatccgccggtgcactatctcagaccaagctgacaccaacaacagacgcgtttatccgcgacgagctcagcaaaggccgctacgaccctgccatcagcaaggtgtgtttcgaaatgctcctcgagctatttggacggacactgaagctggaccttggcgatcatgatgggaaggaggtcaaggttgacgatgtttgttagcatgtcagtaaatctcctagcctaggtatctaggtagaggcgtcaaaggccaatctcatcaggtcaggtcagctacggccaaagcttgccttgaggattcaatgcatcttatgtaagcccaatggcaccaccgattttaagcacgacctgtcaaggaaacctgaccaggccagtcaagagaaccttactgtaatattatatttcattcttagcaggagagaaacgccacttacagctggttgcaaaaagggcgcaattgttaatactctctatttctgagctcttgcactaagctgcaccgaggtgagtctgttgagctcagatatttcatctggttagtaatgccaagggttaagagagtgagcaaaagatggtagctgtcacagccagttactgcagtaggcccgctaccagctaccggtagcagtgaagaggatataaggacgctgattttctatgtaactagtttttttctgacccttcgaacaatactcaccgtccttgcagagttaatcccttgctagaccaaactcgtagtacgatcctacagctatttcatacgtgcaataggtgaccggagcgcgctgaaataaagagtgaagttatattgccttatatatccctaatctgcttgcaagtatagtaaacaggatttggtagttcatgttgtgttgctcttcctgctgagttggtcttatatcaaagtgcatgcccactctcaacccccactcgttcgtggcttctgacctacctcttctccctctcgaaaaactccttgagtagggaattgatctcatttggtgcctccaactgcacccaatgcccagtcgtgcttaccctcctaaacgttagatccggtgctacctgtttcagctgctcctcaacgcctgggaattccagctttgttggctgcggacagatcatgaggacaggcatgggtaatgtcgggtcgagattcgactgaatctcatctttctcgttaatgtttgtcaccagtgatcggtaccagttcaaggcaggcccgtgattgttacgcatgatatcctggtgtatcttgcgctcctcttcgcaaatgtaggctggctggggcgcagttcggtcttggaggagccatgtctccatggaccctttgggcccgacgtgctctaaccagagttccgggtcttggggatagaaaagggtgaagaacgagtcgaacttgaaatatcagcttcgacccttttcagttcccggcaaagaagagcttacatgctgatcgagaatatccccagcatcaggcctgacaaagaactccacatacccgaatctctccaagcctaggaactgtttcgtcagggcattcacagcagccagatcgaaatgctctccgggcctggaataaggcacgtctagaaacgtgcaagatagaaggcgacttgggaagtagttggcaaggcgggatagcagggtgcagcctgtatcatgggcaacagcatgaactttgtgaatgccttcatggtccaatatctcgatgatttcagcagccattgtcttggctttgtagctctccagcgtccacggcttggatgtatcaccgtaccccagaagatccggtgccagtactccaaacccttgtgcagagaagaactggacttgatgacgccagtcgtaactggatgatgggaagccatggagaaagagtattattgggagcgacgggtttataggcgagttgtaggcatagctgtatgtatgggctgtcgtgagcgataagctcttggcgagtagaggaaaggcaatgcttgccatatcttcatagcttgagaagagatgtatgctctgcgaggtactcaccgtatagcaacctgtgtgttcatatatacatccccgcatcagacggagacttaacggagactttgcttagccggcgttggtatgagctctacatatcatgtgacatcgcggtctgatccttctatgggttttcgcagagagcgacctgtaattgtcattcaggttctgtcagatggctcttgacctgtagcagattacttagtatgcctggttaccttcctagcatcggagttgggagtcataggcaaatatggaggcgaacgcagggcatctaccgctagagaaaactgatcaagacaataggagtatgattccagcaggcaaaagaacctagcaggtccagagatacaaatacaattgtcttagctaacctagttaagtaactgcttattatcaaccatggttccctcccccaactcagtaatctgtggtaaccgttcaatgaatgaaggtataaatatgcccctttcttgaatattctgcatgtacggtacccaccaattttcgagaaaacgccgtagcggcagatttagtgttctaaatacagattcgcaggtcgacaccagcgagtctaagcccgcgttggtaaccctaccctcgccttgcagaatgctgaacctgggaaggcgcgtcgtctgacaggtatgttcgagtttgaggcacgcaaagctgcaggcacgaaacacggccgacactctaagagggctgaacttagtactggtgttgagtagatcttccgttttcagaagagtcgcgaccaagaagcatacggtcaaaggagactgcacgccatggattgtttcgttaatcaggacatgcagcgggagctgaccatgagacgaacatgcgcagacatactgctccgggtgcctctcatcatggagtatctcttgaagaattctagagttcgctgcaagcggcctgagggcgagtttcaaatgatggttaaatcgatctgctcgcgcagcttggtcttctcctgatcctatctgactgtatgtatgccatgaccgcgcgagttccatcccgatacagcgtgctatctggtgtaaggctgttgttcgcgagggacactctacttcgcgatacaagaaagctcctcgatcatgaaaccaggcacacattgcaagatatttggcgagggcatcgtcttcatccaccacgcggtactggccatgatatccggttgttggtggtacttcaatgctgcaagcggcgtgtatgtcatttggtgttg

SEQ ID NO: 3906 - DNA, 2914 bp, Emericella nidulans
gcaagaaaaataaaagaagtggagatcaaagggggaatagaaaaagcaacacaacacaacgcaacctggaagacttaaccgcctgaaccaaactcgtagtaaccaggcttcagccgaccttggatcattcgcaaatgaccccgaagcccattctatagcacctgcaaaccccgatcaaaattgctcgctggtctctatgctcacatcaatgcccgcgggacagaggacggtgttcgcccgaatgccagccacctagagctcctagaatcgaaaacgtcagtattaattcaaatcatcagaaacttggtagcgtgagagcaagtcgaatcggcacgaaaaatgtaggaagcgaacagaagggacgatttcatacaagcacacctaatgaaagctggattcaattgcaggccgtttcaaatttgtcttgcgtcggctattgcgactgcgactgcgactgcgcactattgagcctaaacttttctgaagcaagtacacgctcgaccttgtttaggactcggaggtgttcgttcttaagagccttgaactcgtcgtcgagctggttgtgccacgggtacaggacaaagacctggaacgccagcgcggacgaggcgaccgtaaagttaacgagggagattccacgagtgatgagcggcattttcaagttttccaagtcgatgtttttaaaccgaatttatattttcaatcgcagtcagtaagaaaatcgtatagaaagactgtagaggactgtaaaggactgtaatgaggagaggtgccggaagaggctggacacagtgggagagaggggagagtggtctggcgtactgatgaagtgttcaggggaaagacggtgcttattagaattccgaggtccagctgggatccgaagaaacgcatggaaatagcgacagagcctcgtcgcacctatagagaaagacttaccccgaggcctcagggacagtatatcggcctcaatgccgagtgggcagtggccgccaccatgtgggcctttgtgacttggtctcggagatggttcgtatcgtcggatccgacgtcctcagaaaccggaattttatttttccattatcgcattgaacggaaaacggctgaaggctttcttcacatgtcggctgtcagattccggcctcgactacacatcaattggtggcaagctgatggcttcaattgtgtagcgttcgaactgaggctgtcacatcttagctcagataattcgcttcacccgcgtgttcatagccttgcctttgattctgctgaaattcatgcctcaggcacacatagcttgataccccgaggcataacaaaactggatgtgggactccattggtcgtctggttcagtcacgggatatggagctaaggactttgttacgaggggaatcgtcacttacaaaggtgatatgcaactccatacgtcaagcctctcgtcaatgccgcatctatggacagcaatcggtccgagccgaagatgtatgcgtgcagaccggcctggagacatagtcaaagtccacgcaccccgtcaaattgagcaggtctttgattgactcgttcagcagcgacggacccaaaagacataccaatgccttcgtctacctttcttgtaatggattttctcattgggaccagtccaaggctgctgccctgtcctagcacttactccaccagccattctcacgctggtcacctgcgtacagagtggcagtatatttttatactggtgaatcaggtgctctcttgctggatcaggctaattgtgccatcacgatagatcacagcggatgatccatgttcagggtttgaatgataagtcattcagactccgagaagaaagcgtaggtcctctcctgggaagggagtggacgacagaacaatctgtcgctcaagggcccgagaccgaccaagatgcaaccgcgcggtgcagtacaatatgctaccccggtgagtgatcgtttgttctgcttgggaggttctcaagggcgacaagaaagttggacgctttgcctgcaggctatcccagctggagggccatgagttgtcttcctggcaaagtagttatcgacccggttacgattaattggttgaagccgtgttgaaaaagctattctagtctaatatagtagattaactacacctgccattgagatccgtcaagcacatttaaaaccagttgtacataggggatagacacggtatgcgatatacgatcagttgaatatacggcctcgcgcggcagaaccacgggaaaaagaaaataacaagataataacaaaatagaaataaaaaaataataaaatgaaattgattggcccctatcatggctgcagacactagcagtcgatgaaaaggcatagcattcttgcatctaagggcatcgtctatcccatcctcaataagccttctgtactaaggtactagaagtacctaacccaccgtcagtcgcatacaagcaaaccaaccatagcctagtttaacaaaggtgtgttctcatcagccacagccccagagtccttgccaaccccatttgcagtatcacttgctcgtccggatccagcccgcttaatcttgacaaatgggaacctggtctgcttgggactccgcgccaggttcgacggcgccaggttatcgagctgctgccgctgctccggcggaatggtgcttatgagtcctgttttggccagaggtgctgtcgaggaccggcgaagggtgcgggcgtctagggttagggctggcgctggggttggcaggctgggttgccgttcgacggcagggaatgctggtttggaagagggctcgtgcctgtcggattcgtcgatgatctccctgtttaagttgtgcgaaataagcatacgagatagggacgcagaaggtaaggaaagcatactttccgatcactccttcac

SEQ ID NO: 3907 - DNA, 2462 bp, Emericella nidulans
gatccgctgcgtcatgtggtatgcagcgcgaacgagatcgcagcaggcttcaatcatgatcagcgtcttgcaagtatttaagaaccttggggacaatcctgtaaaccttcatcacttccggtggacgcggactgagcttgccgatctaatgcgcacatggccgtgctggagggttgtggttttgccgccggtgattatacatactgatgtcgagaccgcggcggggttctttggccttttatctgatgctcgcctgcgacgaggctcaaatcaacaaatttttagccttgactgagagaccgaatgttacattcacccctgaattccatctggagcagctgcccgtggcaaaggaggagttgcgcgatgcagtcaagggtgtctttgggtccgaggagagagcactggtcatgcaaccttttgtcatgtttcgactttgtacgaaattttgtaaataggaattagcttcaatttaccctagcatgtactatccccgtggattcgcgcgctcagctgctgaactccctggagggctccaaatgcatcctatttctccagtcaatcgtgagcttagccctcttctgctttgacagccactgctgaaagccccctcaatgctgcgcaaatgccgagttttgctgcattgctctctcgagatcaatatctgtatacgtcgacccatccactcccgccgttgtcttctcttgcaccgtcaagtccaaccctgccacatcacgcagatagtcatcaacaaccccaatcaactccgccaaattcttcgtgcagccagcatggggcttgcgaatctggcgagggttattgccattgcaggtgaactgggcaatgctgccctggcgacctatgatacggtgaataacccggatgcggcggttgttaatatgccgggcatgctgttcggcgcgggggctttcacgaaggtgtcgcgcgacgcgaaggggctaaagggtgtggctagctatcgcagggggatgcccacgggtgagattgcgtcgctagggaagttctttgagaatggggatggcaatgcgcaggctatactgggcaagatgtgtaagctgtagccttggcttggaaactaagtgtatagaaggtcatagagagtttcatatcttgtggggcattgtcggatactctcgattgtgctgggcctgtttgaggaaataacagctatattgttgcatcagatatatatatctgatgtacgcgcggaaggatattaagaggtaatgggtgctttgggtatggaaacaacgcctaacgtggttggtaagcgagctgcgcaccttttaaccaaccacaacgcctttatgtaaattattatttcaagcaactagcttcagaattaaactgatattgttcaggctggtaaaaggggaggatgaatagaggaataaagaagcagggaaaagatagtattttatagagtacttgaccaggctggtcagatctagggcagctggatttagccacaaaggagcccattttcagtgttaatttgggtgtaatttgagatggactgaagctcgctgcagttgaatgcttattcaagttcagtcagaggcaggaagtagaatacttggtgggtgcagaatagtagtataagtatatataacaatgttaaaacagtcgctcgctgttgagagttacaggtagaaatgcggctgtttatggccttagtagcagtcattttcagcgtcgattccacaggtcatcgcattctagttgtaatcgtaagtaattccggcatctcatttgaggccattattcaggtaggtcagcatacgctctgaaccaatttgcctgttttgtcttggactacccctccctgtcgacgtcctataacatatcctacacatatacgtgattttcaacgcaactactctatccataaggtcttgagcactttagggcaggtgaatctaccagttctatagctgagagatcacctgctccatggtacttcaccaggatctctctcatctcctcataccgatccttaaagaaaaaccaccgcggactctccggcaaaaaaggcaacggcaaaacacaaatgaactgcggcagaatttgcaacaccgaagaacctgccggtaattaaagaacttagtatagtattttatatacatgccccaaaaacttcatttctcctgtttccaggggtggccaagaacgggcggcgctgggaatgggcatcctctgattaagcaaagtaaaacgaaaacggaatgctatcgacctggctagagaatcaagtacgtatgtatatctttaagagatcacgactgctaggtgagttcagtcccgtggcaagagcatatttcttccacctataacatctcccaacctaagcaatcgatgtttagagcgagcgtcactagagtataccggaagacgaggttagggaattgttgtcttcaagggcagcagacaagaccatgcat

SEQ ID NO: 3908 - DNA, 4678 bp, Emericella nidulans
  unsure (1)..(4678): unsure at all n locations
tatttaagatgtgatgtattacttccgagcttttctatttcgctcatcaccttcttcccattcatgctcgacgtaccccagcctcttcttgacagcctggactgtatccttgtcgcccgtattcttgcccatattgtcgcttagcttgacagcggcccggccattagcagaggaaatttttatgacaatgttgagcggttgcgatttttcgttcgtggttgtattgatgaagtcatctacaccacatcagttcggttcagtgaattcacctcaaggtaggagaaacacatactcgtgaagaatgtcccaacgccaaaaacaggcttgaacccagcctcctctgctagaactttatactcaagacagtgctcgatgtccaacgagtccgagaataccactgtctttgtccctgtaatgccctcacggtcgtagaaatcgcgggccatctttacgaaataagatgggtcgcctgagtcctgacgtacgcctgcgtagacctgggcatacgttttaacggcgggtggagggtggtctggggaaagcggcgctgtgatgggggctttggtttcggcttcgctctgaatattggattcggcagtcgtgctgggccctgaagctgttgttgagacggcgccagtgccggcggaggtataaatcgggataggtttgcggaaagcgtcgaggaaggcaggggtgccaaaggtgtctgttagtgcgatcccgaggacctgcgcttgtcagctaatgctctaacgtcgatatgaaatggttgacgtacaccttcaccaaagcaaccaagccagtacttcagggccatctcgtttgcattctcgtagtcgtccgtgatcgctgcaatggtcatgtaccactcgtgcgctactgtcccgaccggatcaacatcatacttcatcgcaaagtggacattgctactgccggtaaagacacctggtaaacccttggcctttccctccctagcagcccgacagagcccctgcataacaaggtcctgggtgtggtagctgcggcgccgcctggtcccaaactctgaaaaggtgcagccattctctagcagaacatatcccttccggtatgccttcccttcctggcactcgtagttccagtccttatcgctgaacatgaagtatgcctggctagtcagggccagtaaggggatctcatataggatcgtatccacccaggcacccttgactatataatcaatgtcgccgaagtcactgtcgcttcctgtatcatttacgggtgtaaagtttatatcaatctgctcggagggcttgaggcggaaattcgtcaggaagtccaggtaggcggtgttaaagtaagggcagcgccttttgaggaacgcaatttcgtcttctgtaacgcggatatttgcgagctctagaataaaggtgttagcgatcgacaacctgtcggtttcttgtacgtactatccatttgagccagcatccatttgtatgcacctcgcgtcaacttcatatgcggggttcggttcgtgaagccataggtaacctctacgcgagtgtcagccaacagcgggttcagcgaatacctatcacatacggacgtccggaaagtatttgaggatcgcgcattgcatcgtcagcttgtacaaatctgtatcaagcagagagaagaccccgtccggaagcagggagtgctcgcccatggtgaaaactatatgagggctgaggctgctcaattggcgtggtctcaagtatagtagtcgcagatcagctcagaccatgcgcaagaattatccaaagcagtcaggaacgaagaaaattgagtctgtcaaaggatgagtttatttaagcccactgcggggggtgggggagagaagagggatgtttgcaatgtttgcactagttcataagcccatgaggcgcatatcacagcgacgtcattgtacattttgtttgctatatcttgatttattgacagatggttttcattcagtatcttatcatctcagccgttgtttgcttaactgatttttggcaagattgtattctataggttgaaaggtgctttggcaacggttcgaaagccttgcgacatcggcgacttgccggctagggccaacgccgatgccgacagccctagacaggtatgcaagaacgtactttctgccagtactggtgctataatagcgatgctacaatccatatgcacgcataagcatagcatgcaaggcacttgcaagcttgcctcgagttatggctaatggtgttaggtagatttattcgtccaccaagtacatagttctatatctagtgctatatttccattactacaacntatgtcactggccaacagcactcttaacaagcttctccaaccgtgccccctcactatcagcaagatctccatggctttgcgcagtaccgataggatgatacgggaacggcctagggcatgtaagattagtttgttctttgcggtacatgaaatgcacctctggcggggtgaggactaacccatattccggagcaaaagtaagccggccattagaatcagtctgctgcttgtgcttcacaatgtcaagccagaatttctcgaaaaatgctcgttcctcggcgaaagcctggttcaagggctcagggcactgtgaggcttgcgtcgtgcccatgcgagtgtggatgtgaccgacctacagggaccggggttagggactatgtagaacagggttaaaatccctagataacctcacatgaggaatgactctcttgaggatatcctggtcctcctcatttctatcgagaagccgctcgcatacgacgacccagtgtgagatgtcggcggtgatcgttagcctattgctgtcagagaacactcaagttggcctggatacgagacgcactcgggcactttctgcaggatgtagtctgcagcgtagggattgaagagggatcggttgcggtgagtctcatggcacactcggccgtcgaatccctcttccttctccacctggagcgcctttttgtagaacgccaccgagtcgtcccagctgaaatggtcactgtagcagtcaatcaggtccattctaccattctatccctcaaggattgctgtggacaacgtacgcccccgactgcgcattaaccctcacaggcttcaatatcgaggcgagtctaagctgtgatctgaagaactcggcgtgatcatctgttgttaagccaggaggacgacggccaatgtatttcggccaggacgagaacaagctgcttctattagacgctgcgtaagacgaatactaaggtggttccgaacgtaacgctggtctccaagccgacctcgtcgcaaatgctgcgcagaagctggagttcctcggggctcatgccggcaaagtcgatctcaatcccggctgcattagctatcgtcagctcatgtcttttctttgagaagcccacaaaggacagtaccgtatccatgtgctttccactcaacgaacttctgcttccactccgactgctggggaccgggctcaacaccccagagagatctaaagcgcgagatgacgaccatgttagtctgagagtttcggcttaagcaaaattagacagcgacttgcagattcaaaatgtgaaatcgaagtataagtaacgacagagccgggctgaggggatacttacccttcacggattcgtgtttccgactgtctcgatatggtattttgtcccgctgcagcacatcatcccccactctccccactaccacgcctgatgtctgggtgtgcatcctagctagcttataggttacctcttgttaggtggggatcctggacgcttctcgtcgtcaggaaacccggtgcagatatggaggggagttgtctcatcgcgaatgcagcaaccgggaacgtcaattttccccgcgctccttgtatatactccgcaccccgcacgtctatatctatataataactgcaatatattttcctcacactgagctgagagcaattgatttctctcagtagtcctccagtctattcatgatggcgccgcgaactatgaaagcgctcaactatgttgggccgttcaatgttaaagtccaagaggttgagatgccttgcctagagcatccagacgacatcatcgtcaagatcaccagtgtacgtccacgctcttattctctgcctgcgatgctaactgtaccaggcggcgatttgcggttcagatctccagtgagtctagcaggaaccctggatacgtggaggcatactcacccattgcagtatgtacgaagggcgaacagcagcagaggctggcattacgttcggtaggtcctggaaagcacccctcttcctcagcggcactgacgctcgtgcccaggacacgagaacctaggcattgtcgaagagctcggcgatggagtgacactgctcaagaagggagaccgggtagtcatgccattcaatgtcgccgatggccggtgtcgcaactgtgaggacggaaagactgctttctgtaccggcgtcaacccagggttcgcgggcggcgcttatgggtacgttgccatgggtccttaccgcgggggtacgtatgctatatccaagactgaaatttgggctaatgatagcaggtcaagcacagtacctccgcgtcccgtacgcagacttcaacgccctcaagcttccccccggcacagaacatgaagcaga

SEQ ID NO: 3909 - DNA, 3275 bp, Emericella nidulans
gcacaccgagagactctgcaggatgatatccggtataccagccgtctttttaccaatatcacttggggtaaagaggatttctgggacagtgaaacgttcgttgcccagaactaggacgtcctcatttagctgctcggcgctagcgccggccagtaccaggctttcttttcttggatcctaacaaagggtcatgaggcctataaaacctcgtttgcctccattcggatctggcaggacgtaatcaactacaacaccatcagtgggatccggttgtccacgtttgcggttccctttccacgtccgctccaagtcgcggataaaatcattgctcacgaaacacaccgactctttgacttcgttcattatataagtctcgtccaccatattatactgcctcatagataccagctctttgaggtaattggtcaagtgcttgccgccaaggtcgagtcgccgaattccacgttgaagtggtctgcctctataaaccggagtgataaccgtgtgagaatacccagagtcaaccaccagtagacactcggctggggaggcaacggctcgaggttgtgatagtaccgaatcttcaaataaggattgaatctcgttccaggcattcagcgacgggcctgtattcagcgcgaacggtttagccatgcccactcaataataaagaataagatatttagacttaccaacacatctcaaatagcccccgaacccccactcttccattataatctcatctgcatttttctgtagtgccggcaaagcatttggagcctccgtgaaaatgatagtcacgtcctctggatccgcaatgtgtaattccttagaccgcacggtcctctcatcgaagaatgaattctcccagatttctttctgtgcttcccagtttacagtatagcccttctccacagggcgcctgaaaagcatttcattccagtccgtgacatttgtgcctatttgagcaccgacgtaagttcggttggcgcgagtcttgacaatggcatttggaatggcggcacacgctgagagagcgatttcttcatcatccagaggttgagagtcaggtgcatagcctgctttcatgttgtacgcgccattgtcgataatgaatgttttgccggggagagactgagcatggcttatggaattcttgccggacgggcgcggtttggtggaacccattcttggaccaaagaaaaatgggtgcgaggccgattctaagagctcgtgcgagggatcattgggttcgagaggtggttggagtcgcgcgcatggaagatgatggatgagcttgaagctcgaagttcggaagctttttggtcgaacggagataagtatcatcggagcccgcgttgtcccaatcaggaatgtagggcacggtcttagggcgcgccatacaagcagtcaacaatgagtgtaaaagtatcaaattacatatcgatagtgcccacattttatctaacaatttttgtaaccaagtttgtagccaagctgcttattatatctttaacgattcccaaatatgtgatcagtagctacttaatacaataaatagaccatcgtccagactccagacttgcctgtcataggcaaacggaatcctataagccgattgccttttatggaagctttggaggctcgaggaaactcctcaaggattgttactccgtacgttgtatactcgtagacaggatggctatcgatttacctttggaatatgagtcatcattcaagctccaagagcaagttagtgatgactcaagtctgtcacagggcgtacctttttttggcttgattcaaatggacttcgtcccgcaagatccttcaacattcaaaccatatctgacaacaatggccagagttgactttgtcacacttgacgtcttcacgaccaagatttatgagggcaaccccctcgccgtggtcttcctccccgcaccgacatctacccaactgacccagcgccaaaagcaaaccattgcgcgcgagttcaacctctccgagacaatctttgtccattctgagtctgggcccagcgagtctcgtaaaatcgacatcttcaccgggagcgaagaactaccgtttgctggccatccaacgatcggagcggcgtcatggttcctgcaccacgcgccagagagcaaacctgtgacaaggctgactatgaaggccggagattttccaataacgttccagaatgcggacttgggtgtagtttccgcgcgggttgcgcacaacgtgcacatccatgagaaccagtacccgcttgatgagatactgcgactctacccatccgtcaagccatacttgacccagtcatcgattgccttgatctccattgtgaaaggtatgagccagcttctcgttgaattgccctcgcttgaagctctgggtgctgtgacgactgcaaatggtggggaagaagcaagttcatcttatctggacgccggatgggccgaggggatggttacgacgtacttttacgtcaaggacgtcaaggacgagcttctgggtcgcaacgttatccgcacacggacgattctggggagtctcgaggatcctgcgactggcagcgccgcgagtggcttaacggcttacctctcgctgaaagagggcagggctgggcggttcgtgtacgacattgtgcagggtgttgagatgggtcgacgtagtgagattgggcttgaggtggtgacaggggaaaagggcattgagagcctagagctgagggggagtgctgtgaaggtcagcgaggggtcaattgttgttcctcaggccaagtgaatggatggagtgaacactaccggaagtctttgacattggcaaatatcctagtgctggatacaatttgtaagtctgttgatggtgaacaatgatagtgaatgagtctcagaggtctcccagccacgtacttactgcctgtttttatttacaatctactctcaaacataattgacaaatactatattctctttggggcttttccccttaagtctttgagaaagtatttatcatggctgaatccaagagtcatgagtctaaggccttttccagaaacaccctttatgccctcccgaagacactcaagaaaaacatctgccccagatccagacgcaatctctccgatacaaactcagttatgcagagcaggccaacctcggtgccagctaaagaatatccaagcatatccagctacgagtcgagacggcctcgtgcaacccgcatcgtctcagcaccacagcaccgttgtctgaccaaacctgacaaca

SEQ ID NO: 3910 - DNA, 2903 bp, Emericella nidulans
gtctacgtccgctaagagagtaatatacgatattaaggagtctggccaaggggcttagcaggtctctatcatcatccggacgagctgcttccccaatcaagtcatctcttgaccttgttcaactggagatggctttctgctgttgctaataagaactgttgcggtgccggcaaagacgtatcaatggaaggaccacaagctagagaagcgccgctctgctgtgggccggccattgaaaaagacttaggaccatttttaaaaaaaaaattgcaaccatgctaggccggagctcgatgcaaaagggcgcatcaggaatgctccggctaccgcacgaagttttgcagcgcacgaacgaccgcgaggaaaggcacggggacgaaaggaccacaagtttctggcagtcagtcacaggctagccttgtcttgagctgcccaagcctatgacttctctggatattgatactcatggttgcgaacctcttccctaacgcggccgtttcctgcggccttcaacgtccagctggcgctgtcttctggctcggcagcggtacgggctgtcccaaagtctgttcgaagcatgtcgggggtcagccgcttggcaatgcagtggtttgcagaaattgattatggcactggcaggcactggcaggcactggcgaggtcggtttccatcgatgagcggatgggcgttatatgctttgcttgtagaaggtcgtcgggaagcccgagccgtctgcacctaacagggattgcggttctcctgttgcaatctttcctcgtgggaaggaattaacccaagcagaattatggtactacctggctgtcatttcctttcctaggctggaagtccctttacagcccattggaacgctgcagcccagcagccgccgctactcatggataaataggcggctactgagtcgatcaatactttcaagttcgttcgcttgcgcgcaagactccaagatcaacgagcatgagcgcagatgtgatactacgcgaagcattaggtcgtcagaaagagctccaatcttgcatagagcatttccagcgacttagtccttattatcaaagagctgcggacctggtggggacactttacgggtagtatcacatataccaggacgcctggcatctccaataccgataccctaccgactaggccgcgtgttggtcaacgaatcattgtggcatatagatcccagctagaccctggtgctgaatggaccagtcagagagagcgtcacttgccgtagtaagccaaacgacaactgacatctgcatctctcaaccgaatagcaagccataccctgcttgtccaaggccgtctcactgctcaatgcattctcctctgctgatgaaggtaaattcgtaacgtttactcattgacaacagcggcgactgctaccggcgtgtcagagcgactccgcacctgagtgactaaaccagtccagactggcgaacgcccggggatgaggccagcattggacaccattccgcgattcatcaggtcagcgagaatcgggcgccagtgaacctggctagtcagaatccaacgtgctcatcatggatggtctgcatgagtaattgtcatagcgtcatcagcctgacgtggtggcgatggaaggcgagcaagactgagttggcgagatggcttggcagatctgacggcgtatcgctttactggggcctcttaccccaataaccctgaactggtgggcttggccggtgcctggcagggctcgagtacaagaccgacttgaccgacttaaccgacctgttcgactcgttcgccgaccgcttgactcatggccgataattcagatggatcatttatgatggacacgtacaaagtctgttttgacgatctcatctgttatgcttgaaatgggtcacgcgctgtcgatagtgggaaactgtatggaagaaagtctccggtaactggagagcaaactcttcaacggaaactcggttacggtattacaaagctattgtgccatcgatcttaccctgtcacggtaattgcggtacagaactgcggtacaaagggtctgactagtaacaatagtttaattaaactgaaattggtcatggtgtttcttcgtccgcaccatgaaactccttgagacaacggaggtgagagaaccgacgtacaagtgcgacaggtatggattgcttcccaagtgcttgcacgttttgcagacagtttttctaagctaaagactgcatcgttcgaggtggcgggtgtttttgtgcctgaaggctctgcgccaggccctgggtctgactggggcgttcaggaacccgagccagcagccagtcgtagggcagaacggtcgaatgcatctgggtccaattccaaagcgccgatcagcaatttgaggcccagacagtcacgaaccccttgcgaccgtgttgttattggccgacatgccgctagtgctcgtgtcgggccttctttgttgtccccgtcgcccccgttgtatttagtccatcgtcttcccccagcagtctctttgtccttttcccttgattccaccgctttgatcctgagcagcgctcctctacactcgttaccttaccgttctcgttcgcaactgcgatacgctcactcgttcgtgtgtccagttcgatttcaaaccaagtcgttcattcccactcagcctgcatccgctgattccctgcgcatccgctcatctccgcatcgcaatccaaaagacaagaccactccgtccttcaagaccgattttctattctccgttcaatcaccgcttcacgcatcctcaaaatgaagctcgctactatcgtctcgaccatcctctgcttgggcgcggccagttcgccgctgctgacgagactcagacgtcgactttgaccactactatcaccaagacgctggtgcg

SEQ ID NO: 3911 - DNA, 2562 bp, Emericella nidulans
cgatacttgaagcagagaatcttgattgattcagtcgtgagtgcggtggctctggattagggtcgcgtgggtgaagacgctgatttatccccgtattcatttgcgtatacactaaccatgactgtagaatatacgagaaatggagttgctttgcacagccactggcagctgtaaatgcatcgcatatcgcagtcattactccttatgcatgttgatgttccttgtacatctacagagttctctgtgttttcggcaggtatatacatacgcgaataggtcggtaagaaggcgaatagtctcctttggcgaatcgctatcaaagtcaatctatctcgaagaatcctttctctattcaatcaccagactgcaaatatatgctctgggtaccgcgtcgtagctcgtctgggcgaacatgcggccgtctgcacaagatatacttgcactggcaggtttcacctcagaatactcctagttgcggtacctgctgatatcattagtctttcgccgccaatttcgattacagagtaccgaggtaagctgccagcaaatattcagcatcaaacgttcagaagcaggagtgcatagtagagtcatgcctacaagacccatcagtcaccagaggagtaagctggatagtttcaagcttgacctgcagtgttgctcttccgagttcgtgccctccgcaatgcacacgctctacatgcgtgtaccttgcgcgcaagcatgataatccctgcggaagaccatgcaccctgcacgtttgctgcttatctgggttccgggcccggctttggccctggttctccacgcgctcgcgttaaatcggctccttcccgagtgtcatccagttcaacttccagttcggatatcaattatggatatggatcactgctgaagctactgcacttatccgatactaatactactaggccatcaccggggaacctcgagtgtgcttccctatgtcgaatccgacacagcagtcggagcatcgcgatttagcccagctcagcctattacgcaaagctataccccgtgcccggaagcgagaacgtactgatgtttgttgtatgcatgctgccaagaacagaaatatggtctgaaattcagctctttgggtttaggacttatctgcacttgcagtagtgtacgagcagtcatcggcgtggtccttactgttcgtctgaaagcgtacgtttcaaggtattctgaggcgaagagaggagtgggacggcatgggacgaatctatgcaagcttgtctttttggagttactggaaatttgaacagacctaaggaggtaaccagattctggctagtcggcgtgtgtacagggatcatagggggctttactccgcgaagttagggctcgacttatccatacggtgtacatgtctttacttaagtttatccattcacgtacagcgtgttctgtatacttgtgggatgatggtagactagatatagcacggctaccaatacctatacctgcgtttcccctatcgaggagtataggagtacaattcctcattaagcactggggcgagctggaccggtcatcaagctcacgactcccgtcaaccctgctgcacgcatccgactgcctctcgctcgcacccatctaacctatttccacccctcaagttaaatcaatgtccctttgggaaacagagcactcacccgatcttagtgacggtgccagctgcttcgaatagtaccctgggtttgactctgctgcatttgtccttcgcagacacgggcagtatcactgcagtccaatttggaatcccactcgacctgccttttccgtactgctacgtagtcaagacaaaagtacgaactatggttcgagtcttcagtcagtgcaggtcctgtttattttcccttttctcttagactagcagagcgtatccgcgccagcgtggtgcctgtgcactgcatctgctcccgcagtaaagcgcaggacaggaattgtttgctgtacaataacgtataggtagaggctaggtatgcaactagagaatcagcagcctgtgctgacaaccgagcgtgacaatgggcatagtcgggcactatggtgtgggtccataatgggattataatcatcttgttcttaccctcgcaaataggattcgtccctctgcaaggatacgctgcactttgtgcattagtgctgggctagtgcatgttttccttcgaaggcagaaggcactccagctccagctctagtgcttcggtaggtggcagagttaccagaggggagaagagacagaatcaggaaagcacttccgtgattgaattagataaagtactgaattctcaggtaaattttttgtatgcaaagacgaaactccaattccaaactcatctgatctaacgccaaccactgcttctgcacctgtccctgcacctgtagatctgctgtacccgtttgtgtatagtaatgcgtgtatgtatgcatgcacccgctagaccagaccctgttagtacatccgaattaactgacaattgccgagaaataagacgaatgagaacaagatgcgagcattattttgaacatgaa

SEQ ID NO: 3912 - DNA, 5718 bp, Emericella nidulans
gtccagtttttgttggaaccccaaatcatagtagaacgactttgacgacagccatactatatcatgtttaaggcaccatgttggtgcgaagacgagagtcgagtacataggcggcagcttccgagacataggacaagttgggaatcaagcatgcgcgaccgaaaaagcaagggaatagatttcggtgtatccatttggtccatttcgggttgcgggatgcatacggttcttcatccttgggtttgaaaactccaacgacttttccttcgctattgcgcgcaaaataacttcctgagctgccttgggagatcattcgggggtgaacgccgagctcgatagccaaccgcacgctctccacaacttcctcaaacccctcccgagcctttcgcgtagccatctcagcttcctccgagtccagctcttccgctgtgatcggtcgaacgccattaggtggttgaaaaaccgaatggtaaatctccagcttctcctcctcgagtgtctttcctttcacgcgatgaatcttgaatttagaggcaaattcctctgcccagcgctcaagacgtgcattgatagccttgatgtccacggccgaattcctccgtcctcggcggtgttgtacgctcgatctccgtcggtattcgggcggcgtcgttgcgacgcctgggggcatcgagcctcgggttgagatcggttcataatgtgtgccgtagggattaactgtgctggaagtatggtacagatcatcgtcatccgagtattcgtaggggtcgttatgtctatcctcttcctcttgggccaaacgagcataaccagacgtcgcgggtcgattgtttttcggcatgattttatagaataaaagaaataatattgaaaggggcgtgaatgaaaggcgagaagacgaagccaggaattaggagaaaagaggaacaagcggcaattcttcaaggcataaccattaccggtacagtgttggaatccggggtataaaaaaggggatggactaggcggacgtattgagaagcgaaggcgacgagcggtggaaatgttaatatgcagaagattatcaacagaaaggaaaagcagcagttgaagtgaactccgtcatctatttgtggttgaggggtctgccgaaggacaaaagctgaagcaagcaggaggcgagaacccagcaggccggccacgtctctgaagactgccagactttcggctccagggcttcttaagtggaactacccagctgataccgttccgtactgtatcatacggcccgtcgcaccgccacaaattctcttgtcaactccaccagagcttcgtcccaggctcccacaaaaataacgacaaataaagactcgatttcattcctgacccctgaaacgatcttcacttgtatacgcgtccagagtcgagatgtccatcttcggtcagcccttgaatacagggtccaagggtccaatttgctatgagcctgcttgttgccgtatccaattcttgcagcaattgaggctatactccggtggatgaattacaggatagtcatcagtgcccgagtttccatcgaaggaccaaatcatcaaatagtcctttcaaatgtggcgccagaggagaatcaatccgccgcaccatgggtctcaaatgcttcaacaaaagagacacgttggccgggccgcacgggacgaatgtgctctcaccgggtctatcttgaaggtttcaacaacgtgcagcggttgaagaactctgtggtaggagatgtcggccacatatgtcttctcgaggccccagccgtcactctcatcatgagaacggaacacaactcggtatcttcgcctggttatccgatacggccaaaacatgagaaccctcaatgacaagatagcatcctttccttaaccttcgggatggcgtgcagtgctttatgaacggttcatcactgatcaagcgcagtttctggccgcttgactatcctatgatgccttggccgcatctccagcaaacacaaggacacggcagctgccattgctcggcaatcactcttgtaaatgctacggctgctcatcggcccgggttaggattctcacgctggcactcacttgcctcaattaatctctgaagcggatttttgcatatgttgacggaatctagtcttgcttccttcataacgctgatgctagagcagtagtcgacggctgcggagaaggcgttaggcacggctcgactacctagtgctggcaacctctctgcgggcgatgcatcgaggccggtgcagagcaggacacggtgtatgacggaattctgggcttgaggcagtcaattcgctctcagcagtaaaccttcaagtattaagtttgcatcggcgaacccatcttacctgttgacacagaatctaaagggactatacccagcgcccatattacggacgatgccagaaacatcgaataaccaagccctgctgttaccttaatctgtgacacggagctgaccgaggacgcctcaatgactcacgacggcgcgtatctcgacataacaatatgccgtctacccgaagctcttcagaggatatggtgcagctccctcgctgaggtcaatggttgattaataaacaccagctcctcagaaccggcgacctcggttgctagtcatccctccaaaggagaggtcccagtaatatgcatcaggctgacagatacccttcgagacccgccgcagccacatccgctccctgtgagaagacaaacctgtgcttccagtagccaggtgcttttacagaggggcaagtaggagccggcatcaagcagtcgagattgagctgtgccttttttgatcagccaactcatcatcataagggactaggccgggaaaatccctttcgaccacagaggatgcatggccggtgcaaagcacgcacaattggaccgtaccaggtcatcagcattgtagaagtgagagtttgactacttgccaggataggtacactaattgtgatccggtgagaatttgatggtggatcgtttctttataatgcattgcgcattcagtacctactaaagtgtgtcaggtgaaagcgcagtgagcccatatattgtacctattcagccagcgtagtagaactttcatctgcttggcagtaatcaggtatccttccgcacgtatttttgagccatgatcgcctaccattggctatagtacttggattgtttcaaattacaggtaaacaaaactgccagtaaggctccactaaatacaaggcaagagggcaggtgaatctgagagaagggttcccaagagatcaattatcgtcgatagtggcaggcccaacaccctttattgttcccatttttttttggccgatatcgttgtaatatcatccaagtaactgcccttttcttctctcgccttaggaacttgctagattcgtctctgcttgtatttgcagaactgcactgcatcgcaagcttgtgctcggttctctggcttgttttccttatctttcgctccttatcctaccgaacttcaaccaaacaagaacacggcgttcttgattcaactgatcttttcaatccattcttcgaggcattgctctctggatttcatcaaattccaaccggcgcacgaactatagaggacattccacctcaccctccctttttacgtggctggtccccctcgcgacagagccgaaatctttcctccacctcgcccgcgtcctatgcaacacttggagaaagggttcaattgagctgaaggtgtctttattcggtcaacagggaccaactttctagcagcttacctgccacgacctccatcgtggcttcgcttctattccgggcgtcgcccctcgacccggcacttcgtcctccatcgccttcaagcgacaagtcgaacgatcttccttacgacccttcctcctcgtccgttgagagccagtcggcaaccgatacagcaccaggggtctcagtatcgtcgcagtacttcgtccgcgccttcggacccggccccgagttctcttgataaaagtcctgagggggggataagcagtgccagcgcattctcaggctctctaggaccatcactacctggtctatctgttctggcatcggtcgcgtccgcgccaacttcaaatctacggtgcgtatgccactccggtagtcgtgataaggctggcagcggcatgaattgatgtccatattggtcatttggtcttttttatcctcggctttctaaacatcttatcgatcagaagatcgccggctaataaagtgaacgaatagtacctcaagtggcgatgcacatctaggcatggctagcacgacctacgcgacatcttctcccgctgctacaactggagggcaaggcaataatcctgtgagtacaccttcttcaactcctctcatttcgatcacattcgcaatcgcgtttttcatactgcaacattgctttttcgcctcgttttattttttccttatcagcagtcttggcatcacaccgctatcgggcctataatcgctctcccaatcttatctacccagcaatcttcttcactatcaacggcctactcccacgcagccccctcatctccgctctcctcttttcttactcttttccccagtctatcttctggaaagaatatggcgagtattttggctgatcaaaaacgccctcaattacagcccatatgccagaattgcggcacctccaagactcccttatggcgtagggacgaactcggctcggtgctttgcaatgcttgcggtttgttcctaaagctccatggcagaccgcggcccatcagcctcaaaacagatgtgattaagagccgcaatcgagtcaaaactgcaggccagggaccaaagcgcaaagtgagtcctcaagctgaggttttctcaggccttctgcaccttatcatgcggatagtggtcgctaatgctcaagtgtgtgcaatagtccggtagcgcagtcgacggaaatgggctttcctcttcgagatcggaagctggcacccctcctctgggggtttcgcagggatatcgtcgcgcgtcgcgtaagatgtcacccggacattcagaccgatccaattccccagtgcctccgaccgatgctcacggactttccggcttgcaccaggcggtcgcgcagtcttattacaatttcaacattgcgccccagcttttgttcgacagtgtaacggccggagaccacacgagtcaacttccttccgtccagcttcgtatgccttaccctacgagcccgaccgcgccggtagaccgccatcatgagcctccggagacatacgaggacctcctggcggcacaacacgttcttgaagactcgcgtctgtgagttagacctcatcaatgggctctttaggggtcgcgtcgcggaacttgagcaaagcgacgcaaccgcgcgacggggcgagatgattcttctcgactgagatgtgcgtctgcaggcgttccctcgatgacgctcagcgaagggaagaggagctcaagcggcgtatagccgagctggagcgccagcttgccgaacggactaatggtgcgaatacgttgcaggaaaaccctcttgagccgctagccaagagaatgaaaactttccgacgtgggtggaacatgaatgggaactcaccggggcaaatcgactaaaatggggcaagcttggggcttccacgaactggggggccttcttttcaggggatgcggcgtgggcttacaatttaaa

SEQ ID NO: 3913 - DNA, 4539 bp, Emericella nidulans
ggtttgagtgggttggatgggcggtggttgataatggcgtttttgcgattgggcaggggattctgtttgtgcttgcggtgagacggtggagtgttgcgggggcactcgggacggagggagagagggagccgttgttgggttaggagtggagattttaataaagtaggaagtaggttgatgtctttgggtacgaatgcatttgggcatttggttttagatggcgtactgcatgtaactgggttaaatgctgggtggactttaggagtcagagtcaggaaggtctattggctggggcagtccaaaatatcaagtttatattttggaatagataaagctgagctagaagcagattgacctttggcattaatagtcgtagccatcaatcagtgccattcacagataccaaagactataccacaatgaatcgagttcggatccattgagaattttctctgtcgagagactgacacgaacataagcacagtcatacacgaccagcctgcccaattgagaagtatattgttacagtaaatcctttgtataccgaataatacttgaccaacccttgattcgctatatccaggatttccctatattgagaggcatttgactgtgggaaaattaatttagaccagcaatggaatcattatacccaggactttgctataacgaggttcattataaccaggttttatgtaaccctgtgaacattagtgtatgcacaggatctgtagccggggatatatccagctagactgttgtttctcggccaagcgtcctgcaccggaatatccgggaaagaatacctagtaagtgcttgattgacatcatccttaaagacttaatgttacccaggcttttactcatatgggcgctgttgtaggtggctcatagaatctggatccaagtcgccggcgtcgaatctgaggttctgtgaaaactctggttcaggtctattgttaagtggatatattagtggatagaaaacagagactgtattcaagccgagacattaccttgtgggaattgaggggacaggttctccgaacaatttgtctagcctgtcattgttcagtggcacgccggagaattgatgcacctcccggaggaggattgacatcgcgatttgcgacgcttgatactggtgttgcgtatgaggctgaatattgtcttggctgggagcttatgagagaaacttcttcctgaaatacagggaagaagatattgcctgcgtcggggagtgtacattcatgtgggaagatctggtatcctctcatgatccgttactcgaggttagcttgcttgaggtagtctggctggatgctttgtgatttgggtctaagcattggagatactccgacaatcgagttgttatgctgtaatgctgggatctccctgatcaacacttgcactgcgtagacagtacactcttatatcagaggttgtgggtatgattgatctcctctatacaaagatactagtaagtaatacattagacacctattattgaatcatactaatagagtagggcaataataatactttattagctgattttctccatgacgcaaagcactttgttctgaagaatcagcagattgctgatgaagcaccccttcaggtttattgtgcaggattggtgtttgcgcccataacagcgtttattcgtacggaatttgaagacgaccttccaaattggatatgccagttgccaaaagttaatgagaggtggggcgcagaattacagactctggagggccattccggctctgttaactctgtggccttcttgccggacggccggctgctggcatccggctccaatgacctgacagtgcggctctgggacacggcgacgggcggcctgcagaagactctggagagccattcccgctgggttaattgtgtggccttctcgccggacggcagactgctggcgtccggctccgatgacgagacagtgcggctctgggacacggcgacgggcagcctgcagcagaccttgcctatcaaggggacagtcactaaactccaattttctcaagatggttcatatatcagcactaacctggggtcactcaacattcaatcctattgtggcaataatctatctaattcaccaaaaactcattctgatatacttattaaggtccgggattggataacgttaaaggccacacaagtattatggcttcctcctgaggccagaccttcatgttcagcaatcagattgaatacccttgccttgggacacgcgtcaggtcgaatttcatttataggattccgggtataatgggtgttgttgaattcaagttctcttctatcctctacattttcatctcttcgcaaaaggagggcctgagagagccagtaaacttatctatccttttttctttctagaacccgctacatgcttccttgagacataagagatttgtgccttagcttttaaattaagatgcctgccaagcctctattctcctattggctgcgaggtcctcaactgggccgcacttagttccctgagcagggcctgcgcactcgggccataatcaaagagaataaaagagaatagtaggaatcggtagatatctctaaccgttcaggttaaatacagaacttttgaaataggttttagaaatattataaactgaaactctatgttttgtctatgtaatcagataaataatgccgcaaatttgacgcccatatatcctttatatatctccgtttcgcattatcttggatgacttagtacgatatataccagtcatcccatgagctcaggatggcttggacctttgtggtgctatatatactatatgtaactgctatttcaatattgatatatctgatctcagcagatattaatatatatttctgggaataggctttgggttgccagtgtccctttctggtaattgctcaaccacctcctggcttgtttgtatagctcagtatagggctgcagatagcttcagatatgaccaaagaggtactaatctgtatttcagtccctagagcagagccgggctcataactattaactctcaaggtgattgttagtgttgaatatagttatgtgactaatatctgtaataaataattacattaaaggtcttaattgttatgggatgctcccataacacgcacagcgtagcgtacgcggctgtggtcacgtggctccccatccatctccaatttctgagctgtcctgtcccgttttctcttcttctcgagcgattccttcttgtacatatggcacgattagataggaagatccgtctaaatacgtcccttaacattaatctcctaactttgatctgtatagacaatttatagcatttaaagagcttcagaaggcaagaatctcggtatctgaaggtagctcggcccatatagatagctgtaatccgtttatggcggtaatcttatcatacgatcaggcgagaaagatgctggatattgattagtaaggaggagcatttcgccggttgacagtatcaatatcaatgagaccattctcatcctccccaagatttcgccgtaaggccatcttagtatcaagtgatacttcattacttacccgaatctcaaacccacctgccaaatatatctgggcaacattcaagagctacctttgtgaatctgaacggctcttggttcagaagaagatcactaaactggcttgagtgtcgttcttggcaggatccgtcgcatcagggccatctgcgtaggaatgtgtagacactggaccggtctgtgtaccttctctatgcagatttgatcatacagaggatatgcctggtgttgtcgacttgggtggcgctggtggaatcatccagtgattgtcaccagcaataacacagcagaggagcacagcttctaatcgttctggctgtgatagtacgtatattgcacgcatattgcagtctcagcgctcctgggcaggagaatagtaagaacaagctgttgagtaagaccatgcatgatgcttcacttttattcttttcttatgctaggctaagtagcggctaattccttcgctcttcacccggagataagcctggatttatgtcttttactccggtagctgctcgaacttaagaagagccagaagcccgtctgtttatcctcattgcgggcatctcgctcacatgccctctggccgatctaacagtaatatcaccatggcgcaacttctcgttgtcttgggcgcgacgggccagcaaggcatctccgtcatcaaccacgtcttgtctgaccccattctctccagtaaatattcgatccgtggcgtcacacgagatgcctcgaaaccggctgcacaagatctcatgatgaagtcactcgatattgtctcggcggacttcgacgacccggcatcgatctatgctgccttacgaggcgcacacaccgtcttcgccatgacatgcacaatctatgacgagcatgccaaaacacgtgaagaagaccagggtaagactatcgccgatgcggccgttgccgttggagcgcggtacctgatctggagtactg

SEQ ID NO: 3914 - DNA, 567 bp, Emericella nidulans
ccaggagtaaaatgaccttccaccaccaagcacgctttttatatttatcacgcaccatacccaaccagggggggggttcttttaatgttcatcccatccccgaaatgaaccgataaccgacgggcccaccattagggctggattataatgccgaggatgagattctgcaaaccgtctgtgctcgtcgtccaagtgagccggttcggcttcaagctgacacagtatgtttatcaaagagaacgatgccccagttggcaaaaaatacacgctcctgtctcaactcaacacagaggcgcccacataaaaaaaggaacaggcagctgatcccgcatgtttccagtatgctcttggcggggaccggaacttcaaaagacagactccgggctgcgttctatgcttgcactgaacagcagccgacgaacggccatactcacttctgcgtcgctttatgacgttctacacatccatgccatgacgaggatccgtcccgaggacccccttgcgtggcatgaaatttgcgactcactattctactcttacgggagtggggagcggattacaaaaagt

SEQ ID NO: 3915 - DNA, 2830 bp, Emericella nidulans
aaaccaagccctatcggactaaagtgactatattttcctgctattgcatagttgaaatattacatattgtatgccacttcaaaactacaaacagcatccaaaccgactaaggttaacagtacgatgggcgcctgcttctgcagacaggaaatatgcctcgttgtccaagtagtgagctggtgttctttctacgtcaaacagcttgaattcagtaaaagtggtataccatatcgtgtagcgatggtcaccaaaattggggacagtacgatatggtttgattagactttagtttgaacaggtctaccaaatggaccttcatcagcaacaagctcgattatagtacaaacttccttctacccagggtctgatctgtgctcatgagcaactgcgcgaatgtccaagaaatcaatggcccgagcaagtaactgagctcactagcaacacacaaagcatttcactgcacattatgtcaaggtccatttgacacaaggactcgatcaaggaatgcaataatggagtgacattgagtctttatacgctattattgtgcgtagggagaaagggttgcgcatgatgcttgctgaccgctgttgaggatagtatgagcgaagcattgctaaggataaggtcagtaatgtaagtttcgcttctttctgattccatctcctcatactttcttgagacgaggaaagcacgagcgcagcgccttggctcaacaacgacgtagtatccagggtcgtcttcagcgcattctacgtcctcgtcaaaacccgccgaaggcttcatcggcatcgtgatgagccggatggattttataatccttgtacaggttcttgggccgaagaattggagccaatcggcttctgctccctgcagcagaacccaacaacagtttgcttccagcgcttcagcccaaactcggagcagacttggagagggaaacgctaggtatctatgattgcagtttctaaaaacaagttctatttaacttcggccatgcctcaaatgctctacgcagtgccggtggcatcctcccacgcctccttgatcgccttccaataagcaaccggatgcttcctcatatgctcaacatgcccgctgccctcaaacaccctatattgtacctcccacccctttcgccgggactcggcaatgtgggcctcaatatcactccacagaatgatctggtcctccttcccataaaggtagagccgtttggtctccaaactcgccagctccgggtttccaactaccttcacactctctgcaccggcgcttgtccgtcccagaatcttctcgatgaggttgagcacgtagagaaagactgcccagagacctcttgtgacgcaaaacggccagggaaagaatttggccgtgcccagcgccatggccagcgcgaacctgcgcatattggcgaaggtgagatctgtgcttccgggcgtggaatcaaggacaacgagcctatgtgggaatgggcggccgtatcgatttcggtacgcgtgaagggctgcagcgtaagcgattccgcccgtgttggacatgacctggatcaggacgccggagccgtcatgatcctgctcgcgttcgctcttgccagttggcgggaagacctcgtctacaatcgggctcatggcctccacgcgctgcgccatcgagcgccataacgccttgtagattggagacagcacaacgatctgtttggcggacgggtggagggtgcggaagccgtcggcgtattttgtgatgttcttgggctgcgcgtcgccccaggcgaagattatgagggtcttgacgggactaccatttgagaccgaggttgactctgaagattctgggatcccgtcgcgcacgaagatctgatcagtgcgagatgtgaagcctgggaaacggatcgttgcacctgcttggctggcgatcatggtgaatgtgaaatgctagttggccggtggggatggatggtattgagaggcaagatgccacttaaagatataacgggccatggcgagcccaacaaatttcttttgactgttcaacagttctgaatccttctcccgaatgcttacagagaggtaagcggcccgttgatgtttggaatggatccactctaagatgctgatatcgattccgtctacaatcaactgctgtgattggtgttcagtgtcaaggtccaggggcagtggagtaaatcacatgaaaaaatccagcgattccctgaattgcaccgaggtgttaaagatctgacatgaatcctcagggcaaggtggatttcctgaagcttcgacaggcacctctattttgtggctccagtttattgtccaaaccatggaggaccggtgcgtcattacgtacgtcgttttgaagatcctgtgcacctcctagagactaaacatgggatgaaatactcgcttctgacagtgttcatggtcttgactatgactccattttgattgttctctatcgacggctcgggtccgagtcaaatgcagatggcgagggtatgggccaagatgagctcacatcaagtgtgcggctgcctgaaggatgtcctgcgcggctccaagcttgaagtcacctctagaaagagataatgcctgtgaatatcgtgctcgaagcaggcattcaggctaaattttgccgctcctgacggctaaggtctttctaaatgtcgcattaaggtcccatccaccgtgagaacagaggaatattcttgatatgccaagtctcagcagcagagaatggctttcgttcgcggtccagtgatttcgggcaggcctcattgctctttatacaatcggtagagagagagaatgatccagatatggtaggttat

SEQ ID NO: 3916 - DNA, 3592 bp, Emericella nidulans
catgatgtctgtgttggtttcggagattgatgacttgagtaggtacaattagctattattctttaagagtgaggaaagtggctggcttttatcccaggcggtttctggcccagtcggcgcgaggtcaccggtctgtggtacagtgcgcatttatccaacatggacgcacataagaaagccctcaatctctacaagcaatatgggcagtttgtgtgtgggaccttcactcccttggtatcatagtcacccaatagcgtgactggtaaaccatccggccactttgccctgtcaaatctcgactaaagcgaaccaacatatctcacgacaggtatgagtatatgatgcacactgggagatcaagttcgtgtatggccgagggtgttgctgcaagctttatagtgccagctcgcatggttgtacgtctgaagaagtatatgcttacttgactcgttactttggtcaaatgctgcaacacccttctcaatagtaactgcacctgttaaatgtagattgcagctattattcgccacacaaggctttttttgttcctagtacgtgttacttcctgctcgagaaaggcaatacgcttgaaggttgacaccctgataggatataatatcagtgtctccatgtgtgggacactcttgaaccattttcgggttggagattcatgctactataaagcccatctattggcagagggatttaaatactaacaagccattgatggcttcctgaaatgttcctgataaggttggttcaaagcatattttttacttattatgcatctgttgagactagggggaccaagcctgtcgctgggggccataccgcatgaaacaacagatattttcaatgttttttattgactagtaaagaaaaaattagaaagggaacaaatgaaggaagccaagtgattccacagcattatttgggggtagtttaggttttttatcactctaacattatgcttctaaagagaccaaagatttgatacaaagtagctgctctgtatgcttaatcttgacatgctggaggatgtaagacccaccattaagggcctgaccttatatttatgcgaatagatctctatccacaaatcatatatagtcacaaagcgtcggatgaccagcagatttctcaagtagcttccgcactcgcctggtttaaaccccatagagcacgcctgggcagagctcaaggagaccacccatgagcttagacagtggactattgaggctctggtgtgattactgggttgacgaccaatggttcacctactaagctctggatttaggctggaaaaaaaggcccggccttgaatcagtcccctactgacccacatggggtgagtggacacagccatcattataccttcgtgcttatattcacgcatcaccggttaccgagcaattcccagactaggcgttttgcaggcgcctagtagacactgcccaggatgtcttccgttccagcaccccaagccaccatagacagccaatcatcggaactgtcaattcgtcacctccaacactcatcctggtacacaggtaaagccgacagctgccacctttgatgtcatctcatttccatatcaagtagatagtccttgaccacgctttgacggctgatcgagcaactgccggcaacacaaaatatcgcgacgcatttcttacgctagttcatccatttctacctctcgtgcaaaggcgattcccatgcttagttagacgtttagacagtcgtacccttgctggtgataccatcgatacttccgcggccataactgattctattcacctaagacaggtatcctcatgtttgaaaatgtaagagctggcatacgaccaattaatgcaacgggccccgacgcccatactgccaaggcatgtgcagctacctgtgttcagttggcgatgtacacgtgttaattgattgtgatggtggctgcatgagacaacgccagcctcaggatgtacgagatcagccgcaaaccttatcagctgacgtttattccggacggagatgtctgacctttttcaaaagtgaaaggtgagcggcaaatgtgcagacaagccttgtaaagtccagacattcgaaaagactcttctgcataacgaattaactcactttcagaacgttgccagttagttaacagcttgcgtgtcgcgaataagaactatcaaccctgatatccagaaaatctttaagaagcgacaatccgccatacgttgtgaagaggtggttttgataacgactcaccatccattacacataaaaggatagctgaaaaaaaagagaaaaatagacagataacacaaaaagcgcagcggacacctcccaaagaaccaagtggatatatcgagtattaaaaccctagctgtcaagctctcagatcaatatcatcaagcaaggggatggatgaccttgaagctgccattcagaaggcagagagggctgtgagcaacaccacagaagaccatcccatgtttgcaagcaggttaactgaactgtctgccatgctctctattcaattcacccacacgggaaagatggattgcctagaaagagctatttaccacgcatgcagagcagttgatattaccccagaagaccatccggaccttgcaggccggttgtctatacttgccaacagtatgtcagatcgatacgagcaaactggaaagatggaagacctggaagaggccattcagaaggcatggaaagcagttaatgccaccccagaagatcattcaatgtttgcaggccggttaaataacctggccataaacctctcggcccgatattccctaacgggaaagatcagtgatctggaagacgctattcacaaggcacaaagagtggtcaatataacctcagaggatcatccagattttcccgatcgactgaatattcttggggtcctgctctatgaccggtataattatacaggacggataggtgaactaggagaggctattcaaatggcacagagagtggttgatatagccccggaggatcatccagatcttgcagactggttgattaatctttccataagcctttcagccagatacaatcaaactggaacgatggaagacctggaggaggccattcagaaggcacggagagcagtcaacatcacaccaaaagaccatccagatcttgcaacccggttaagtaaggtggccatgaacctctcagtccggtatgaccgaacgagaagaatggaagacctggaagaagctattcagaaggctaagaaaggaattgataccaccccagaaggccatccagatctcgcgagccggctatataacctggctatcatgttctcatgccgacatactgaaacaggcaagatggatgacctggagaacgctgttagaaatgcgcagagagttatcgaaataactccagaagaccatccggaccttgcagaccgcctgattaacctcgccaacaggcttttggagagatataatcgaatggaagggtgggaggattttgaaggggccattaaaggacacagagagcagttgaagccattccagaggatattcaagatcttggcaaatatttaaataactgg

SEQ ID NO: 3917 - DNA, 4633 bp, Emericella nidulans
tcctgagcgtttagctttccggtcaccgccatcgctttgctccctgaggcgcctctgtcgctctgtggcgcgccgactgtcaagatgacggggctcacaatcgacacagttgtggacttctgggacatcccgaccatggtaatagcattcaatatgctgccacgtttcgcaaccctcacagaagactgtattcccatcatcatcttcgaacgcacaaatgcatttgatggtatacggctcctcctcttcagccgggaccgaatctgacacggcgccgttgacgatgggtgagtccagaggggcggtgaccgggaaaggctccgtggttggatgcgtgatgacgactggggaggtctctgtcataatccgacagaacaccccctcggacgtctaatgcgaagcgcgctggtatttgtacttgcaagaagcggcgtatgggatcgattatatccctaaccacatatcacgaaagcctttacctaaggcaatacctgctttcaactagcggtccaccaagctactcagtgcaagatgtcacgccctaatatctttgcaacctgacgcgatggctgcagagcgtactgaagagccagagctggctgcagaaaggcgaggttcgtccgacggcttcacaaaccaaatgttgttcaaacaaggagtaggaccgggtcgatcgatacagcaattcgagtaagtggcggttctaataaggacgtcgtccaccgtgtcgtctgcgaccgtgggaaaggatgaatttgtcgagggtcgagaaccgaggaaagcgagtgggcgagtgaggcatgaatcgcatggagaagaaagcgagcgaggagaaagacaacagtaggccagttcaagagagaagcgaaatagacgggatgatggatagaaaggatggttgaaataggagaatgagaaagggaggtaaagggcgagggtgaaggacgggaatgtgggaggaacagacggaacaatatgacggagagcactcaagaagagcacttgggctggaccaacgcgggtcaagcgaaaaaggtgattcggtcggatcgaggacgaaaaggaagcgagagatcaaggacagaatgcaagagacagaagaggagggagggtgagaagacagaggacaggaccggacaggataggactggactggacgggctaaagccacggatgggccattcaagcggcgcgtccaagacccaaggtaaaaaaggaaaagcgcggaataatttttcccacccgatcgaagctttctgggggagtgtagtggccgatcaggagctctacgccggtgagagcattttcactgtgctatatgaatgtgagtagtagcagtcgttagggtgggtaatagcctggtaaaaaaaaggaaagtaaaatcatgatgaaagggagggatcgcatctggaaaagaggaggggaagtcgacgcgagcgagcgagaatcccgttggagggacggatgcgagctcgaagctgggaatgatgcctagttcttgaggcacgattgctgcgttccgcctcaggtttactgcctgaggccgcataacgagctgaatggactagtccgaaagaagtataacatgatgcggagtgccaagacccaggttgggcatagcggataaatcattcggggagccaaaagacaggccgatcatgctgttgtcagtgaaggatcagaggcctaatgctctgtagctggtgtttttcaaccagcagagagatagcagtgatatatcgacagcagccgcgaggagtcatgaagaggggcttgcccctcaagcagtggaaccatccgcgcgctccatagatactctaggggagcggagcgcaagagagtggctggaaagtgagaactgaaaagaccattgcaacatatttaatctgggtgtaaaggagggaaagaggcagagagaatttgcgtagcagacccaaagaggtgaatcccagggagcgataaatagatctggagatcagcatgaagttggagaaaatatcagatgagacgggttcgtgccaggctcccacccggtatattgggcttaaatgattcctgataagccaccctcaatcggggacgttctgggacattctgttgcgggggcagagaactggtaagcgtggtgagacgggatggtcaagcttgcgagagaactgttttggtaagtggtgaatctgtcgttttacaggagaaagaaggtctaaaaataaaagacagaaaggcgaaggggcacaaagtcacggagtgataagcaaatcatctgagcccggaaaggattgggaagtaacatgatcttccttggggagcggtgcaaaagaagcgagagacacagaggggcctgagcagaggccatagcctagtgcagggaacatcgactgagagagcatgagttggaattgtcggtcaatgaccagagctggagcatgctctggctgataagtgaggaatatgagttggcctcgacatccaggccctggatcttaagagcatgtcaagtaatcatcataaaataataataataccgagttttggcgaggtcttctcctcctttttaggggctgcgaacttggtgtgtggcgaattcatagcggggagggaaactagcggagatgcagtgtgtcgacggaaatggcttggaaggatgcccggtgcttaaggcagcgtacaccaggcctctatctttgccagcatgctctacacagtatacttctacgctgcattccatacaacataaaagcaagaacagtaaaataataaacgtatatctccagccaccaccttgaaacagaacgggaaataacaataagtggcctaagaaaccagaacgacagggctcaaaacatcaatcaaactagatatgcaataggttactttgcctgaagagtaacccaagttgccacagtctatcctcgagaattgacagcatgcgttggcgtagtcgataattcgtcctccggtcttcgcccttgcgtttcttccatttcaatgacttggtcttggggctgatcttcgtcctcgtcaccacggtattcgaccacgtgtggttccaatcgggtagccttcttccggacagcaacaacgagtcggtgtccgccgtacaaaagaccaaacatgttaagcgcaatatgggcggggattccgttaaggggattcagcccatggcgaggtgcaaccatgatttgcgagagattgagcataatcaacaagacagtgccacccagtgcgaaatatgtcccaaagggctggataaaagatcgatgcagaggcatgatttctgatttcttgaccactcttcggaaacgcaggtacgctacaagcgaacagacccaggaaacataaccgatggtggttatgaaaaacatcagatagttgtacacctcagagctcgaaattaccatgcacaggaagcatagccaggtgaatcctgctgagatggcgacggacatataaggaacattccatcgattgcgaatcatgaacaatgctggagcgtgacccgtctccgccatcgtagacaacatgcgggaagccagattgagaaaagagcgtccagaggccacagacgaaagaaaaatcagcccacctcccacggccggtactaaacgaattttggagtcaacgagaccaaccatgtaaggcgagagtccggcaccaatgaaggaattgttaagtctcagatcgtcatatggggccatcagagtggtagttaacgtgctcaacatgtaaagtatgaacatgatgagattgctgttcctggtgcgcctgaaaatgctatttcctggctccgagtcatggtcttcggcgacctgcacggttaactccggcaaaaagacgaaagatatcgtactgcaaaggatgcagaacagaaagccaagaaagcgccccagatcaccgagaagtaggaactcagcaaagggaccggggttagcccaatactcaaacccttccacaacggcaccgggttggctggcgcggatagcgaggtagaaggagatggcggcaagcccgtttgtggccaggaattttatcctcgttaagaacgcgcgcgaccttctgaagaactttttgggttgcattattgataagaatatttatggtcattcataccttccacgttgcttttttatggctctcgattagtttcttatcatccttaggtttgctcatcatttttttctacatcttcatcttttatctttgactatttctacttcttatttattattgttttttcttcattaccttcttttatctttttttattacttatttctattactttcttcttatttctaactgttctctatttttctattctttatacatattcttttttatttctctttctttttcatagcatctctttctcttcttcctatttctttcatatcatttctctcattttatttcctcttctctttttattctatattctcactatctctcttccctttcttcacctcttttccatttcttctcctattctatttacctttcttctttcttttacttttttttttctttcattcatttaatctatattcattttctatttatttatctattctatttttttttgtcttttccctgcctatttctctccttatttttcttattctccttcctttttc

SEQ ID NO: 3918 - DNA, 7240 bp, Emericella nidulans
acatcgtcggttatgagctcaaccttctcacttgggggcccatcaacaagcctcgcgaggctgatgtagccgctgtcaccgagagtctaaaggagcgatcgatcgcggagaaagatgaggacgaggagattgccgatgcggattcttattcatcttctcactgcttattctgcaacaacgagtcgacaagcattgaagaaaatatcgaacacatgttcaagagccacggcatgttcatcccagaacgcacataccttgcagatctagaaggtctcattcgatacctttaccggaaaataaacgagaacagcgagtgtatctattgccatgtcatccgaaacagccccgccggcatcaagacacacatgaaagacaaaggtcactgcatgatagcatttgagagcgaggcggaacaaattgagatcgggcagttctacgattttagaagcacctattcagatgaagagaacgacgacgattcggtcgaaatggtcgacggcggcgtcaaagtctccggctcagacgctgaagacgacggatgggaaacagacgcctcatcgttggacgatgatgacgaagaaggaaacgcgaagagcgctcctgcagtctatagaaccgaatacgagctccacctcccatccggccggaccgcaggtcaccgctcgctcgcacgatactaccgccagaatctgcacaactatccgactgcggaggagcgctacgcccgccaacttgccattgagaatggcgagatccaagaggaagagaagccccgtggccgcaacgccaaccgtgcccttgttactcgtgctaacggcggtacgggcatgattggagtcgcggacatcgacaagcgcaacgttgtcgagagcgagcgaaaggaacggactcgtgctatccgtcaagaacagcggtacacagctcgtgtgaacagagccgctaacaaccaaaagcacttcagggtatgccatttttctcgttacttctgttctgtatgctttacccagctaataacgatgataggatcctttgctgcagtgatttttttgcatcctggcgggagtggctttggtttgaagttggctccggcagttacagctatcttgcacgttagattgcaagacttgatgagttgacgatgctcaaaggaattgaattactcatgatctcaagaatcaatttaaaatagagtcggcatcaaattatagactactgtgggcgggaccacttgacattagaaagttctcatgctggcaagccgtagtacattatgcaattgattgagaaattatcacattgtttgcgatcgtggtagaaggaccgcacggtttgcattttcaccacaaatttgccaagggcaaaccataagttacacattgttggttggtaagataggaaaatctggaatcgagtcgaggccgcttcattattaaattgacaaagaagagggaaatggccggtctagctaaatgaggacgaaggtgagagaataatatatgctaataataacgtatggcgaaacaaaggtgtacaaccgatgcgcacatgaccatggcagactagctgaaagagcgcccttcgcatgcatataggaataatagtgacacatgggatgctgggacaagaatgtagtttccgaccggcagaagaagaaaatattaagaggacagaacaaagcaaagccttggtcaaggtagcagcggcgtttcctcgtctctattagtggagtctttgctctttttatgtctccgatggcggcgctttttcttcgtttgctcggtggcaccgctgtcggtatcgttcaggtcgatgatctcgctgccctggcgaattgggaacttagttttgggaactgacgacgggccctcgccttccgaagagctgttgctgcttgtggtgtggaggaccacctttcgaacgccgttgacatcgactatgtgttcggtgatacttccactgcgggcagggcctcgatggaagtagctgctgctgtacgctggatctacatccgagcctgcagaaccggtgcgtcggctatttgcggatcgtggcgcactatcttgttcttcattaacaggttctgggattgacagcgtcggcccggttttaaccagaggctccggcgacttctgattggtgctgttgatgagtacagcatgagcaccgtccctgggattcagtccacttggcttcaacgtagttgcgtcagaggtagtggtgagaccggacgacgggtgacgggcatgctcaacagaatcaatatccgtctgccccgagggtgccggagacgatatacttgaacgtttgatcttgacattctgataacgagtttggcggggccggctggctaagttggatgggccaagatgtttcaggtgttcacgaatctcatctgttgaaccaagacgggtgacaagagcatccattgaatgtctctccttgtccccttgcgaccggcggagttgaaagcgtgctaaaggggcctctacagagcttcgacgacgggtgacggcctgatcggtagtggatggggaatcaccgcccaagtccactaaaggtccttggctggatagggctggaggatcctcgacgaaacggcctttcggaacgcgggaataaggtgcaggattcatacgtcgaattgccttgtgcacatccacaaagacatccgattcatcaataatttctctgcaaaacaacgaatcagtcttgaagtctctatcgccttggcaagttcaggtacatactcgccaatcagttcttcgattacatcttccaaggtgaccactccaagggcgccacgatcctcacccggaaattccgagacgagaaccatgtgagactttccttcttggaaaaagttgacaatatctaagcaacttgtctccggacgtgtttccggcaaggtcgccaaggcaaaatgactgacgggcttacaatcctctgggtcatatgtaatgagcatcttaactaggagcataccgataaaattcctagggttctcgggagagtgaataggaatccgggaatatccttgcgagagaatgaggtccatggtcggctcgtccaatacggtatcagccgacatcgtgaaaacatcctccatcggagtcataatagcgccaacagacttctccttgagatccagaacagcgctgataatagtgacttcgtcggagttgagctgttcgcccgcctcgccgagtgtcttgtgaagcgtgacaagggttttcaggcccgccttcttgtagatcgtcccatgatcctcccctagcaatctgtccagcaatttggcaacaggccaggcgacgggagccattagatacatcaggcccaaaacgcagggggccatccaggcaccgataggaaggccgtaacggacgcaaattgattgagggacgatttcaccgaagatgactgagaacattgagcatcaagttagttcatactatgctaaagtagacaagtccattaccaattaacactgtactgcctagaacggccggccaacctccgccgagcgatcggtcaaggatgatagggagagtttcgttggttatcacattgctgagcaacagagtcaccagcacccagtgcttgccacgcttcaacaatcgtaggacgctggctgcgtttttacgttcagatgggctatcgcccgatgtctgaatgacttgtagatatacttcatcctgtggttatcgataagaccggataattagcggcggacttttcgactaagagtctggagttaagtgatcatacctgacccatcaaagcaattgtcaacccagcaaatgcaccgccagtcagcacgagggcagcggccactcccagatacagccatagagtggcatcattagctggtagcgcatgagtttcggcatgagcatcgtgacggggagcaaggaactgggaggttggagcggcagaaacgagcgagatgtgcgaaaaggagagcgcgaggagtttgcccaggcccatgacaataggccgtaaagccagggagcgatgggcaggtatggccattaccgatgaagaggaagaaaggaaaggaaagaaaaaggaccgcgggcgggttcagacggaggagtcgagggacattctgttggagctccgctagttgaggctaagctaggagtggcgtaatccaattagtgtagcttgactatgtctgtggaatgacgttactggtgctcaatggttgacgcccgccaatgcaacgaaggaagatattaattcagagactcttaggagcagcaattgaatatctaggtgcctagaggtgattcttttgattattcgtggatgtgaatgtgtttgacaacgaaacttctcaaaaccggatcggcagaagtcaagggggattgtccacaggctaaatccgctataccaaaccaggttagcgcatcctttcgtcagctctagggcaacgagttcaatacgcacatcttgacctagtcgctaggtttattacctacattattgatcaggggtacctatcagttgatatgatggattatcccgattgtctcgctgtccgaagtatgcaaacagattgatgcgcaggccggctagtgaccaaattagttctgcagccgaatcacgggaagataagtgaaatgctatctagcatttgaacaacgttaattgtgatcagttgaatatactctttacttatcaatctcgactctgaatagtactactgtcatatcccgacgttggatgaccaccaccatccgtttctttttatgaatcgacgcacatcttcatgagagacctcaatggatttcgcaccatgtacaacagcgtcggtgtttagacgtgcccccagaatctggaattgggccaagccatagacgcgcttttccaactttcagggcaaggaaaatgataagcgtatcgatgctctcgagaggagcgagcagcctatttgatgtacttaagcgggatgagccctccgagcatattgtatatcgccagtatttctctgcacgcccataagtcgattaagtgcggaaacgctctactctggcagagaatgttctccaagctttaagctagtgcccctctgaactttaggagccgacgctgggtatggatgcgcccacctaggatgaagatgcgaggtgctcagggatggaatcgattgtgctgggcgttcgaccgcttgagatttctcatgaagaaaagctcagttgttctgaacgaatgagggtaattattcatataatctggtttgggtatctgataggtgtaattttgtacagtgagtaggcgtcagggctgtgagcacttgccaggtccaacaccacaagacaattccccgaaaatcaacatagaaagcagctaacatcatacctttggcctattaatctgattaatagtgtcccttgcttagcaaattttaaaaggcgcctggagggagattccccgcaaacatccatacgactacctcggacgtgatcattccccgcactcagccaaacggagaggcacgcaatcagttcacctacaggaaacaagattcacactaaattcctgcataagctacgcggctacgcggatgactttttaccgaggtggttgcggcagagtcgagcgtcataagagtcgtggtttctgctgcatgattgcaatgctacccagcgccttccaccacaacccgtgccacctccctgcacggatatatggaaagctgcacgttagtattctcctactctccacagcattattcttagttcctaagttctagacagttcttgcacagtccctaggtctccaacagcgctctgagagttctgttccgaaagtacgatctcgaaggcattgctccattcctcagttcctaacagcgattcctaagtatttacgaagcataaatgatggatgagaagttgcgtctcgatatcaatccgggaaacaagaacttcaccaatgctgcggttgtcatcatcggcgctggcatatctggtgcgcgactcttggatcctgtattcgagaaccttgctgacggcaatagggatgtgcatggcaattgatctcatcgaacgcaataaatgccataatttcgtaatcttagagaagagcagcggagtgggcggaacctggcgcgacaataagtatcccggatgttgctgtgatggtagcttgatccgttacttttctatgactggccattaactattgtaaagtgacgagcatcctgtatagctactccttcgaacagtccaccaagtggtcgcggcagtttccaggacaagaagagctcttggtaggtgtaccagcgccgtgctaagaccgctgacgctgactggatgagcaggcgtatctcactcacgttgctgagaaatatgggctatacaagtatattcgtttcaattccgaggtcacagaggcgcgatggagcgatgaagagaaaaaatggaaagtcagcaccaaagtttctggcgacaaggacaaccagttcacacgttcctatgtcctgagcacggatttcctcatctctgctgttggacagctgaactttccccgagaaccagatatccctgggctgaacgatttccgtgggaaaatgatgcattcggcgcgatgggattggacctataactacgagaataagcgaattgctatcatcggaaatggtgattttcccaaggtcggccattcaatagtggcctgctactcaggatgctaattatttccatccaggggcgaccgctgcacagattgtccctgaagtggctaaagttgcttcgcatcttaccgtataccagagaactccgaattgggtaatccctcgatctgataccgccatatcgcccctcgaacaagctctgctaacgtaccttcccccactgcgtattcgaaaacgctcccttgctatggacttccgtgagagcttccatgaggttatcagggactcgcagtcccaaaccgcgcggctggcccgcgacatcaccgcgcaacgtttacggacacagctggcgaacaagcccgagctatgggacaagctcacaccgaaatatgcccctggatgtaaacgattgatcataacagacgattattacccagcgcttagtcgagaaaacgtggatctggagaccaggcgtatcctgcgcatcacagagacagggattgctgtagaaggcgactctcagcaagagtatgatctgatcatccttgcgactgggttcaagaccgtagaatttatgtgtccgatcaagatccacgggtcaaa

SEQ ID NO: 3919 - DNA, 3022 bp, Emericella nidulans
gccgcttccccctccctttcgaatatccccctcccccggcttcccatgtccgatcgcatctcttcggctccattccggacaggacccccttcgccgtcaccgtcgtcacccgctccattcacctctctcaaagagaacacatactcgacgattcctcccgagcaaatcccacagacgccgacatcgcctccgttgatgtcggtaagcgctacaaacgatgcctccaatctcgcaaacttgcaagcatctagccaggcgacgtcgcaaactgccagtctctcctctccaccttccacagcgcccatgactacacaaaattctcagcagccgacagcaggtgcaacaaactcatttcctacaccggccagtagtgttggccccgaccacatgaataagtcgtttgggacagacttctcagaaacaggagcgtctaacacgacaggcgcaagtgccgtaccaactcagcaatcggaacacagacgcacggatcacaatcgagattccaaatccgctcgagcaagacaagcagtgaaggattcccaacagttgggcgaatctggtcatgctccgcatggcagcgccatggatctagatacagaaagaccagcgcaaactaacgccaattggctcagcttagactctttgcagaaagacttctcgtcagctttccatctttgcaaaagctgtaagagcccctaatccttgctatggctgtttgcctttgcgcacctcacaatgcattcccataattgtttggatcaaaaccttgttaacagtatcctgcgaaaacacagcccatattgcgactggaccggacccatcagtcgacctcatttcgctgtatggtttaggccctgtagcaaagtcggttgcaaggaatgatcctgtcactggcgaaaagatcaatcgtcttcgaaagtcatacgagggcaagttgaaaggattagggcttgctggaaggaacaaagcggtcaaacatgatcccgcgacgcctggtggactcaggcagatgacaatgtggccagaagaagagtggcaaaatcagaaggttttcggaaaggagataaaggtggctgatatggattcggcgctgtacaatctgcagatgaaggctatgaaaatggaaccgggtacggtaccaaataacgattactgggaagacgtgctaggacacgacaagccgacgaagaatgcaaacgcgggagaaggcgccaaaaagacgcatccttctgcaagcgctccgcgggctgttagccagccgaacgggacgccggtgccagcggaacccgagcgcagccgcccaagtcgaggccgcaagagacattatgatgataatagcttcgtgggttacggtgagggttatgcggatgacgatgatgatgctgcgatctattcgaatggcgaagggggagggaagaaaaagcacaagaaggtatgtttgacgcctatttcattaaatatcaaatactgatatcgttataggaccacgtcccaaggattccggctccctcagacagaggtggaagttatggagtcggtatgtttggcattggtgcgaggtgacggcacacaaatttgcaggcaaaaagcacacttctacctatttttatgttttccttctactatgctccatgcatagctatgttacagacccactgaagaggctcaacacgcttttgagcccggtggaaggacatgattttcagctcgacgacattgttggttgtcggcttattctcagtacattttttgcatcacggtgctggatatacccggcttacttgatcggacggcgtttgggggttttaaatcttacggaaaggtctcttttggcttctttgcctatccgaatggcggaaacatcagatgctgtagtgctttccctttcgccttgtgttaatggtcaatccgttggtcggattttgctttattagctgttgtcttgacgcattacgatagcgagggacatttccagagctgtctgagcagcatcagtacggagctcttagatgaaaacaaggatctatcacacttgtccacctcagtagaattttccagtagtgtacactcagtggtagtgcggtacctttttttcttgtggcaggcaaggcgggcctggcccaacccatagaatttagcccattacaaactctctccatccggttatgcctaaccacaaatctatgctaaacagcaatcgcgtcctccattccatacatatatgctacacatagcttccttagatcatttcaagcacaaccaaacggcccagcatgtcgacaacatttgaaaaaaccctttcccttatcgacgctgcgcacgcccaagaccccaaaactaccaccccgcccaaccccgaatcctccccagtcccctacgaactccactatgccaacaaaatgacaaaatacctctccctgcgcagcccctccgcctccgaagccctccgtctcgccgtccgcgcccaacatctccgtcgctgggaagttccgcggacggactttcctgcgaccaaaatcgggtaccatagctggcggagtcatcttgcaaaaaggcaggctgagattgctcactctttatgtcttgaagggggctatgatgagcagtttgcggggcgggttgcggcgctggtgagaaaggaggggcttaggagcggtgaggatgaggaggtacaggttctggaagatgttgcttgtctggtatttttggaggatcagttggaggagtttcagaatggatatgatgaggagaaggtcattgggatcttgcagaggacttgggtaaagatgagtgagagggggagggagttggcgcttgagatggagttgggtggaagaagtaaagagttaatcgggaaggcccttggtggtagcgcttgagtcgcagagttgggttcggtttccggaaggagagatcgagcagaacgtggacgggagtatggtatatatactgggtattgtctgtcaaggcctggttgggctgggttgtcaattgcaaaaatggcatatttgtatgataggct

SEQ ID NO: 3920 - DNA, 6011 bp, Emericella nidulans
ggtcgcatgcatgtcaaccgcattccagaccttcctttgggatcatgccacaacactaagccaagttggtggctactaggggaagatacatgcccaagagccaaaccatggaaattgctccgttgtctgacagatgatgaacgttcatgcgaatgaaaaccatgtccacagcaatttgatggtcagaaagactcgctggctcactgtgatcttttttgacatctccatcgataacaaaccatatcaaatacagcccacagctataaaccctaaagtcgagtagcagctgtgctcaaaatatgtagttaacggaaccaaaccgactgtgtacacattcatatgcatgtctccggttgttttgcctagagtcggagtcttcctcgaaccactttgatctgtatatgaaacgacacgtcttcagcagaacgaaagcgtttatgcctgaagcaccagtaactgctgcgcgtggcattaccgggacgtaggtctgcagggagggtaaggccacgcactgcttcccatggctcctcgagcttatgtaacatgacatttaagcattttactcgacttagggactctcttgcggatactcatgggagatttagaggtaggatgctctgagaccaaatagttgtcgtgaggtgttgtcgctgtagataatcaagcagctcgccgaagaacgatttgtgtgcgggcttgagaataaatatcctacaatccgggctttggcatatggagcggccacagtgtagaataataagatacggccgtgacgcgacaaaggtcgacgatacatggtgtggtattgccacggccccagctaattcgccgcagcctcttcatttttctcaggaacttcgagcctccagatcttcttctcgacttggatcgtctagcgttcttctgtctcgactttgacctcatccctcccgcaatctgccctcagcatctctgccagagcactgtacgtaatcctgccgcttttgatttccaccttctattcctttcgtcactttaaccagctacatgtggattccttgtcctttcctttcctcgtccgccacaagtggtggtaacactcgcacatttggtccgtgacagtctctaatctcgatatagtttaaacattacaaactatcaccttccttttctattccaaccgattctcggtatctatcaactgtttttcagcaagccgcccacgacacaatgccgacgccactcccttcgagtttcgcttcggccgccgctggcaacacccaagacgcctcgaggagaggcgatggtacctccagtggagagtggtatgcagccaaacctgtcttctgtttctcagtgattgcaggcggcaaaatattccacagcctccatttcccatctgactgaccgcttgcaggtctcgcactcgcatgaacggagcaacacaaactttccgccgcccatcagttgcgacaaatccttctcatactcgagatgcaacctctgctacgaccccgaccggcagtgccggcggtgcctattctacgcacatgtcctccacccgcaacggagcatctgtcgatacccgttattcaaaagaacagcttctcgacctgtataaggctcagcgggagagtggggttttgtctaagaatgttgcggattatttcgtcgccgattggaaccctcatatcgagacacccacggcgaacggggcttgggggaagcgggatgatcacaaggataatccaattgggcccgaggtgtgctgggatcatggaggacagtttgagcctctaggactagtggatatgactgatgatgagaaagaggttggtctctttgccccttaaagggactacttccgcgccttgttatgtttgggcggagttgtactgattagtctagacattttccacctcggtcaactccccacttaaaccaccacccacgaacgccgccaaagagaacgcagctacaggcggctcaggacgcagaacttcggtctcctacccgcaaggaaatgcgccttacaacacctcgtctcccagttccacaaggccgggccctagacgtcgggaaactggcgattcaatcggaaatcctatgtctcctacaacgagcggctcccgcttcttccgcgacgaaccgaatacttcaaccccacctccctcactgctacgtcgcaaaaccgattttcgagacgctacgtctgtttctaagtgggaagagaaggagaaggaggctcaaggccgggacaccgctgatacttcttcgccctttggttctttgaagcgtagctctacgaatcccgtaggcttgcctggctcgacttctccttggccgtcagcttcacagaatgccaacttttcgcccatgggtgcatttggagctttcaacttgggtacctctagtgctgcacagactccaactactgaaaagcggcctgggtttggcagtttacgtggggaaagccgcctaaaggggttgttctcgaaagatagctcggaggacataccatctgttagggagaagtcgtctttgagcaatctggatcgcttaggcgagagtgaggctgaaaaacggtctcaatcgccgtggggtgaacagctgaagacgcgcaccggtcgaagtgaaacaaacccgttttccgacgaaccccgaagtggaagcgcggctctcggaggctctcaggacgtcagcactccttcacaggtagcggatcagctgggattctctgcctttgggatgacctctagcattcctggcttccgtgatctgatgcagagtcacgagaattcgcgcaacccgactcctcacctccccggccgcgagcccactagcccgacgaatacaaacccgtatcagagcccgcacggcgacaggggagacgtggatgacgtggacaccgacggttctgatattcagaatactaaccaccctggacttagcggcttgcgagactcggctgcgttcggttctatccgtcgtgtgggatccggcatggacctgccttctattgatcgcagccaatcctccagtgttgcaggtaaccgtagcttcagcaacttgggtagcctgggtggtcttccttctcttggcggcgctggctggccgtctagcggagcggttggcactcctaccaaagacaggtctgcttttgctacaggatttggcgaccccatttttggctcgatggctgaccttcagtctccgagtttggcgacgttgggagcgggcggactgtttagccctcacgctggaatctcaaccagtggaagcatcggtcgctcgagcaaactaggttctctcttccctcaagcgatgcaggaacaaattcaaagcgagcaacctaggcatgacctcagcagtttcgatgagactcaaacgggtgagtctattctatcactatcaaagaattctctaaccacgtcaggtcatcaagcagatgcacctggtcaaacggttcctgcaactacttccacttctcatactccagtttctgctgtaggctccattccaacttccatggttccggaaggtcagcaagcaagccaggctggaagcacggctggctcagtgcctacagctcagcagcggaccatggtgatgcctgatcgaatgcgctggatttaccgggatccacagggaaatattcagggcccttggacgggattggagatgcatgattggttcaaggcgggctttttcagtcctgacctccagatcaggaagttggaggaccctgaatttgagccattagcgcagttggtgcgacgcatcggtaattcacgagagccattcctggttccacaaattggggttccccatggtcctgagcccaatgctagtacttggggaggtgctgcccctactggctctgcgcagcctccgttcccaggcagtttccccagctttggcacgactctgactgctgagcaacagaatgccctcgagcgaagaaagcaagaggagcagtatctgatggcacggcagaaggagcatcttgctcagcagcaggcaatgttgaagcagacacaatttcaacctggggttcctggaatttatccccctcagcttcagcatcactccagtgcccatagccttcacagccagcctagtttcggcagcatagcttcaccaatcggttttcagccttcgccgattcaaggacccttgcaacagcagcagcctgggtctggtttcttcgatgcttcaggcgctatcaggcccaatcctcttcccaacgtcggctctcaaatgctcggaacggattttttaaacagcagccaagagcagcttccttcgctgctcgatcgtttgaacgtgaacagatccgacccttttacattcggcagcccaacttcgttcgccgctcgacagcccgataacctgtttcccaacccgcaggtcgcaaccatgttgcaagaccgtgcgcggcttcagcaggaacaggagcaatttgatagcacccacggtgacactctgtttgaccagcaggctcgtgaagaaagactccgtcagtttcacgctttgagggcacaggaaggtgattttggcatgcgcactacggaaggcttgcccactcatcccgcaaccgcaccctctcaaccggccaaaaatgccgaggataatgcggctcttgaggaactcaccaagtctatcactagcgaagaacctgtcttaaccctttcccagcaggttcagaaggccgcgcaggagcaggaggaacaggagcagaagaagcaacaacagcagcaacaagcgcaatcgacttctgacgctgcctgggctaccaggggcgactctgccatgcctcaaccattccctcctcctccatctgcttcgccactgcccgctcccgccgctcagcgcaaccgccagaacgtagcggagtcccttgccgcaaactctcgttctcagactcaaacacctgttgaggctcccactacctcaattgcgccatgggcgaaggaagtcaacgagatgccgaagggcccgtctctcaaggagatccaggaagctgaggcacgcaatgccgcgcagagagaagagatggcagctgctgctcgccgtgcacagctacttgccgagcaggaacgtctcagccaggctcaggaacagcaatcccctggtctcccgtcgagcgccaactgggccagtgctgggtctggggcaacccctacctcgacaggctcggtttggaacaacaagggtgcggccactaccagcgcggccaagaagaccctagctcagattcagaaggaggaagaagcccgtaagcaacgctctgctgcagctgcagcagcggcggccgctcagaacattgccgcgactacccctactccctcttctactggaaaacgttatgcggatctggccagcaaagctcccgctgcctccccggttagcgccggctctggtgcttggaccaccgtcggtgccagcggcaaggccaaagctcctcctgttgctccaaccgggccgcgctccaccagcggaccagttcctgtcgctgcatcgccagtccggccgaaggcagtaacggcgactaccacagcgccccggaccgttcctgccaccacgccttcgtcgaaccctatccgggctatggaagagtttaccaagtgggccaagttgactctgggcaaggggttgaacagtaatatcaatggtatgtttattcctaatgggagattctgaatcaaactaacgtttttatagtcgacgattttgtccagcaattactgcttcttcccgcagaggcggaaatcatctccgattccgtctacgccaactcgcagactctggatggccgacgatttgcggacgagttcatccgtcgccgcaagctggcagataagggaatcgtggagtccgtttcgacaagcgcccttgcggagaagaacggcggagggtggagcgaggttgcgaagaagggatctgctagcacgtctcgtgaaaaagatacgagcaacgcggcgtttaagatggttgcaccccgcaagaagggcaagcggtgatttccgagc

SEQ ID NO: 3921 - DNA, 2720 bp, Emericella nidulans
acgccaataagagactatactcgattagtcattggaagctagagtgtgggctggtgaaaaaacacacctaacacctttgtccatgctgtggaaaaccatggagttgcgccacatggcgatcgcaactgcgttgtttccgaaggtcaagcaaaaagtgctgataaagagcctcttgtactgtgggaacacccagatggagagcatgcaaagcacgttgacaaagtaacagaggtccgccaggaaatagtggtatccgatcgaatgatacctgtaaaaccggatgggcataaagtaggcgagctgcgcactgaaccagatgtagaagtattcggggttcgacccaagcagatagccactgatgaagatgttgagaacacccgctatgaacgagatcttctcacgaagtgtgaccgcagatgctgcattccaacgttgagacaggcgttcaactccagtcttcatccgacgacggtacttctccagctgctcatcggcggtgggcactcttcgtttcaattcgccaacgacgcggtctcgcgcattcttagaggttgaccgtagcttttcctgctgcttcttgaccttctctctttgcagattgagagagcgctgcagcctttcaagcctctgggacagagacaggttatcgagaaggtcgaaaacagtgagttggtcaaggggcggaaatgtctcccagtcatcctggtacgaaagggaactgcgcgacaaccggggtctagtagttggcgagcctggaggagaaaagtaatccgagccagagtccaaaatatcttccatatctgcaggttgtagctcaggcgtgtcgcgcccttcgcgtccgacttcctcctctgatgtacgccgccttcgtccatgatgagtttctgttggaaggagaatatcgtggggccgtgaggactgtcgtgagggtatggccgactgaggaaacgcgagatcgttagcaaacccatacttcgcgccgaaacggactccgcaacaaaaagtaaacaacttgctagcactcgcccgaggcggaaagagtagcagaagacaacaggcgaaataacagatacggtatccttatcaatgagaagcggggtacaaagacccttaccagttctgcactaaataatttatcggttcttcgacgacttttggatgttggggatcgggaccagggatgcaccagtgaccgtcaacgtcctaggcgcatgaccgtgggtctactgtcggaagataagaaccagtactccagtagaaggaatcggaagggctgagagcgaccacggggcgctgaacgaaggaagtcgagcagagaggcaaaggtatggaaggaaagttgggacaaacaggaatgacgatgttttgcgtgtgcccgcgtcacagcttgtggttggcctgagcttgggatgagggtctggccacgggatcggcatccagagtgagttagagcattgacacctaaggcaaggaaggcgtgaaggtatagaacaagatattgatgtcgttgaaaaactgtaaaagtcaggcagcagctctagtggttgaatgctgtttaagaagccaactctccaaagagtctggctgataagagataccttattctgtctagaagcgcgacataattcaggtatctgagcgctcaacgtatcaagagtatggccttgggctatgagccccatcagatactgaggtctagaaattacccagaatcccaggcctcctggtgaataagttcaggtgatttcagtgctctgctaagccatggggtggctcattttaaagccgactctgtacaaccgacatgacctgaaatagttaggctgaccaatatcagtaggtgcgctgtacttctgttgagttacaaccttgaactgagagcttgaagcgacctagactaatttactgactgaaaaagttgagagcatcagattccgattctcgatacgtggcgacttccggaagagtccgtacgccagggtcgagttggaggtctatctacgtcaaaagcacaccgtagaatattctcttactgcttgattatacaagaagatgtgaaaagagcctctgtatgcacgcccgaaactccagtatatacaccttgagcccgctaaaaaaagacgacaacagcggacaatgaaaacaaatataaccgagtataaaactgtactcccaagaacatgaatgcctgggccaactttcaataactggaaaaagagaattgagggtgcacggtagatgtcgcgagcgtatcccagaacccaggatgggtactctgcggctgcgtggcaaattgttgggcgtaaatgtcgggtaatgagctaggtccctggggatggagactctgggatgcgcttgtgtttctggcgggctcagtctttgatagtattgccgggtcaatatcagaggagtagcttgttacgcccctctccagcgaactgttccgactcgccgatgaggctggtgagatgggccggtagcactcagagtctgcaggtcgtttgccgttccttagcgaccggtgaggtaggtcttctgagatgatagggatatcgcggtatgacctgcggatcggctgctggtttgtttgcgttgttgagctcgaggcagggtggtcaagaacgctaccttgcacctcttcttccatgtgtccatacgaaacgtggaccatgtggtcgcagcgctgatgatgctggtgttactcctaacgtctgatattg

SEQ ID NO: 3922 - DNA, 8745 bp, Emericella nidulans
  unsure (1)..(8745): unsure at all n locations
ggaagccagtatttgctgtggcgcatactcgatcgcggcatctgtagagtggagaaaagggcaagcaggtccagcctgtctggctccttgacggaagaacttgcacggcacatgcttcgtgtctgctcacaggcagttatgagttagctaaagtcacagcaagaaagtgttgggaagtcaaatgagaagtatgcccatctgtagaattctggaaggcgggacaggtaatgagagcttactgctttggtttggaggactccgggcagccatgtcgtagcccgagggattgcgcgagtgaccgttctggagatgctgaggtcctgagggaaccggtagaggtgcgcgacctttcatatccgtcaagagccggttccgagagcgagtagtgtggtcagtggaaggttgagtcggaagatcgcgagaagccgacatctgcatttccagggcgtacggagaggcaattaacgcaaaaattggaggggtttatcggacggaggcgacctgcgagtgggggaccgtggcggtgtgcgtttactgtcaaggcccgatcgaggtccgtgagggactgttaactaacacaaatgagacagttatataataacagagaatagaaagacagtaagggcctattcgcacagctggtgatctgtggataagattcgatccactgccgtagatgttgattgatgcttactccgggctcttgctatccgcttccaatacttcagttcgacgagaaatgggaccgggactttgagccggcgcgattacaagtatagcaatcagagccccgacgccaaactttttctgaacgggaatcgtcagatgaacgttggggatgactaccattaggagcaatgaatcttgcccgaaatgacgccacccaagtgttcatctggcgacatcatgcgcctctgcttcgacctgctgtgcaaagccaggtacagctgagacttggacccggctgcagactcccatatcccaactgagctgtttcttgcacttccagggtatacaagcaaagtagccgcaggccctcgaactactgcagccgtcaaatcagctcaagaccatgatctgcctagcttgacgagaggctgccgatcgcaagttatctgtcctctttgagtgtaacctgctccccacactttcatgctggcggaactctgcgcaaggagcaacatgttggttaaacaataatctgattgccattgcgcacactataactcactttctgacctgtgaaacgtacgagttggaggacatcaagtctagccccgcacataaagacataacgaccattttgctgctacataggagtcccctcaagacccagactctcctgcaaagggcgtcagcacaaggatacgtatcatttggaaaaagcactctcatacccaaagttcctctcgcgtcataccttccggaagcgtttcagaacacttgcgccagaggtcgcggcatatcttagcccgaacgctttcctggttctgccatatcttccagccctttctcactttttccttctcttgaggggacacctcagccgaggcatcgccacacaccttgatcaagcgagcagcaagtgattccttctctttctcgagctccgtgatctcagtccgaagttcggagagcagaggcattgcgttgagagagttcagctccccttgtaccctcttctcgttctccttgagactggagagttgttcctgtagacttttaatctcttcgtccatggcagctatcgcatcgtggccggtttcgttggtttcttcctgcaacgcatggtagaccgtttgttttcctaggcgtcgaaacaggttactttttggtcgtcacccgttattgtggaagagctcaccagctacacggcactcgatctccttcttctggtgtagctcacgtagagcttttattgtatacgctgcacacactcttatgttagcacatgagccgccgcaaaaaaggaatacttgcttttggtgaccctgttatgcagatttgtcgaaatgtcgagagccgaataaggacgactatccctcaaccattacctctgtacgcgaacacaagtccaggaaagactttacttctgtttcactgtttccaaaaccaggataagtatgcaaattgtatgacggtggatttgagagaatcagaaatataactcactcagataatcgaggatcagtgcagagccctcgagggaagcttaacggaagtcagtcttctcgcaaattgctatactaaatttctatatctcaccatcttttgctgttttatcagtttttcctttcttctgagccatgattagactagacatatattgtgagtggcgatgtggatgagaggaaagtgggaaaatgtgatggagaaccaggaagatagtgggtgaaagacatctctgtaaggatcaggcaaaggagatcctacattatcaacaccttgcactcccacaagcaggatagacgatctttgcatgatccatatggactaatactcggccaataaccagacgcaagataatagcaaggactgaagaacagatatcacgctttattgagcaactgctattatttcatctcatagattcctatccaccgaaagaagacctaggctaccacaataacaaagaccaggcccatttattccacaatttttacacgaaacaaatagacgcgaatgtaaatacagatagatattgggtatcacatgacgatctggtaaagagcattagagagaccagtggagatatgccagaggaagtacttacgcaatcgctctccttcggagcttggggaacacccatttcctcgaaagttttcgggcctttgcctggtagacgaccaggtgtcgctggtttctgagtggcaggagccgctggcgcagccgacggtggagcggacccgggctttggcgtggcggaaggggattgcactgaatcggcacgtggaggaaagtttgcggaagaaggggaaggccgcggggagggcatggcacctggaacgggcgtccgtgcgggcttccggtctgggacattgtctaagcgttgagggcgtctccgcatatcctgtctctgaggttcaatgggcgccgagtagccgatgtctaatttcggtgcggtcgacattggagggtgctgaaccacctgatggtgttgcagagccctggtgggcggtaacccattgttcctggcccgtatgaagcggcacggttgtactgagcaacattgggccgaatgtttgggttgataccaaaggctgaactgggccgagcatcggagggataacccggatggccatggggcccctgtcggtcggggtagggagccgcgggggccgtgctgggatctgaaaggctcatcctagacgggtcaggcatctcgagattttcggtgactggttgcattgcacttgtgttagaagctcctcgttgatggttcccgtagcgggtggatttgattcgagcaatagcaacattctcatgatctcggcgggacaaggtcttcgatcgcgagatgctatcgatccgaccagtagcatctttgtttccgctcgctgcagctttagcataccagcttttggcttctttgatgtcaacaggaacataaattccgacttcatagaagtaacccagggcgaattccgctgtgggtaggccgctttgagccgcccgttgggcgtatgtgaatgccagttcatcatttttctcgaatacgccttcgtgcccacacaggaaccatttactaatagccatctcggcctcaggctcgccctggcgtgcagcaagtgcattgtaatgcaaggataatgccgggttgaaatcacagccaagctggcccagttcatatgcggctcccatcttcacctgggccttggcgaatccgtgataggcggccttttcgatgttgatgcgcgcagcgttgagatccagaggaaggtagctttctggaacgttgacctggggcaattctcgggctagaagcatgccatagacctgttttgaaagccttttagtttggtaaatatgaaatttcacatggatcactcacgtaggcaccctgaggcgcattctcgtcgcaggactgcgcagcaagactgatgtactcgagacccaagcgatagtcctgacgttgtccatgctgtccaagcagtatcatcattcccaagcgctatatggggccgattagcgtgtgatacactgctttgtcaggttttgacagcggacgtacatagtaagaggcagaatccttcatcgccacacccttctcgtagtgtctgatcgccttctctggctctccagagctttcaaattgcattccgatgcgatattctgcccgtgcataacccttttctgcagctctcgagtagcagcggaaggcctctttcttgtccacgcggtatccgaacttgccgaactctagccacatacccttgataaattccgccttcggatgatactgttcagccaagaagttgacgatattcaatccgtcgttccgcagctgccgctcaacagaaggggtttgcggacgcggcggctgaataacagacaaacgggcctcgttctgcatagcgacctccacatgggcgagcacatcttgggcccatgccagttgcatttccgggtcattcgaggacagcacgggtaagcgagccttctctaagttcgcctctctttgttcatcggtgggaggaacgtttggcggcgggtttcgcagcaccgggaagggagagaagtttggtgcatccattacgtcgtatacggctgcagattgttcgtaatgggctgcctcatagccagagtgtagaggctgaccttggacaacggtggcggaagaagatcgctctgggaaccgtgagcgctcatactgggcctgaccatattgcatgcggttggggctgcgagcctgatgttcaagctgcgcgatgttgtcttgcatattctccggaacttctggcatgactctgctagttgacaaatggttttctgcaatcagcaaacatcacacaaaggagtactagtgggaaattaatatacgtggttgtgcggtgtgttgctgaggggctgaactcttggactaggaggaacgcggtcgcacctttgaggagagggagaaattacttccggaatgaagtactggtcatcgcctcctggcatccaggtagcaccaagacctccctggccacggccttgtggtggtcgattcattgttcacgagaataggccggtttgatgcctagatttggtttctttctttgcttttctcctttctagcgcctgcggagtccactcctgccaatagatttctggatggtgggagtcagacgagagctatattgcttagtattttggattggctggttcattgcatcccaaacataaaaaggagcggtggagcggaagaaaataatatgacgagatggagaagcgctcgtaaggctcaaagactcagcaagaggaaagacccaggaaaaggaagggatttgcagtatctaccaggctaggtgccagcccggggagggaactcagtctgacggtcgaccccgctataacaaacagggtgcctgaaagcgatggggttgtggaactggttagatttgatacgcaggagttggagacattggattacaatccagcactctgaagcgatagaaactctgaagtgtgcttcatacattaaaagctaagaataacatggtaaacattgacagcttccaaaggttgctcttatggatagcggggtgcgtgcgctggtttattctcgactgtgtactcggcatcagcagccatccaagctttcaaatacgctgcgcagcctgtaaaattcttccgtttcccatcgctgtcgctgttatcgccgccgcctgagctccacttaaaaggggtgcgacttattataggaattcatccacacttgaagacttcaccagttgtgtctgcttacttttccaagagactatttttatctggcttagccgctagcccgcagtgccgtttgttccagaaaattagcatcacctcctaggtggctgagcccaccattcatgcaggggcacttgttgagtgttgctcagctcttactttttggttctgtcggatggacagtgtcaatgcgtgcgcttgagtgaacattatcattaggaatgacttcatgaaatctcatactctgttttcaaggtatgcccccagtgtgcctgtacacctgcgcagtcccatacacattttgaagggattttgacacttaatgccgggtcttgttctaagtatatgtatatagacaattttcttcccagcccctcttggggataattcattcattccttgtctgtattaccccttgccttgagggcatcagctgccttgaactgagaggaagggaatctagacatgaacaaggatactttgtcaagcatggagccttctaaaccccagacattcaatcatccctatacaccgtacgacattcaggttcggttcatgcagtcgttgtatgaatgtcttgaagagggtaaagttgctatattcgagtcgcctactggtagcggcccccgccttcagattattgagctttcatgtactgactggaccaggaaccgtaagctgtcttaaagaagtccaactcgtgacctacggtactgactattcagggaaaatctctgagcctgatatgtggctcgttgacatggctccgtgaccacaaacgcaacaggttcttagacgcagtgcagaacactacctgtatgccaccactctactcgccttctaagacgtgtcgtatattgagacttctaggtgatgacgatgagcccgagtggatggtggaattcgcgaagcgcgaggcaagccgtgccgttactgagaagcgaatagagttcgaatcgcgattggcaaggattaaacgagaggaagagcaacagagggcagcactcgagagttcagagggttctagaaagcgacaggtatagcgagtgttcattccagggagcaactaactaactcttttttccaatgtagagggttagcgtcgtgtcgagggatcaagatactgaagatgatgaccaatttgctctggacgattacgatagcgagaacgacgagcctagttctattcccagaggctctgctactgcaactgggctctcttcgagcactcttgaactattggagcgtctaagaaagtatggttcgaagattaagcctgaagaagacgatgaaaatgacatcaaaatattctattgctcgaggacgcactcgcagctgatgcaatttgccagcgagctgaggcgcgtcacgatgccatcgaccttaccggaaagcttaaggcaaggtcttactgacgaagaggagcaaggagaacgcatcaaacatatctcacttgggtctcggaaaaacttgtgtatcaattctagggtggctgctttgggcaatccaacggcaattaatgaacgttgcctggaattacagcaaccgaacacaccagcaccgcttcggtgttcatatttgccaacggaagaggatgaagcgaagactttgtcctttcgagaccatgctttagcaaccgtgaaagacatcgaggacctgggaaaacttggtaaaaagctggggctatgcccttattacgcatcccgcggagttgtcagccatagtgaggtaggcttttttttccccatgagtctcttgtgactcgaagctaatgcaaggcagattgtaactcttccgtaccctttgcttttgcagaggtcagctcgagatgccctgaatctctcgatcaaaggccatgtggttattatagacgaggcccacaatcttatggatgcgatatccaacatccattcagtaactgttactctttctcagttacgaacttcgatcttccagttgactacgtatgctcgaaagttcaaaacccgcttgaaaggaaagaaccgcaattacattgctcaagtcatccgcttgatcagctctatagcagatcatctccagtctcttatagataataaacaagcaagtgaaggctctgttctctcatctgacttgatggcagggaagggggctgatcagatcaatccgtacaaactctgccgatatctgaatgagagcaaactagcaaggaaagtcgacgggtatattgatttttcacaaagcaaagcgaatgcccaagctgagcccaagtctacgattcctgttctttttcatatacaaagctttctcctgccattaatgaatctttcttctgaagggagactgttcttcacgaaaacccccggggatattcagcttcattatatgcttcttgacccaacaaatcattttcgggagatcgtcgaggatgcgagggctgtcatactggccggagggaccatgtctcccgtaagattcttgtgcctttgcttgacaacgttcgttctctgacggccttacagatgtctgactacttaaaccatttattctcctatgtcccaaaggatcgtctaaatactttcagttatggccatgtcattccatcggagaacctgactgcgcacactctggctcngggcgttacaggttgtgagtttgactttacatatgccggtcgtgatgcagagaagatggtacggacccccccggccttccctgcagcatgccaatagtttttaacttcggtactagatacttgacctcggacggacattcactcagttatgtcgtgcaataccagaacgcattgttgcttttttcccgagctacgagtatttaacc

SEQ ID NO: 3923 - DNA, 7793 bp, Emericella nidulans
actccataatctcaatattagtacctatccccacctccctattccaccttccatcacccttcctcacctcctcatcatcacatcaacttacaatataaatagtaactacgcgcgcgggttatcacattaacggggggggaatgcacctagatgacaagctttcaaggccaacgcccttttgcttgttacctgggccgatgaggctcgggaggggtttactgaagcgacagagctccccaaaatcaagtgtatgacttgtttgcacaactccaccatccccatttccgcggtgtcaagtacctgggagacactgttgactaattgagggttaagatagccgaatctttgtgggaacgctctctctgactacgaaacgtacgtgggaatgcgagatttgtcccgctatgcagagcctcgacgtccctggggagttcctgaggcatgctgtgctcgatacagttgttccgcatgcttcgaagattgacctagaagcagccttgacgtccgcgctcgaagaaggtgcagacgatttaccatctgtcctatcatatataccccagcgatccgttctattttttggtaagtcaaggaccagtttcctcgccgagctttgtctcttactcatatgcagtttggtacagatgagttctgcacagcccgcatagtcctaaggctcgcgaactgctcgcaaaacagcctaaaagcccacctccagaatctcgaagtacgcctcgatgcctttgcaatcgatccggcggaggccgtcgccgagaatccaacaccgactcgtgatctgattttctcaggggccgcggacacacaggccgatcctttagtcgttgtcaacgaattcgaaggtgaaaccggagggggaaaccatgtatacgttatatggaatattgagacatttctcagtgagataaactatacctttgactgacaatttgggctaactgtgtcatgtagagcgtccgcgtattcgcatccaacacccctctgtaatcttcattgcctctgctagtcttaacccagcgaatactcgacagcatgacgcccgtgaagatgtatacctcccgtctttggtgcccgcttccaccaatgtcttgcaacctctcacaacagaccccgcgtttgatcaacaagaaccttttcttccagcgtcgaggcttctgcgagtcgtgccggcgaaatacagtgatgaccctatataccatgtgcttcaagagtcaggccacccgacacgcatcgtaccagctgccagtgcaagaatacgctattccaggctgaattcattttgcggacggccaacgaccatcgctagccttgatttcgaagtcacgccgttcttgacttgtgaagtgatatttgataaagcagatcttcggttgtcaaatggttttatcgagatgctgacgaacgggcccgggctagtgccacctgttacatgctcccctcgagatgatgttaccctgatatacaaattgactccggaatctgggccagactcaagagattcaactacagtgtctgtgagctcgctggacatatcccttaaagcggttatcaaagtgtcagaaaactgtaaccctcgaatcctaatgcaatggacagccaatatcgatttctcaatggcgcttaacccaaattttggtgctcccagccaggccctgcagcggacaaatcgtcctacaagcctatccacttttccaagtcagggtggtgctatgtccggaggatcccaggtgaaccggacatctttgagagagagggcttattctgcaaccgatctcggtgtgaccatgtcattctcgggtccaccaagtgtggtagtgggcaaacctttctcatggagcgttttcatcgtcaaccgttcctctgcacctcggaagtttgccatggttgccattcccaggagaaaggtaccaaacgctagagggcacgtggcgcgaccatcgtcctcgtcaatgtcgaaccgccggagcgatcaagtggctgaagcagtgaccgacgataatattgtgcatgcaatgcagaagagtgtggccggacaggaagcggaccttgtcagtctgagtaccgacgttcgtgttgggtaagtgtttctctataacttaaaaaggacaaggctaatctgtgcctcttagcccattattaccaggcacttgtttcgcaactgaactgaagtttcttccccttgcggttggttccttacggctggaatcagtacgtcttatcgatgtaaataccagtgaaacaaccgatatcagggatcttccggatatcttgtccttggggcaaaatgtatagcttacgacccactagaaatgtgatttctcagttgaattcgactgtaggtaacagactgtccgggatagattaaacgcatagatgtacagatggactaatttacatgcatctactatatgtattaccataggcatacatcaagaggctttgagtaacaaccaaccgaagacgtgtgtaatttgtgtaaactcacttgtatggagtttagttgtgttgccagttactctgaaacatgaaaaaggtaaacaaatgaaaatagctagtaaaccaatgattcgttatgaatcgctgactccggggcgacctccgtgtccagaccctagcgccagaacggtggcagttgacattgcataggtaagcgccagagaggcgtctcagggccgatcatgggctacactaagtttcgaggtggctcaggtgagaggggctctttcaaaaaagcctcgaccagtctcagtcttcccgaacaaactcaacatcttctctcatctactttgacaagaacgttatcgagaggggccctcagatcgtccctgttctctccaaatctgccgtcctttacttgtcggttcgtcatctgggccccggccaactgggtcccccaaggcatccacttttattgctccagcatcccattgccttcttgttgagaactccctttgcgtcatactgtcgccgaccggttcaagaccagacctcagacctcgccttcgctcatctcctccacatttatattattagcttcttctcccaaaagccttcacgatgttttctacaactcgccgcagagtcttggatgggttgaataggagatatatctacggtcgcttggtaagtcgtgtctcggtttcgctagccccttcgcttcccgatcgccgctcttcctttcctctctcctctctcctatgcgtcacgggccagcgcgggtctgtctctgaacaactggactaatgcactttttgtgtcctctttatagcctctacttcataccattatttttatgatcgagatggcggcaactgcccggttggcagcaaaattcaactcctattatgcagagaaaccggtccttacaactatggtcaccaatgcggtaagctttccggtcttatgcgaagttggggcgccttcgcttagggcacattacttgcggtttacatgggaggtatgataatctggctcaaggaagattttaagaggcttggggcttaatcaatgcctcgaaatgaggcggagagaatggccactatccagtttcctgagtgggattttcatggcccctacataggtgcttcaaaagcacaagcgcaagtgatgtgtctggggcggtggctgcgactacgtcaactctagcatcgcaattagacaatgaattgctaacaacctaccagattcttggtggagttgcggacactgttgcccaattaatcacagcgttcagagcacgaacaggagtgcgacgtggtgatgattttattgcaattgaaattcatgatctagagaaggaaaagccccccgccgtgggagaatttggacattcagctctgcaataagatcgtcgttcgctgataattcttgggcggttggcaaagtggtcgagataggaggagtgacaccccattgacgggttgtagacggtgccgctgccatcgcgactgtgctgccttgtgctgggaagttgagagtgcggagatcgggggtccgtagtagtacaagagatcagagatagcggaagttgagacggcggacagaagaaataaagcgaacaaaaaaattttataaagcaaaagaaacaaccgaaagaaatgagattcaagggaaggtatcgagtgaattggtcgatgagcgcataagtgaagaaagtccgaacattgcttgaaatgtcgattgatggcgtttgatcgccgctgactcagcgctttgcggctggcaaccattttggccactcatcacatgataagccccaaccacataccccattctccggagcatttcagattagattctacctgatatcaatgtaacgactttgtttttaatttaggtgattgaaacgaagactattcaacgaaagggtgtctctctggctttctcaccgccgggtaagacacagttcacaatttacctgctcaaaagtcaaatgttcagcaagtgttggctgccactacgtctcacgaaagaacctcgacaattgctcatcaagccatctcacatcatccttactatccccgggccctcccgcccagtctgcgactaaggtcagaagacttaaaaatactataagcggaaagtacttacggccccagatcgacgggaagacacaaagagtcccgattcctggacttaaacacttaacttcatattcagaatcttcaggcctacaatgctgtcagctcttgtctcttcatctgaggaatgacagacgggaagtatagatcggtttttgcaggtaacaccaaaaccttagccctgattgctgccaaggctgcctcaaagtcaccattgtatggctcttgcttgctgacatcgccattttgccaagtttgcgccattgctaggaggttgcccgggtctaaattgagaattcgcagttagctagaatgtcaatctgccgtgagagacttgttgaacctttcgatagagcccacgcctcccagaaattttgcataaagtcttcgaggtctgcataacccaaggcggtttcatacagcttttccctatagaacgcttgagagaaaccccttatagtagctgagggttagaatcacgcacaccggctcaagcagacgagtcttaccagccagcatagcccctgccaaatgctttcaggccgactcgtttttcagcatcgttccatgtcctcagagtatgcccagacacaaggacaccaccttgaccagaccccgcagattggataccttttgccgctagcaaagcgctcttgacgccttcaaggaatacctggttgtgaagagacgtcttcgccgaagcgcagaagggtaccgccaggtccataaagtcaggatattgcgtggcccattggtaagtctgggctccgcccattgaccacccgattaccgcacgcaggtgtgttatcccaaagtgcccagtgacaagcttatactgggcgcgcacgttgtcgtagaaagaaacttccggccactctccttctacggggtaacaggacggcgaagtcgactggccattgccaaatagagcaggatgataatgaaatagtccttagggttgagagttttgtcttcccctatgagccagaggttatccgcgatggctgagtctttgtattagcattccgtctttcactaagccgtatccctccaaagcatcttacatacctccagagaaccatgtcggatagacgatagctggagacttgggatccccaaatgtcctataggctatatgagcgttgataagcttggaaccgctctggagctcccagtctccgagttcgaaggtttcgtagtcctgctgtgccattgttgtctgcgaatcaccttgaatgtctccagagaccagcaatggttgggaatagattatcctttgctaaaaaccggcggataagaagtgaggggttgatatctccaactggcgttaggccttaagtcacgaggacatgggaggcttgctgtacacccatgtggaaaggccttcccggctaatgggtgatatggaataaggttctacagctggcgaactctctcgcctgttcttcctagtggtgccttcctaagagattgaggaggtatttgcgtgtgacagcttcttcacagcaaacacaaccatataaacgaagaggtaaggccttgatcctatattagtacgcagaagtctgttaaagtgtcagcagctctacatctggctttttctgcctgtatatccctgataagtgggcaacatcggcccggtacaaccgtagggctcgataaataataataatggttgaccaggtcctgttgagactttagtcagcagctaggaaatacggatttggcatactctcaaggttacatagactgggcactaaaataacagtatagtccagacaggactccattgccatgctcccaggagacatcggcttgccaggcggtattacttcattatttgccgtgagagtagccaccggtctcacattgtttctgttctgtgtgctactttaaaaagatatggaattatgaatggaagcttcaacctgccatatctttcttctttatcagctttgaggaatttgtgacttctgaatattatgctggatgaggagaaattcgctttatctccaactccatctagatgaatgactggtaggctgtcgcagaatattccccgcagaatgttcccttatcctactgtacaccttactttgaatctaaggtgtaattttattgaaagcatcaaatgacgttactctctccgcagcgtccgcgttccacttccgtgccatgaactgcggggagtttgcgggaagaggagagacgttcgggccggagctcggcagtgcggtcttatcgccactgtcaggatggggcttaaagccacgacaagactccaaagcaagggtaaaagcccaagcgcaaggcccatgcggtccgtggaattacctatttaagatgaacccttttcccatctgaaaggcgcttcatgcctcaacctttatgccatataatgcgacagatagtcggccaaaatgtcctgtgtcgcttttagtcctagagcgttgctcgctttgcccaaagtttctccagtatcgtgagtttgtactgaaccaaagatcatggctggtggcgttaacagctagcaggtcgtttcggcatctgaatcgcacaccacagattcacggcctgttgttctctggaagatattgcccaaaatccaccatgaccacgacatccgcattcttcaaagctagtgacgactttgaccaagtccaggcctctcggccagactttaagcgcgatgccgaggttaagttcaccaagcctccaaagccagactggaaggaaggcgatggcggtaatgacggcggcgaaagcctgaacaagaaacatatcgaaatcgacccttatgcagagggacggcctgtctccaataactataagctcttaatctcagggatggtccctagaccgatcgctctgattagcaccaagtcaaaagacggaaagacagaaaatctggcaccgttcagctacgcccaagttatcaaccacgatcctccccttttcacggttgggtttgtcggttcgcttgagaaggccaaggatagtctcaggaacctcacggagacaggggagtgcgtgatcaatatcatctcagagcactttgttgaagccgccaatgcaaccgcagtcaatgcgccgtatggagtatcagagtgggagatatctgggttacaacaagcacctagctccattgttcaggcggctcgcgtcaaagaatcaatgctgtcaatcgaggggaagctc

SEQ ID NO: 3924 - DNA, 5242 bp, Emericella nidulans
gagggtaaaagtaataaaagtgaggaagagatagtaagaataaataaataaaaagaagtaatagaaatgttgaagtgtaaaagagagagaataataaataaatagagttataaaaaaaaaaataaggttagaatatgataagaaaggagatgaaatagagagcatgaaaattagaatttaggataataggaaaaaaataaagaataaaagaggagaattgattagtaaaattaaaattagccagcagcagacgtacagttgacttgacaaaatgacatggtgggagataaggtataatcaataaggggcataaaagtaagtcgtaatagaaaacaagggagagcacccaccaaaaggtaaaaacaatccaaccgaccctgtaaaatggcactgctctaaaacatagcatcgggtgcaagcacttacattgccttcaccgcgtctctcttccttgtcgggcagaaaggttccacgcgcttcgttcgtagcgcgctgcctggcgtcatatggctctctactcgtttgcacaatgtacgaagtggtggcctcgatcgtccaccgcgtggtggggtacggccgcatctcccaatgggccaccgcccgcagtttcaaatgggtgatgaggttcacgaccggcgtgcgctttgatatcgtcgagggtaaagagtacctctctacgcgccccgccgtcatcatcggcaatcaccaatccgaactcgatgttctcatgctcggcgagatcttcccgccttactgcagtgtcacggcgaagaagtcactccgttatgttcctttccttgggtggttcatggcgctctcccggaccgtgttcattgaccgtgccaaccggcaaacggccgtgaaggcatttgatagcgcagcggaggagatgcgcagtcaccgacagagtgtgtttattttcgccgagggtacgaggagttactcggagaagcccgaactcctacccttcaagaagggtgctttccacttggctgtcaaagcgggtgtgcctattgttcctgttgtcgtggagaactactcgcatatcctggcgccgaaaaaattcaggtttgaagctggatctatcaaggttaaaggtatgattgcacccaaagttttagattggctttctgctcaccactgtagttcttccccctatcagcaccgacggcttaaccgcggctgatgtcgatggactcacgacatcgaccagggaatcgatgctcaacaccctcctggagctctctaatgccggacccgccgaccttccctcgtcatccaagggacaatcaactgctgttgatctctgaagcgctaagctgatataggcaactcacagattgcctcgtgactcgatgtttcgagtacctacttgaggcgaagtaatccacgcttttaaccttgggaatattcagatacgctcgtacgatgatgagctgagacgatttccgatcacatagcacgcggatgaatagaatagacactactactacttttcggctaatctactccatgatcatcgatatcagactatcgcaccttcgtgatagactatgttgtctggcaagcataattgtcatggatcgagtgaaccggagggttggggcagcaatagaaaggcgttaggaaaagcaaggatcaagtgagatctcgaactggagaaggattgaaatgcgatattggactcatataccctgcgagcgattatagacgatatgatatccagtcagccatctttttgtcttgtaagctaatgatagatcaatgcaatcagttcgcagctttaacgtcatctattcacccacaatctcacattttccattgttaggataggcaattacacaccccagtcgcacagggctggatatctcgctctatatctaacttcttgaaaggcctccagggatcctggcttcggatgccacttccgtctggaccacctcctggtctagaactagctccaatcccaccacccctcgcagccgttgcaaataggtaatcaccgcccagagcagcaacttcaatcctcacatcctcaacgagatttttatataaagtcgtcctgacacccgtatacggctccccgaaatccccagccgaatccccactctccgcaacagcggccggggcgacgacattactgaattccagttcccgtaaccacggtgctaagagggcctccccagtcatttttatatacgcctctttgagcgcccagtaagtgtagaagagtctgtacccgtagtccacaagacgatcagcagacagtgaggatgatgagactccatctaacctccttatattggccatctctgcagtggaaaacacttccgagaatatatcaatatattgacgtagcgattccaggctccgctcttccccgttccgtccctgccgctcgtttacgcacgtaatatcaattccgacttcgggtttgagtttgctgtccccaccactattgggagtaaaagctgttcccgcgatcgcgaccattgaggcttggtggctgacgttgaactcaacgttgatgccggtatatccgtctttgaagctgtcttcctgtgagcctgagggtggaatatagcatggtcgtctgtgcggatctggggttcgagagatcacgattgaagaccaggggatgcgacagtttcggtggacgaagaggtatttgagcagattagaggcgagagacatgtgtttatccttcagatggtagtatttttggacggagatttgatcagcgggctggagggtttcaaggagaggaagggctgctgttgaggcggttagagggcgggtgtcgatgtaccatcttgttaaaattggcgaagtgcttgcgcttgatgtgtcttgcaccatggtcgtgggagttcgtaaacaggtctattgactaaagagaaatggtaaggcttgtggaagggtatggaggggtaaatgtaagacgggttatcttgtgagcactttaactagctggttatagacccattgctgacatggtaaaaagcaacgagaattttaaacgcttggaaaatgcgtaatgtcgtgaccctctattaattataaagtgatcctgcgagacaatctcgcacaaaagaagacgacgaagcagtacaggcatcggtttccggggcttatcaggagggggccgcacgtggcgataagttgaatgatccgcggtacctgtttacataagttgactttttatcaacatgttgaagtggccaacgcctcccaattcaattcttattctcgacagagtgcaatgattaagattactgtcggtgttctcgccttacaaggcgccttcctggagcatttagagctgctgaaaaaggcagcggcctcgctgggctcgcaacaatctttgccgcagtgggaatttcttgagatccggaccccgcaagaactcaagagatgcgatgcgctcgtcctgcctgggggtgaaagtacagcaattttcattggtggcagctccggcttatttacttgagcctttgagagattttgtgaagtcagttgtttttaaaaatggtgattctgagtgtgcaacgactggcttatatttttctttccccctggggtccaccgcaaaccaacatggggaacctgcgccgggttaatattgctcgcggaatcggcgaaccggactaaaaaaggtggccaggagttgatcggaggattagatgttcgagttaatcgcaaccactttggccggcaaacggaaagctttcaggcgccgcttgatctgccgttcctcagcacatccggtacaccccagcagccctttccggcagtcttcattcgtgcgccggtagttgagaaaatcttgccgcatcacgacggtattcaggtggacgaagctaagagagtcgagaccgttgttgctccttcgcgacaagccgagagcgaagcgtcccggagggcaatgtcacgcgacgttgaagtattggctagtcttcccgggaggctgcgcatttagctgtcagtggaacacctattcgtgcggatgaggaaactggtgatattgttgccgtgagacaaggcaacgtctttggtacaagcttccaccctgagttgactggtgacgaaagaatccatgcctggtggctgcgccaagtggaagattctgtaaaacgattgcaatgaagatatgatatatatgaggcagtgattgttctccgtcaattggacgattagaatagctccgttagttctgggtattagagataaatagaattttttttagtgcgccaaagttcgctaccgtatgaacaaagtataatgtataagaactccgtaactgcgccggttaaatggacgtttttcacattactacctaccggctccatactcctcttcttcacgtcgtcgttgatcatccgcgtatgctcgcccgtaaccgccacgaccaggatcgtactcttctcggtattcgtcacggacctggccaccggatttacctcgtctgcgctgcgagtcagtaccttgcccggaacaagaaagttgagttgcgtgcgtacccgtattgtcggccttcctcgaatcccggatcaaggtccgtcctgatgattctctcatctaactttgtaccaccaatgtattttaagcaatcaagagcgtcttgatgcgtatagtattcaacgaagcagaatccgcaaggagttttgttgtatcggtcgaggcccattacaaggcgctttatctctccgcatctaaatcgggttagcaaaagatccgggttgtgcggctgggaaaccgaacttggagaagagctcgtggatctgttcctctgtagtgtaaaatgagctgtaatggtcagcaattggaaaaaccacacgaagagggcgtaacgtgtccgggaaacgtacagattaccaacataaagagtcttggcatccctcagaccttccatggggtctttctgctgcttcgtcttatcggaactgttcttgcgccttttattctagtcataacctccagtcagtaacctgcttgagctctcagaggctgcttgcaaagctgtactttgctaaatagtaggcgctggcccggcaagccgtcaaccgtgtacgtggttccggttcctcttttgcccaaccaaattggggacccatctgggataagcttggaaataacctgcctttgcccttggcctttgtttaatcaaaccttgaaagaaagccgaggtttccccagcaacttttttgggtttttgggccctacttttgttgccggcttttaa

SEQ ID NO: 3925 - DNA, 4138 bp, Emericella nidulans
gcctggggcatttcccccttaaaaaaaaaaaaaaaaaaaaaaaaaaaaaaaaaaaaaaaaaaaaaaaaaaaaaaaaaaaataaattctatgaagtggtagcaggataggtcacggggagtaggcggacctctgcagctggcagtactccctttccctgcactgcaggtcttcctttctgactacggtagctatgtaaaggcgccaaaagtcccctatttgtacttagaatgagaactagcagctcgttatagacactcagggcttaccccctggcggcctttgccccaatcggggacggtggaacacgtgcttaggcggtgagccacggccgttaaatataacataacataacataacataacccaccaataccaaaggaattcacgccgactagttcatgcttgttgctgggccatgactggcattccacaggaaccccttcgacgcgcagagtcaaaaggtactagccattgcagttagctgcctcagctcatatatgacttgcctgccttacagatcgaggtaaacacatacttttcggattgggggttgtgaagttgaggttcagtggaatggtctggtgttccaggacgagcaccatcttcaaaacactgcttaatcccgaggcaccttcactatgccctagatctgttttgacctaagggaagtgatgagtttgcgaaattgactgctgagcaagtagcgtagcgtggtccacagatccaataagtataccccattccccaaatacctgcgcggcggcacaagcctcaaggggatcacccactgctgtgccagtaccgtggcattcaattatggctggcttcgatagatattcaataccggccagctcgtggctgcgccgaatgagatcctcgtggcttttgggactggggaatgacagcccggctgttttgccgtctgaattgatgcatgcagaccggatcacggcgcggatattgtctcaatctcgaatgggcgcagataggcgtttgatgtagattgcgttgacagcctctccactggtgtatccatctgcattcgcgtcaaaggaacggcagtatcctgtgggtgctatcacgccctgctccgccatagcaaccgtcatatgcggcgacagggtcagattacaaccaccaacgatagcagaagaacactcccggcaaatcccctgacaagactcgtatagcgctgtcagagaggacgaacacgcagtgcggatggtcatacttggaccagtgaatcccaattcatacgaaactcaattggcaatagtgaagtctccgcatccagtaatccgatacatacccgagttgtgtgagactttggcttggatatccagccaatcctctccgaagacaccaatatagcatccaatatccttgcctttatagctggtagtgccgctgctttcaaggcactcatatgcaccctctagcattagtcgctgttgcggatccatccactcgacttcctttccagacatagaccaaaatgaactgtcaatggtagcgaggtctatatcttcaaggaaataaccgtgttcggtgcacgagtgtccggccttccccttcggcccaacgaacgcgtctatgttgtatcggtttgtaggcacccggccgcggccgctgcccatgcttctaagagcttccagtacttctgggggttgtttaccgactctgggagaagcaagcccataccaatgacggcgacagggtcgccaatccatggactggtcccagcatggctgttcgacaccattacgatagtatgctgtgcaatcagagctcagcaacgagataatctggcagacaagcctctgtatacattactggtaactatatgggatgctggcgttaaatgggctcttgattgaccgtcgaaagcgctggttgtctggattggggcaggccactgcgtgcttccacacttgcccagatgcctgacgggacccgactacgggggatcagattagacctacactagcatttctgacatggctagacgtctgcggcccgtaacgctgtgggatgtggttgttagccctagagttagtggttccgtctcctgccgtttacctggcctcctgaaatctattaattatagcctatacttggcaaggtcattgattcaatagcacgccgagatcgaccggtttgctgtatgcgaagtgggtgaacgcgcacttcaatgcaacaagctgcatgcacgtcacagccgccttgtcttgatctcatcaagctggcgcggagttaacttatattacaatactctgtgagggcccagatttccacagtgacctgtgacagttggtgagaaagccttcctcatggcagaacgaatactctcctcgccgatgccacgcaatcggtgggaaagctggggagacgattatcttgagcaacaagtcctgacctatacaggcgatgcgggagatcggcaagctaagcacgggcaaggaagcattccttggacggaaatcgccaaagcgctgctggggcgatcgaacaaggactgtcgcaagcgatggcttaagattgacccgcggtggaatggtgggcaccggcagctggatgaagagctgcggctgactgaggccgttatgaggcacggctattcgtgcgttcaagactcatattaccttatgttcatggcttttgtctctaatctcaagttggtttacaggtaggcggacgtatcatctgcggtggggagcagaagccctgatcgtaaggagttatacacacagactggttcgatctagcagctaatcggatagccagaattctctaagcactggcacaatgcaataaatccagctattgttcgcaaggaatagagtgagctaggcgtgagttggtagttgactggtatcgtctgcccgagattcccctaatgtgcgctgctcctaggatataaaacttctggatgctatgtctcgattcggccaccaatggagcctgatacagcaagaactcccggatagatcgcggctggacttgggcaaccagtgagtttttattgtggagtcggttgagaaatataaaagtaattgaacaagagccgccttgattactcgtcgacagagaaatcctaatgcacgactagcgcttcagctactggcaatacagggatgttcctgccagatggtttcatggacttaagcggcatgatgccgccgactctgcggacagatattgagatcgaaactgctacgcctcctagtacacgcatggatagaggtcaaaggtgttgatcgttctcgaagatgtggagaacaccacaaacgacacattaaatataatctggagcataagctcaatgctacaatcaaacctaatcaactttcgcacagcataagcggttgaatcttgagcagctaatggtccagctaggcattccaattagatcctgttggctagggcacagactgttagtgtgtctaccaagagagctaaaagaataatctaatccttttctacaatatgtcgacggcaggtggtttatccaagtgtggttggccagacgctaacgccagaggcacagtcacttgataaaaaaagaatatggaagccagacgtatcggtggcaggacttcgattcttcaagtactgtcacttggcagggtttctatagagtgcttataactctgcctctctagcaactcgggtaggcaagcttctgctcaaaagattctggtaatttatcctggaaacagcacgtataaagactgcagtagaagaccagctatgaacaggcttatacagatgaaggatgagacatatatcaggcctccagaaaacagtaccaacaggtctaatcgcccctagcataagctgaagcagagcctggtagtcggtccatggggtgctcagcaggaaggcagacaagctgctaataaaagggcaccgccagtccagctagcgtctgacatctctgttataatggactgttctctttcgcggaaccaaatggtaaagaaatcgtgccccttctagtagcacggattctagtagcacggactgaaaacttgattcagaaactggcagcgaatactcttgccagaatagcctactgtaggtggctagcaggcagaagaacttacatccggcattagggccaccctacgcgaacgcg

SEQ ID NO: 3926 - DNA, 3525 bp, Emericella nidulans
tagtatgcctactttatgcatacacgcatgcgtattggtttgcattgggttgtatggttttgaggatacccacaatgtgatgatatctttgctcgcacacataaatttcacccttactcagatgtaaaagcagcgtccgctatcagttctaccctaatttcctcattcatcttattggcccgtcatggatctctgccggtacaaaaatgaagagtaggaaccatgagtgttgacaaagtcaatacctccgtcatatcacctaccatctagccgagcttcaccaatattgccatcggacgtaggacaaactgggagtacagactcgagcaatagcgttttacttctaccttggacacaaaagattgatagatcagtgggcgtcccgttgttactgtaaacaacacgaagcaacaagtcagtaaccaggctctttcgcatgttttatcaccgactgccctactttgatacacattgttacgaggctgttcagggtattcgtacttcgtatacaatgatattatgataggcgggttacaaatgcggggttagggctgcacctatttttgaagagcagatagcgtttaggtagggtcggccgatgatgaagcaggttggttcagtagaaggtgaactagatatgaagcaattgatttagacgggtgccaaagtcctgactaaggcgtaggtaaagacaagagtgaagttcgtacatgacttcttcaagcctgaatcttgtaggtaaattgtacaacaattcatattccctcaagtgccccggcaaatgagatgaaaatgggtctcctgcttggcgcacgtatttttcacgatcctcggttactctcttctctttctccgtagaacaaatcagcacttctcttggccctccttgatttgcgcggtggctccttactccagctgctatccgacatatttgtgagcctcgaaagctggaaaagctttaggatgcgcgagcaccttggtgtgtcgaggcgagttgttgagcgagtaagctgagccacactctttccagaaagtcaattgttcgcccgacgatggtggcggactcaattagactgagccaatacgaagatgtgcgtgatatgctttgctccgaaaagcattctcgcacgagactaggcttaggcataggatgtaggagaggcggcaagcctatgctgaaggcctcctaccttccaagggaagggaagattgagataccccaacttctaaagacaatgcagctgtgcgtcctggacatatggtgccgcgctgactgcagatattccatccccggctcatcctgcaaacggcgcagatgtaggcgacagcaaaagaaaaagagagtcccatccgtcccagggcataaaagacggagaaagccagttttgcggctgcaggcgggtaagcagagactcggtgaagaagtccatgggcgagtgggggaagcctgatgtcggcgttgtgggcgtgagcagaccaccgttgccggtcgggtctactggcgacaaagtacgctgcggctgtggctgtcgatggtgagagttttttgaacaagcggtgtcacttgcaaggtatgttagctgggctttaaatatgattgatagttcaatatgaacacctacataatcaggcgcagcacaggaacagctttgctacagaagttgctgcggttggagagggaggcaaacacgtcgagggatttccaaagattttccttgatatcggccgcctcatactgattctccgggtacatcagcatgacacataggatgactgccgcatggaaagcatggaagctgccctggttgctgttgtaccatttgtaagaagcgaattggggtgattcatgcagggtttggtgaatagatagcgatgttttcgcggacgctaggcatttcgcccgcgcagcacaggtttcgttggtgatttcgccttgtaagtaccggcagagagcgggacggaagagaaggaggagtagttggtgaatgtagctgtatagtatattcaggttggcgaggtgatgaacagggagaggttcagagccctgttctagctggtagcgtttttcgcacgtcttatgcacggagaggatctcggcttctagctgagcggcggtataccgaggagggaaactgaatagactctcgcagatcatggacgagacgtcatgaagccggtattggagtaggaggtaggtcatctgggttggacgaggggtcgcggtttctggggcagtacctgtgaggaggtccacatcgttcacatctaaggggagctttgtgctcatggtcgtaaggcctgggctggaactgccatacagattattatgcgtggtgtataacattttcagccctgcccatgcccggcgccgctcctcgcgttctattggcccaagagcgaatcgttccgggtcgatgtgacaacccattgaggtggcaacgtggtgagtcaagcctagaagcgtccaggttggaagcccacggtgaagtctggcgtaattgatcaggataagggactgaagggagttgatggaatgtcgggagagaatgccgtcggctgatagacatcgcaaagcagcggatcggtagcgtgaagatagggctttgacattgcgactgacggtcctctcacgacccaaatcagagagtaaggggtcatcgtcgtgaagggcagtgacagcaatagcgaggataataaacaagagagaaatctatgcagtcgagacactgtttgggtcgtggcaaaattgctggtattcggcttcaaaggccaaatcctgaaggatatgaaatagctatagcatgtcagttttggacttcggtgaaacaaggacttggagactcacaggagagaagacccggaaataaacgtccttgagtgcgtcacaataccgacttggtgggagaagggcgagtagctcttccctcgtagctgcattcccagctaaagggagacacacgtcgtcatcgtcatccggtacctcggagttgatatcagggagagagtcgctaggagagcttgtaggatgcgccgagttccatcgagacaccaacggcaggtaccttacgtaccctgaggcaaatgtctgcaaagtcccaacgctgtttaccatggagcttctgggatatgacgtgaaaccagggccagttggactgtccaggtcagagaagcttccagtgaggctaccgggcgatgcgagtggtgagttcggaccgcctgaatatgagctaacttgtctttgaagcatgtcctctaggttgcggattcgtgcgagtaattcggcgtggacggtagtgtctgcagttgagctgttttccgacgacagtctcggttggccaaggtatacacaatcttcagcgcccagccctcgtcggacacaggtctggcaagggcggccatcacgagagcaacggatcttccttgttcgacaggcttgacagctgatcggaagtcgcttgccggcaggacgagaagatggagccataacgttcaagttggtgagaaggacataagcaggttattgtc

SEQ ID NO: 3927 - DNA, 7445 bp, Emericella nidulans
aacgtcgaaacggtccatcacaggtcagaaagcaagcaccgtagtcgcccagtgatatcttagcctgttgtacactgcgttctttctgttagtaactggcggtcaaggcataacccggggtgctaagggtcaaggttgcgcaaatatcttgggtagtccccgagtcggggaccatatagtcaaggctgagcaccatgcaaatggccagagccgacattcagcaaaagcaaaaatcacgaacgcgaggggaatgctgtctgctatcaacgcaaaagcagggagaccatactctgtatcccaaaaaggggaaatattccaccaaagcttgaacgcgcgaaactattcgccgatagcgcactggctgcatatgtgggatatgcatcaaccaggaaggtgaagaccccggagtacaccaaaacagtcctgcgcacgtcagggccaatgtttcttcatgcacaaggcggaggacaagtagcctgtcaaaccagtccagttgaaaacttaccccgctccaaaaaagccactgccgataatcggtacaatccagtgcacatgggggtagatggtccacgcaaaaatgaagagccctattgtgaccaagggtcccccggcaatggctgaacggttagcagcgtttcgacaagcatacgagtgccgccagggttcaggcagtacacaccaggaggtagacgccactccaggctgaaagccctccccaacgtcgttggctttcttctccaactttctgtatattcggcgccagaatggatcagacgctattgcgaagctcattcccacgaacattccaaggaagcacagaccgcgttggtacagctccatgccatatacattgccgaatactagttgaaaggcgccgaagaaaagataaaggattcctagaagtatggcagaaaatacgcagaggttcaggcacatcggctccagagtgagcaagagaataggcctataaagagatttcaagactgtctgcgcgattgaccggtccatcttctcgattgaagcgatccaacggtcatccccggtctcttttctgagtttcactgcctttcgcttcagcagcctacacccgtcagaacgcattcccagcattcggaaagtacttacactgggtggtatgtttcaggaacgaacagtactagcatggccagcaacgtgccagtccatatcagaagcacatagaacgtgcaacgcctatcagatacagtcagtacatgccttccaccaatcacaacgtacataccaagtcgtatactggttaatgaacccgccaaccctggaagaattagcgcttgtacatttctgagaagagcatctaaagcatacagtggacccaattctgggcctacaaatggtgaggccgtgtacagcatcatcggtgccgacagctcatgacggtcaaagagatcaccaacagtccctccagctacagataagaacgcgctgccggcaaggccattgaagaatcgactgacaatcattgtttgaatattctttgcaacggcgcagggaacaagccatatcaggaagaatatgaatgaggtgatgtatatgtttctgcggccatagaactgtacctctttagtgaagccttatataaatgggatgtaaatatacctctgacagtggtcctagaacgaggggtcctaaccctagaccccagatgaagaaagataagccgagcgtcgcaacaatccggctgcagttgaactcctcggtcaattgatcgtaagtaacagtgtacatactcgaggtgcaggtgctttcccaagatgtcagtacttttcgagacacaatcgagcctgccaacactcacacgcaaagagaccccgttgagcatatgataacaataatccatctcctaactttattgaaatttcttggattcatcgggtcattctcatcccaccgcacgacaaaatcagatgacgcagtatcctctgtaccttgcgaatcgccggtattgacttccacatccacttcattattgcaactatatccatcattcagggaccaactgcgctcaacagggcgagacaggtgctgtgtagtttttgcagttggctgttatctgtcgttgcggcaggcttgatcggttcgaaaccatcttccgcaacaccatccggcattcctatgtcgattcctccttcatcggtcttttcgctttcggaattttgccaatttggagatgccttcgggctttccgcatgtgcggggaattcggccgtttgattctcgctcatggtcgacaagttattcagtccaaacacttgaaaagttgagctccatggatcgctagtcgaacagctctcagagagaagcttggaagacttgagagttgaccgataaaaggatatgcggaggcaattgacaagaacgtagccgcagacttggctcttatgtcaaagttgcgaaagctacgtagttgtctccaattgccgacttttgcactgttgagaaatgagtcaagaatgaacatcaactagcattcaaccgaaggaatcgcgcgcctggcagagggtggagtgattgggcaaaattggcgtaggtagcaaagacatgattgaatgacaaagcttggagtagactcggaaaggagatgccgaacgtgctaaattttggtcgctccttatcagttgaagcttgacgaccatgaaagctcacgccaagcgttcctcgcgagctcagtagctcgttgtttggtgccgacagtagcaagtatgcctttcgactatatcagatttgggcgctagagatacccaggctatgactctagtatagggctctaatatacgatggttggggctcgatatatgttcaatcaactagggttccatgctccatacactctgtaacggccgcgaacattatctgcacgtctgtagggtaaattctccacctcgtggcagcaaaagcaataaaacaatgtcacaatatgggcagtgatcgactttaatcgaaaagaggcaactattgagattgtcgcttttagtaagatgtagaattttgattagaagtatctactaacacaaaagctaacctatcgaccagaagcactcgccaaaaaaagattcgcggaccaagcgatgacacctgaagaaaaggatatcaagtgcgccccaaacgcccgactatagaaagtagcaatccaacagtccagctccagaaaccagttcaaccgaatagataaacacagaaaataactgtacagaagacgcaatttccacccttcaagatagtttaagccgcaacctgagcttggctgacttcaccggtagcgtcctcttcagcccattgaccccagagtgagcgcttgccgctaatcttgatcggtccgccgacggtattcgagcgctgctccacttgaacagcatctttggttgccagaaccagaacttcaaagaacattttggtcgcgtcagccctagtagccttcttttcaggcaggaggtcctgaaacttgacggctttcttttgctctgcgttgccgaggcagtcccgcaggacgtgtaccgcacgtttcgtaccgaccgacaccaacgcgctgtcaactggtgtaatagtatcgtcaaaatcttcaagtggctgctgagctccctcgtcgtcactgagacgcagatgatcctcttcatcaccagggaagtcaatctctgagcgctggtgcagggttgattccatgccgacaccctcatccaccgggacaatcgcctcttcttcgatttccagagctggagcagcggcagcatcaacgtccatatctgagatcccactgtcgcgtttgcgtttcagctcaccagccttcctgacagtgtcaaaagagagaagatcacggatctcaggagcccagccacgcccgcggccgccgcccatgacattagagacaaagtcaccgttcttttgcatgttcataagtgtcaggagcacaggatcgcggggaagaaaagacgcaggcttcagagtctcggataactgttcttgttggattcggaaataagagtttcctttgaactcaacagcttcatcaagctcaatggtagggagctgcttcctccgcttcgcacgctgagcatgctggatggtctcatcgtcttgctcctcgtcgtgcatataatcaccctcatgctccgtattcaggcgctcgatcatgtcctcagaaacttccgtgagagtactttcacgctcaaatcgctcatcgttaccatcagcaactaccgtgtcgtccccgagatccatgggttcgtcaagtggtaagaaattgtcctcgttggcatcgaagttcacagcatccaaaggtgtgtcatcctccccaaggttaagtcccagatctcccacgtcgatgactttcccggcatcactgaagttgtcctcttccattgggcggggagctggggcgtctcgtcccacttccatgctaaagtcatgggagaacgacaaattcgtctcatcatccagtccaaggttaagctgcaggtcacccggatcctctagcaatgcaggctcctgagaagcagagcgtcgcagaccggtatcggggaatagttgacttccgaagtccattgatgggcctggtcgctttccctccggttccagcgagaggggctggggtatgaggagagacgaatcaagattcataaacaaatcagcctcggtgagtacatccggtagagtgataccgcctggggcgaccacagcactagtcgtcaagtcattattgtttgtgagacggaaagcctaatcgagcagagtcagcagaaagtccaatgttaatagcgcagtatgaggcggggcataccattttgattttcatgagagcttcgttgcagtcatcgagcaaatagcgcgccttcctgctgtatatcctaacaacaccgagtaacagctgaccactcaatcgcagggccatgggagcctgcccctggtctacaatagcactgacactgctttcaatatccgactgcaagatatgcgacttcgacaatttgcgctcgagattggcggatagccatacgcgagccagcggcccggtcttggacaacaaggtctccgaatagaacatggcgaaagatattcactgcaaaaataaaccccaatgtctccaacgcagtttaattttcaagggatacaacgatacccgcacaatgcggggtggttcgcagcgtcctcgcaaccagaagtcggcgacgcgacgaaagcgaaaaacaaacgggatggtaagctcggggcgctcggcgcctggggtagtggcgagaagatggtaaatatagtcaaagaaagtcaacaagacctatctgcgaccaaaaagagtttgcaggtgatattgacgccaaaaaaagcccacagcgcaagaaagcgaccagaggggtagatgggaatggaggaggttggaggtttgaagtgggttgcccaggcgcgtcgtttggtgccttgacggtgacggtcacgggtggctgggagagttatgctgcttagataagcaataccactcatatgatataagcatacgctagtcctcataggcgcagctcggacggacagttcttccgggtccaatgtaggctggactgaccagtgtcaacatccccgacgctatagtgcgactgctgagtggtttgagacgaaattctagatctggcaatttccccttttcgctgattattggcctggtatcccgaactattcaccatttgcccagcttgttcgacctggtcttcagcatacgccttcactggtatacaatttcttggaagtcgcattcggagaacgtggcttttccataatcgtcctgccctgggttttggtgtcttctcagagtgactatattggacgcgcgtcttcacaaagcaaaccatctgaaccattcacgcaccctcgatggaaggttgaaagttgagctcccggtctaaggtctctttattggagcatgagaaatgtcaaggtccgctacgcctgcgctacctttccataatgggcaggctactggctccatatccccattggcagcgcccgcaggagggcgatccaatgctgcaccctcagtaagcttccttggtcataactcggggctactagctagacgctaatcaataataacttaggtgtcgacctctacatactcgcagttaagccctcaggaaaccgcagaccgtctgcaaacctccctcacccatggcctcactccggcagaggcggagatacgatatatacgagatggcccgaatgaattacctcacgaagaaccggaacctttatggcttcgattcctcaaacagttcaaggaaacgttaatactcctccttctcgcgtctgcggcggtatccttctttatgggaaacctggacgatgcggttagcattactctcgctgtcacgattgtggttacggttgggtttgttcaggaatatcggtcagaaaagtcctggaggctctcaaccgcctggtcccgcaccatgcacacttgatacgcgacgtgccctcgaactctcccccgatagtgcaccctactacggcgattccagatgatgaattcgagttgcgggagttgcgcagcaagagtccgagctcgggttcggtttccgcagccgtcaaagcatccactacagtgcctgccgcagaactggtaccgggagatctggttttgttcacagttggagaccggatcccagctgacatacggattaccgctgccacggacctcactcttgacgagtctaatctaacaggcgaaaatgaaccagttgtcaagtaccctgacgcgatttgcaaccagaagaacattccaacctctaagattgtgaccccgccccggtcgccattttacgacgcaccggcgagcggcactgtcggtgcagatttacgtttgaacgagcagcacaacattgcttttatggggacactggttcggtccggatatggccagggaatcgtcataggcaccggtgctaaaacggagtttggcagcatctctgcctcacttcaagaaattgagagcccacgcacgccgttgcagctgtctatggatcgcctaggccaagaactaagttatatctcgtttggagttattgccttgattgtcgttgtaggcttgatccaaggtcgaaagctcctggacatgttcaccatcggcgtctcgctcgcggttgccgctattccggaaggtcttccaattatcgtcactgttaccctcgcacttggtgtactgcgcatggcatcccgaggagcaattatgcgacgactcccgagtgttgagactctgggttcggtgaacgttgtctgcagcgataagaccggaacgctcacactcaaccacatgactgtaacaaaaatgtggcatttcgactgcgctgagccctttgaggtacaccacgacattgcgtcactaaccccggggccagcagcttgcaccgttctccagaaaagcaacagccgta

SEQ ID NO: 3928 - DNA, 7871 bp, Emericella nidulans
gggagcctttggagggacccacggttttaatgttgccggttacaatcaggggggccattcgttatccaccaaaattccgccaaggcgtccaggaatgttcagatgccttttcttttcaaagcaggcccagcgttcaattggagacccttattatgcccaggtcttttttaaagtaggtagctccatttacccgccccttgctcccccagttcgagccaaacatgggttttcataccacagcagcgcttggcaacgcccaaggggaaaagagagcaacggcaatagattgagtctgcgttgttgtttgtacaacggagcatcgttgtatgccaagaagttgggaattcgagcggtggctgtgggcaggggtcctgcaattgcgactgtgactgagattgagactacgtctacgactacgactacgactacaaccacagcttacaatcacactgatgtcaacaatcagccgccgagccagtccggatttcgggctgagtatgtccgctgtcctcttcctcttgtttgactgtggacggactacggagtattgtttctgcgcattccatctcctccttgcctgcctaatgttacccagagagaggcacagtcagaacacgaagtcatgccaagtgccagcgccaagagtgattccaaatactcactgacacggagtttcacaacccggtcgagagctggcaagaagacgtaaagaggcaaaggtcgggtacgttgacagccgcgtctgtttcgggttcttgggactccagaagaggaatgagggcgccttggagtctgctgttgacggcagatcgtcgtcgatcatctgcctcactgtgcataaacagtcttggcgatagcaggttccctccatttcggatttcggtgatgctcgatatccggcagcacgagtcgcagggggaaaaaacacacggcgttggcaccccggacatggtggatcatcctgctgccccaggattatgacctcttggaacacaaggcagatcggtgatcttcacaactgtcttcaggatccttttagggccctggtccagacccattctcgatcacatcccagactctctagagtccagagtctggagctgtactttggaggccgagcatgcccgtgagacgaagattcaatcaataggctacatttgcatgccgctgtcatccctatacggagtgcctgtccaattccgaaatactaatgcttcacaaatcaggcgtgatcgacgtggctattcgcaatgctctcttggcgtcttccgctacctcctaagccactcgtcatactagctagccgccgaatcctcggtgttgtgacaaggagagtaccaggcaggcatcagggttccagagagtttgcataataggatttacaaaggatgatcgttggttgagcgccagagcatgccaagcttctacgattgccgctctggatgatcgtcacagcccctgcccaggccccattctccctcagagtatctttatcagtaaactatcaagtcctattttcgtctatcaccacattgactaatatgcaggcagaagcgaaatgatgaattgacgaattgcgtcttgtcttggcatgcttcgactcccgacagcctgcagactattgtgcatggttcaaacaatactgtggatcgctggaaatatttgtacactgtaaaggacgagcacggcgacatcacctgcccttacccaatgtagacaaaaccactttacccttaatctgcaccctcgttgcataacatcctccccgtattccccgcgaaacacaggggctaggggttcaggggccagaacatggcagccgcacatatgaccggagtatcaaggtccaatctacttactcttgtccatgaccacgaatcaacatcgtacggtgagacagatggtcgcttacaatccctgtcgatagtaacggccgccaaagtcccgtaatcgaccgttcagtggtactacatgcagccttcgattctaacggtctgttattatgttccccgtagaattaacggcgtctgcgtcagccttcatatttgacatactctgtgccgacggtaagcgcccagagaatcgatatcctcagcccacctgctttccacatgctgttctgatagctaattgattacatgaagtattaatcaatccatattcgcgtactctctggctgattgcgagattccgggccgcgcaataatggcccggattaacgaaacagagcaaggaccgcgctcacactctggtcttggattctcaatggtgctgctgcttgcctgcccgcagattcaaccgacaaaacaatttgcgaattgacatatacaaggccaggggccaggggcgccatggcagatgccataacaggtactatagcccgcgcagcgacagcgcttatattcacctattactattgcattatgatcattttgtacgcgcttttcgagccctccctgttaagatcaatgtgcgcaaggagcgcatcgaggttttggattggcttccccgcatagatgtggatagaaaacacgccagccttctcctaccctgtgccttatgtgactatcatgtcataccttgcgccgctccaccctggcgacctggagcttgcgcaagctacagagtctccgggcacgtacaataggtcctcctttggaatttccccgagaaatagcacgaaagtgagcacgcataggcataccacttacgtatatccatgaaatacggagtacgaaaactcctgcggaatattctcgacagaacagaaaccgggatagctaagcattaccattacgaagtggcttgcttgctgcccgaggtttgatgccggcctacgaaagtagtaaacaacaaagaacggtttaacaatgatgataacggcattaagtcgtttccttccttacaggagtgggctctcgggtaaccgggctattttcagcgatctctttatagtataaattggagtgtattacggcgtacgcatggtaacaaaccacttgggcgaagacgatgacgatggcaatattcgccagccacggccgtgctctagaagaatccaccagacggtgagagtatttgtaaacgaactgaacagaaaaaggcagaaagaacgttcgcttatggcacttttgacctcaccgctatagctttccattatgattactgagcacaaagaagacggtgtagttcggttagttcggtgtagttagcaagcgtagataactgacgtcattctgcccaacctccaacctctgaaatacccaactgacttcagtctgttcctcatttttcaattttgaatgctgtgtacgtatggaattgaaaatcgctgtaataggatgaatcatttgattatcaatttctggaaaaattagaaaagagaaaaaacccgacaaaaggaaaccctcatgataaggacgcgcactgcctcgccaactacatatttctcgagccaagtatatgtatctgctactgggcatgaaacgcgcctctccacattacctcagggcggcatcctgcatgagaaagctcatatgaatgcagatcctgaaccctaatacgtcccagacaagttttatatcctctgtggctgcagtgcacagcccagatgcaggatcaaaatcgcttggtagattaggtagccgcataacatggcggcgcagatcaacgggcttcgtaagccctgcacctgccaaatcagccgcgatctggtggatgcccagggaagtagcaaacaacttgactgtgtacattgagtgtgttggtcgagtgaggtcattggcgtgtatatcgaggatcgtcgaagggcagaggcgggtaggtatctgcatagtctattctcattctcttgccaatctcggtaacggacctagcagtttgaggttctaagactatggaccagcactgatcgcctacttgatagtatggtagaattcactgcgagctccaagggcgttaggccagacagtcctcttaggcaaggcatagatatacaaaaaccaggtagatagaggtgattaggaccatcctgcttgacgaattctttggtgaagggatagattcctgggatatctcgctgaacgatataaatctaactatctatcgcaagtatatgtggccaatagcccactctgtacgcattgctagttttctacatacagactggctgattcagttcaatatcgagctatatagacaatcggactcttcctttaccaagacacagtgaacacagacctactctgaattaccagtgctcttcgtctaaaagcgatgctggtgttctgctggtagaatttattgatgatagtaaaggagtgctggcgctgagataacaggcgaaaggaatcgccattgacacatcgacttctatataataacatcgactgcacattctagagactccagctacattagctggccagtcaagcactttcaagggctggccgactctttacgccgccactatattgtatgtcttcctcaaaccaattccgtagctttgatggtagttgagcagctcgctatcctgcataggccgtccgggcgtctaagggttccatggcagagcgccattttcttgtttactgacagaattatgggaatatgagtttggattgttaatggggaaagggcctagtccggttcatcacttttatatcggcgttgacatccagtctagcatatagaacggctacatcagggaaaggcacgagactacctatcacagcgaaactccctactgttgagaagatagtcaagtgtgcgtgtgattctctcttctgcctagttactcactggatgttgaattgttacgtacggctcgtttcctcttaacctatcttgggctgagcactggcaagaaaagaggaagcagcaatatcacctttctcgttaccttctcgccactcactagagcgctttcccgttctacgatatgtagcaacctcataatattccaatatgggccgagtccggccctgaaccgacctggcatctgctacacatcagatttgtagaaagtgccatgcgataacacacgagggaaagggggcttcggggtgattagaacgagactaccttgctacaaataatactagcgacttgtgagtatgtctccattcaggcgtgtctacataatgcaaagggacaaacctacagtacgaggccgcctgcagagcgcacatttcagtagaaaaaaaggaaaaatgtatgccataagaaaagaggttgtggtactcgacacataatcctcatacagagcaaggaaagcaaatgagcggctatttcacgcaacgcagaggaattttggtagatgttttcccaggtatccttgactgtcgcttcattgttgttgatttcgctgacgcaacgataattctccttctcctgcgtctcgccctgttaagtctccaccaatgcacaattacgctcttcgcccaaagaattcgatccctagtttgaacgaccgcagcgcactgctgcgcaaatatccctggccatggcccgtttctctgcttcgcgacgatcgagcattcgtcgccaggcgctctgaatgaccgtcgccgcgcgggcccgtttcagcaatcgggaagagacaagagcacaggtaggcaagtgctccggttgtggatggggtatccaatatgcgggcttctaacgcagcgcagatgatttttactgatgatgttagcttagattggccatggttcgaaatcgttagaatacttactaaattgttcgctacatcccagcgctcggagacggtctctcagggatgctctgacttctgtaaacgtgctctggctatagatgtacccttcgtattcgtctagaatacactcgtagactttgccgtttgccatgtccgttgttaggttattgagagctaggcctctcagctgtgcgacgagggatgcccattgtccaagaagcttgataggctcattgttctcaacggaatcgtccgcagagagtgtgtcatccttgtattcgacatcagatctccgttccagccgcgaaatttccttcttcaggctgtctatatcaaccagttcagacagaccccagttgctgacaaggccccataacagcgcaatggttttttcgcggtgcccgtctacgatgtctgctgcgcggatgtcggtggtgagttgtttcccctcctctgtatttgccaatgcttctaatgcgaaattttgcattggacatgttcaccgcgcggctcaaacatgggtattttagatgtcgagagagtggccatcggcaatcggagatagcaccggcgctagacgatgggtagaggagcatctcgacgagccttgtcaggcgaatacagtctctcagatcaactgcaaggttggaaaccagaaagtcgtactcctcgagtggatgttgttcgtaagttagttggcaattgagctgagcaaaagctttaccgacatttccgcaggaaggtagcagaaatcgggtcagtgcctggagtacagcagaagaagacttgtatggcgacgaggccaggaacaaacacggagaaagaagggtcttcgggcttgtcctagctttatctaggagtatgaccatcatcatactgcgaagaagagttcggcgatatgtaccagccaatgcttcttcatcgtccgtgtcatgctcgctattactccgatccatgtcctgattctgtatcagaaatgcgtctaggaattttgcaagtttcttcgttagagctttctcgtgtggagaagctccattcgccgatttatgtgtgctgctggcatttgctttggcgaggggaattatcctgcctgtgacagcttccagtgcagctcgcagagcattcgaatcataagtctggacccagatgtcgatgaactttcgtttcattcccaagtcttgccgaagccgtctttctttgaggacatcctttggaatggataaagcaccgtacaccagcgaacgatggagtctcttgtataggtttgtaaagtacgctccctggtagagctgaagaagctcatttcgaagcatggaaggatcggacacctctctggcggggtgattgagtactccattgatcaactgtgtcagtataacctcctggtgtgaaagccaattgtcattgtacatagcagggttcgtaatactcgcagaagctaacgggtactcatggcggagatgcttcaagccgttccggctggtagagtctgctgttaggaccgaggtcttcgaactcaagacgcttgatgaagtacaacttctcgtcgctgggttttttgttcgaatacttaatgttcgtctttcgccgacagcagttgaaactgacgccttgaggatggactggctatgaactttcacaggctgatttacctttctcgtcgcaaggggcttgctggatataagatttgagtaattcaacttatcgtccataggcttgtccatttggcggaaattctttcccttaaggccggcaagattcattcctgggggaatattctccttgcctccattttggccaggaatatcagctctgtcgcacgactcttgaacgatgttggagctgggtttcaatggaacccggccggaagacgttacaatggacggcttcgcttgtcgttccttcgtaacccgaggctctgagttgcagacatccgagactttcgaagtataattctcaacatcacacttaagaaggcctaaaatgcccataaaaacactggcccgaaacctggtccttggaggtaaaaaagcccaatccggcgggcacccttcaaaacctgcttggctaccaccccctccacttggggaattgggcctataaaaaacctagtttttctttaacaatccgccttggctcctgttttcaaagccgg

SEQ ID NO: 3929 - DNA, 6242 bp, Emericella nidulans
atatcacatgtgagatgggtgtgaattcaatgaagacgatgacgatgaggagggtgaggaggtgagggagacgatgggatgaagacgacgcggtcgaggacgaagatatggatgaggatgaggagtaaaatccatggtatcttcatatacagttatctatacagccatctacctatccaaaccagcatcacatagaccaacatcaggaacaaaaagcaatcataccaaaacacgataggtatcaatcaggcgtccctaggtatctgcagttatctgcggtcaatgaattaatggcttaaatgcatactttgccctttagatgtctctaatcttatccatcaccatcaccaccacagccaccacgagcgctctctaatttaacacatgccagccaagcctactgctacagttctcgcatacagccacgggtccagtctagccgggctaatccagccaaaaccctactctcccgcgtcgtaccggtgtgtaaatcacgcagtacagccctcgctaccaggcaaataaaataccccatgtttctatccgtgtgcctatccaggtacctctcctacctacttggatagaacctgatagaacctgaagcgaaagcaattaactccgaatagcaaatccgaagccgagcgacaacaccgagcttcagtaccgagctcggacatcatatccaaatactaagtccgacggaattcagacgccggctcctactcttgttaatttcgcttactgggtacttttctctgtatcggtcaccgtacggcgtaagcaacgggcggcctatgaaagcttcttccgttccgaagagcactctaattcaaagctaccctaaggttacagtacaggtacgtatgggattgtattcgctgaagtcaacgaatctgaaacatcggatgcgccatcaggatccagatccctgtcaagccacacacgtggcgcgtgcagcgccctgaggctagccaatgacactgggacgcttgtctagactagcgttgcagtctgtgatgaaagccctgttaggcttgcgtggaaatatagacgcctcggaccggtagtagcttggctgtggcggcgcttgcattggacaggcggatacagtcgttggtcggcgctgcagtcgggctgcattctgggttaggacttacggggtaggtactggacagcctggactaacgactaacagaagcctatattcccattccttcagagtggataatggctgaacattatcgggtcatctaggactgttgctggattgtttctttgacctatcatgataatatacgtacttctatacccagtacagcaaacaaggtcaagtacttccagaggtaacggcttttatattcctattagatttgtgatatatagccttccctgtcctgaactggccaggatctctcgaataatacgtcaaaggtatcaaaagccaagcatgcacgcatgctcctgaatatcaacctagctagaacgcaaaggaagcaagagcaggtactgatctcgatgcggccgaggactgatcatatgtcaacctcgcccattcggttggaagtatggagcttaccatcagctcctcgacgacgcttgggtactagctctcaatcattgccatgtaggccctgagattagcatcgtaaggtgtggaaccggaaaatagggctggcagagtaggggtgtgccggattcaactcagctttgtaccgcggcagtcatcgccaatgcatgtggtgtaggatcgacagcaggctttgtcaattcgtccttcgtaaattcccttgtaggaatatattcaacctgttgcatgtgagaaaacgttcgttcatgtcttgcgcaggacgccctgtttgatatcaggctatatggcagagtattcagggcccgacaggtttgtcttcgatagattcctggtcgttcactctttcagctgtgaacaagccctggctatgtaatctctgaatttgtgacttgcaaggataagaatgtcatagctgtggtcagggtgcctccgtaccttgctggaaccatacaatatcagccatacactatcagtctctgatatggctaagcgaatgctcacataaccagagagtacggagtacatatggccattccatgtctctttccactttctcacgtcatactgaaaaggaacaagcgctaaattccatgcacaacggccgcgtacctgtttccctggatggttagtgctcaccaattaatctagccatcgtctccgcagtatctcagctgcgcagtcgctccgcaaccgctcatactgctgctaattcagccaaacgttgcttatactgcatagcgcttcagctgggaagaaaagacaaagcctctatcgaatagagcactttcttttccaggcctgaagtatggatactgcaagggttctcaactcagtcaccaactccatccccgggtcgaacatgtgaatgaacctcctacagggctggcctttgcgatcaaccctcgctgaaaactctatctggcatgtcgaaaggcgaatttaaggggtcggatggtgttcaacttcagtctcggcgtcggtgaggaccaatacaatatatcttgttccaagatgacaaatctacacgaagttagctataggaaaatatacacgaaccagagcagataacggaaaagcatcaggtagttatgtaaaagagaataagataaagaaatattctaaagactagctacgtattcgcccatcgatgcgtgctcgtactgttgagcatattctccgagtccgagtaggcttacaggacagaccaatcattatatggagctttactacgtacaaatatagatcccgccaaataccaaacccatatcacttcttgagctacagtaatgtgagactagactatctgagccaagaggatattggaaatggcctaaccctagtcctatgtgctacaagtggctatctcgctggctagcatagatggatgacaaataactagtgtagcgtaagtcaggttaagtcatcaagggactctgagactagcctactgttatcagtcaagagtagagtggttattacataaatcttccatgatagtgtttaaaattatctatctatctaaactatattcaagtagtctgtgccatcgacacggtgtagatcatgtatatagcgggcagtaaagagaagcaaatcggcgtgatatttcaagtcgctttaagcggcattttgtacataattatgtaatgatagagaaagaagctgacagtaacaacttagcttcctcattatcctcataattgacgatatctgcgggcttcttgctatctaacgcaaccagcctcaaagatatcccagctcgtccatccattcatctccacggagctggcaagcagagcattgcaatcctagccagctgacgattgaccggtggcttaggactattgctgtgtgactgtaaccgccctagtctaggtcaaggtctagtttctaggcagtactatttcagtagagcaatgcagcgggctgtgcacagtacgtgataaccaaacgcacatatcttgcgccacaaagccgatcatcctcttggtgttgatacaataataataatggtgtggagaaataggacaaaaagtagaagttaactcgtccggctgatctacctacggcgcagaagcatagactgactgactaatgagtgactgcttcggactaaactccctcaggaaggcaaactgcatgctctcgataagcagatgtgattgtgattggattgtgatagtgaatgtgagaacccttgtctataccgtcggggccttgtctacaccctcagggaattaagtcaatgacaaggtacccccccgccacgacccttgtcaggctgtcactggcaagtcgcgactgccaacggcatccccgccttttttctcatcaatatgtctgcgtatacggagtatgtcggggaaggttgttcagcgatgcaagacagactttttgctctgtacctcattccgctctaactcccagacgtttctcgccatttttcaaaatactcaagtacatgtactacctctccgaatagaggagacgaggttcgatgactttctagacatccacagtgacaccacgaccactgcagcagcgcatgtggccggccgactccggcgtgcacagagtatggcgtatgcatcatgtaccctgcaggcaggactcaggctgcggctgtgtcactgcactgtcagtgccagagtccgtactctgtcccaccaacccccgggcctcgttgagtcgttgcaccgtactctgtaccacgcggccagggaaacccggacaagaaacggctcgattcgctgcgtccgttcgtcgaaattcccctggaacggcgggtcggaagggatgctgaaatgaacgctgcgaggctggtggctttagcaaatggaccgctcgcggtacacaggcggggggcgaggcgtgtacttgcgcagtaccctcggtggattgcaaacatctacactgaactggtgctcccaagcgatcgtctccgaactccgttggtgttatgttgaatagacggcgatacctccgtatccgaaatccgtcactgtcctccgaacggagggctggagatcagaagttcttcgtagagtatggcattctccgggcgcctgacggccatggatgatctgatcctgccaaaaataaccggcctttgggcattcggccgtggacgtggctcaaaattggggccgctgccagcaggcaaacacgcgaaaggtgacggggaaacctggttgatcggcgcgactatggatgctcgattgcatggttggatctggatgcaagtcagtatcaatcacgattgttcggctcgactgggtttgccatgctgcaactgtgtcaccatcccccacgccgtggcgtctcggtctcatatggtggatggtcactgacggagttaggatgggaaaatgtgctatctcccttatgctggattactcagaatactcagtgtttttgtccaagagcctctcgccattggcggtcagacagaagcacacaagaagcttaattgaccttgggcgattcttctcgtggcattatccagtctactgacattctccaaaagtcgacgatgaagatttgatgaagtttaggatcgcccgtctttgtcctgtagactagatttcaaacccgtagtcctgcatcttctttgttgatctgacttgaatgaactcgagtcagggattcctgactcgtacagtcggtctgctctgcaaaactagacaaagacaatactgacgaatactggcgagcacgggcggctataccgatcgacggcgcgagtcacgactgagatgaacgcagtcggccgttggtcgcaaactggagctcgtccaaatcccagatagtaagggccaaagcacagactcctccgtatatctaggatcagaggatccgcatgtgggacattcttgcactgcatcgagtgagagcgaggggataaagacagtgcgtggctctagacagcaagggaacattgtccgtccatgctcccgccatcccttcgctcacacccagcaacaaccagcaagcccggcagcctgtagcgtcatcggacaaacaatacgacgggaacagctgcttagcggcgatcattccacgcacgcaccatggataccactgccatgtgtccaagccaaagaaatgggttgcctggttctgaactttgcgtgccgatcttccctgactctttgatatttgccaaattggcaaatgcaaaatggcaacacgcaaaatggccaggtcccaatgctagaatcgccaaacgaacttcacccaggatggtgctccctgcttctaatcatcggatggtggcgcattcttcagagagtcaaagacacgagtctgcttccagcagactcgttcgacctgcattgcatcactgcaaggaggccatgctacgtgaaccgattacgtggctgataaagtggtgatggtctcattgaagtttcagcgcttgggcacgctttggcacgctttggcagttcgcatcccttgaacccctggagccgatcgtggacacgtgaatcgagatctccatccctctacagactactcccgtgcttggagtgcgccttggagtactttaagattggtgtcgatgatcccctggtgagacatgccgatgataagagcacatgcgtcaccctccctgtttttcctttcaggattacgcttcaggatttcgctccag

SEQ ID NO: 3930 - DNA, 4738 bp, Emericella nidulans
aatacagctaattatgcggccttgggatgtagatatggtctctgggcttgacagacttgacagggacaaggccttggcataccctttgtcattaaacagccatgccagctcctggtctgctgccttacctacctacaagccctgctcagcagctgctgcctatatctagataatatcccagtactgggggtcaagccacaataccttctacacaacaagaaagcgcgccaccttcagcacgcatgagaggattagtagatagctgtcggcgtcgcgccagccctgcttgccgcgaccgaggactgccattatatatactaacaggctcttgtacttgtgtaccttggtcttctggttgagcagcttgatgcagaaattgaggcaggctgtctccaacagggtcatcataaacaccttaagttaattagtatccaagatcagatcagggctctggtataatgccagcaacctgcctgccttatcagatctgcaggcaagctgccacagttgctgccaggtctactactattgtgtggtcatgacatagcttggctttttttattgccacagctacttagtctgcatgtaaataagaaacagcaggatctgctactacagctgtgtatgctttgtaatacttgtctcatctatatatgcctgcagcggacggtgtgggatctggttaggtactatgctcgcggccatcatgcgaatgctgttcctacagtattgcactgtatactgactataccaagccagctgccccatggcatcccatatatactacatcgcctggctgacaggatctccttgtttatgcagggtggcgtcgttctcatcacagtcagggggcgtgacgacgttgagaaggtcttggaagtacacattggcaaggtatcatgcctatcaggtcatgcgcagccatgggtttgcattatgcagcatgttactctcggccgtctggcaggctgcctgctacttgttgttggtcgcacgcgctttgatcttggcagcgatctgctcgtaatcagttgacgggggtcagggctcgtcgggctcggggtcgcatgattggatgtgcacaaggtgcaagttcttgcgtgtggggaatacctgctgccaggcaacaatgtaatatgactgctaaacctcttataaaccctgtactttgacatcagtagtaacatggccttggtgtgggtgctgtgtccagccatgggcctggtaccagtacttttacatagtcttgagacagctgctaatatacaggcatgatagatcttgctagtactgcatactattagtgtatacagggattataggaactgggtgatcaagctcacaggggatatagatggtagtggcatcaagatagacattataccattgtcagatagtctggatgataggctgaattatcaagcttgagaggcaatatttcttgcagagataggcctcagcctccttgatatatataccatgctggcattgacagcagacaataaaccctagttcagggacttttacaaagataaaggggtccattatcaccaacaaggtgctgattcaggggaatcagagtaaaagtcagatttctggccagatcttaccagaatcctgcattatttgcttttcttatcctatatctataatcaggatagtgtatacaactggtcccctatcaaaactgtagaccttgacttgcaaactttggctcagcaccacagcctgaactgatgctggaaagctctaagatatttcccagttagaattaagtaccttatctatatcctgtaaatttctcagccttgttagtaactaaaagtgcaaagagatgctcaaccaaaaaaccaaggcaatgcaagacctgtttgccaagacttccctaacaacgagcgaagcgctgctcttcatatcttcgcccccagtggattagggaaaaaggatagggatctggtggatacgacactggaccaattacatgaggaaggaaaggtctcatgggccgatggacataccccaagtgcatacccggttttcgtggtctggagaaagatcatcaaggatggcaagccagttatgaagggtcgagttgttgtcgacatccggcatctcaactcgatatcagagcccgacctgtatccagttccctcccaagaagagatcctgaatatgcttcgaggaaaacgctatattacagttgtcgatgcaaaacaatgcttccaccaatggcccgtacagccagaacaccgacgaagattggcagttataagccatcgaggtcaagaggtattcaatgtggctatcatgggctatgttaattcggtggccttcgtacaacgtcaaatggaccttacactacatgaatttgctgatttctgcagatgttatatcgacgatatagttatagcttcggcaacctttgacgaacacctttctcatctgcatcaggtttttgcccgcctgcaatctctaaacctatccctggatcccaagaagagctttattggatacccgtccgtacaactgctcggtcagcatgttgacgcctttggcttaactacggataaagagaagatcgcggccattcagcgccttcgatttccagagacattacgccaattagaatcctaccttggtatgactggataccttcggcattacatcccaaaatatgcatcaatagttgcgcccctttgtaaccggaaaacacgacttttaaaaggcgcccctaaaggtggcaaggactgcaaggattggtctgtcaaggcaaagctctctaagccaacataccaggaattagcagcctatcagaaactgcaagcagagttcgcctgtccccgattcctgacacatcatgacccaaatcaacagctctatgtggacctcgatgcttcggcagatggacatggggccatggtctaccacatcaaaccagactatgctcatgcagacctgaccaaaccgccagtacaaaccgtcatacagccggtatgtttccttagccgaggcctcacatcagcagagtcacgatattggcctaccgaaatggaaacatcatgcttggtttgggttgtacggaaaatacgccacatgatagaagcggctccaaagaatatgcctgttattatatacagcgaccattccgcaacggcaaatatatcttgacagacatcattagattccgtagccacagaacatcttaacctttgcctaatccgagcttcgcaatacctacaacagttcaaccttcggatccatcatcgtccaggaaacacgaatctcgttgcggacggcctttctcgcctaccacatgaaaatggcaagccgaaagaaggagacatggatcttgatgagctcttggagcattgtttatttgcccctatatcccattgttggcttggaatctctgaggtgcatcttaaccctgactttatgaaacgtattaagcaggaatatcgaaacgacacgcgttgttcagccatatgccgggttcttcgtgataccaaacttcaaacaaggatcccaaaggcctcatgatatgccttacaagcttgacaacggccttctgtttctcctaaaggactccggcgagtcatggcttgttataccaagaggcttgaaccaagaagtcttccagatgattcatgacaaccaggggcattgcaggctcgacacggcgatcgccaaaatgcagggcttagcactttataaaggtgtacgacaactccgaaaatatatacagacgtgcccatgccgattatcatcaatcccccatcacaagccttatggatgcctcaacccaatccgtacgccggatagtctctaccagatacttaccatggactttatggtgagcttgccaactaccaacaagggaaatgaccagatcttagtagttgtcgacaaattctccaaacaaataggcttagtaccgggctcgtcgagatgggatgctgcacaatggggagaggaactgatattatttatgcagaccgccgattggggcttaccaatccgaatcatctctgatcaggatccccggtttgttgctgggttatggagagggatgtttcaagctctaggggtcttatggctctattccactgcatggcatccccaaacagatggtcagacagagcgatcaattcaggtggtcgagactgatgcgccatcagctcgtactggaaccgaagttgcagggctgttgggagcgtctactgctgcctatccaagcagcattaaacagctcaaaaaagacttcaaccgggttatcaccgcatgaattaatgtacggccaacctctccgacaaccctggaacttgctccgccggatgtcggattgaacctttgctctccgccaggatgctcaggaagctctagcctatgccgccatttgcatgaaagagcaatatgataagcattatcaacctatgcattttgaacagggcgaaaaggtcctgttacggcttcataaaggatataacatacccgccaacaagcgccttagccggaagctaggacagcagtttgccggaccttttaaagtactacaacgcgttggtaaggttgcctataagctggactttccttcgaagcttcaaatacaccccgtcgtgtcaatctcacagctcgaacctttcatggaggatccttacggacgatggcccgataagcctggcccaacgatcgatgagaactttccggatgacgatgatcgatatgaggtcgaacgcat

SEQ ID NO: 3931 - DNA, 2456 bp, Emericella nidulans
  unsure (1)..(2456): unsure at all n locations
gtcatcgatcagatcgcctcaacactcacctctatcgaaaaactcaagtaagtggttaactccattatccgaatcatccactcacgggcaaaactagctagttcttcccctagcaaacgagaaaatgagcgcagtgtcatgcagcgaaagcggaggaagttgacaaatgaagagacgtgccgagatcgtacacagagtcaaatcaactcggaagcgtccgcagacatcaacctgtgcggcaatgaagacattctcctggagatatcccaccgtggcgacaatcaatcttcatcttcatactggcgctctgttccccgacagaagcacaaatctgagcctataggacgcgagcatgaaggagacaatgcccagagtgtatctcagaaggatgatccgacttgcacacggaaacggttagtcgactcactgggcaccacaggtaatgacggcgcagttattattccgatttcagatgctgttcctaagtcggcgcattcttcccaggttaatgtctctaatgaagcggagttagtctctacacgtccgggttcaaccagggaatcagttaaaatagtgactcgtgatcctgggcgtttacaaaacttaacgggccccaaacctcccatatcccgatcttcgagatttacgtattcgcgacagcgctcgttcttgaatgacccactcagcttgactgactccgagccacttggtataggaagctcctactactttgatacggaaaaagaactgcgtagtgcgcatgtttcgcgcatacctcccgcagaagatgatacacatgatatgaaacctgttcggagtattcacgagcttcgacaggccggtgacaacgcccgattccgagaagtcgttgactcactcttcgaggacattgaggatgcacatactacatcatcggggaggtgccgtgggcttgctgagttatgcgcaaagctcctggactccgagttcgtctatcgtttctctgagcaaggctttgacgaacgtttggtcaactgcacaccaaaaagcctcgacatagtatccgcctcgcttgtgctcagtgcttacaaactcataataattggaggtcatgcttcttgtatattttcagaagccgtatgggcaaagatcctcgaactcttacctcaattcctagacatggatgccgacctcaacactttagcgcgagagccttcaatcggcctatcaagaacagcgcaagcttcagtcagaggtattcggagtcatctgctacctgtcataggtgcaccttcgccatacctgtcccctcaattattagcagtcgactgcaccgaatcatccttaaaagttcttcgacagagcagtcacactatctgctctattcctgcctccctgttaaataggcttgttgactttttgatagcgaaggcttctgcgaacatgaatggtcatacactggcaaatgaaactcactttttgctggcattattctcaattcttgagaattactctgtgatatctgagccttttgaccgtgatcaccgcctatgtttccaacgcctttctcagcttcacggtctcttattcctggatcattatgatcgctcccgtcaggtttcaatgtcctacgttcgggtgatattgaatcttactaacagggagccaacactctgcgccagctttgcgtcccaagaacttgtttctggacttgctaaaattgttgttggtaattttagcaatgtttccaaccgctctcttgttcaggagggcgactctctgaatgaagtcatcttggctctgggcactctcataaatctatcagagaagactgagcaggccagagctatactcgtacatgccgatggcagtgcggttcccatatttcaccagctgttagaacagttttctagtagtataaatgctatggaccaggtaagaaatatgctctttttgatcattcttgtctgactgaataaaggcgcactccgtgcctgaggtgcataagaatgtcgtcgcaggatatttatctatccttttacttacggtttgtcacgatagacaagcccgcttttcggttaaggattctctagatggaggtatactagccttaattttgtcaaccgcggaaaagttcctgcagtaccatagagaggttgaaaagggtactcgcttatttgagaggtgtgaggaaggggaatctagactcacagaacgaatagagcaaatcatcagccaggtacgcctgctggagagacctgctcatcagatgtagcgagatctaaagagaagaccggcgccgcctcgattgcgaagatggatatgctcttcttctttattgacaagatgccgccgtctagtactatgcnaaacctagtaacttgtcgctggcgaccgttatgacaaataccattatctgttcatcaaactataatttgcggagttcgggagatcccgtatggctgacacactaatgg

SEQ ID NO: 3932 - DNA, 5406 bp, Emericella nidulans
ggaagcatccagcaatgtgcagttcgacccattttttggttcctggcaaatcgtggaaatgaatggagagtgtacgcctgcgtccctgaccgcggtcaaactgtaagttggccccatttgctgtcccaacatgaaagctcacagctctcacgcagcgagttatcgatctccggcacgggtccattcttaggcatgattcggcactacaactcctcttggcgacagatttgttatgtgactgggcaagggacatattacaggagcgaattgtaagctgcctacgagaacaggctggaccggacattccggggctgcaggcccagaccagtatagctatcctatcagggatatcaagtccttcaccgattgaacccgccgaaatctcgctggtccctccttgggggacttctgaacataacagtggctggcaatccgtacaatcagtctctacggtccctgatgtagtcgtcaagtccgagattaaagatgtgagtatggacggggtgcctgaagaaagattaaccccagaagcttccagcgtgagccagccggcacaacctattccggtaccatcggtggacccagaatacgggatatcttaccggagtactaccctgaacacatagctatcaggtctcatagagatgtgcaacttcggtttcgtttactctctctccccgagtccgctcacgacctcgctctcataatggcggcaatggacggagaggccaagatacatctgacagcccgcaagaagttggaattattcaatccactttatcttttgattgtggactcacaatatctagacaggattggcgccgcctggggaagccccaacacccgtccctcaccaagcgacggtcccttgctctatgcttgcctgcattggggggcgaccaacgacatgttgactgggtgctgacgaaagaattagcgtgcataacggcgtcaccggttgccattgcagccttcgcaaatattattgattaccccactgcaacaagaaatctgcttctaagcgcctcgatgacatcgaccgaacgtgcgccgcgcctgatccactggctccgccaccttccgctgcttgaacgagttcaagcagcgtccaggagtcagttcctgtatttgaaggcgttttacggtcgtataacagcggatgactggatcgagaatcgcgagaaagcggcatttacttctcgtctctgggaatgccgagactcgcaaccacggactttcctcagatgcctcaaaaatacctactcaattgcaggagcaaaaccacactttggtgatcctgagcatgataacaaaatcttgcgggtgcttcgagttccgagaattgccaaacagtgagaatttgctcttctacggaacccagtggaggctaagaagccgccattttgtgtattcgagtttaacaatcgatatgatgccgaacctaatcctcccacaatttgcagggctgttcgttcatacatagaagaggggcccggatgcttttatggaagaaacctgccactcacagcgctggataagtatttggctgcgttatcagacgttttggagaagtgggattgatctttaaatggtcgagtaatgaggagaccatgattcgtgcggcttcaaacaaataggatcatggggcttctttatagaaagattattccataattttctaagtccctacatctctcccatcttgcgattgtggaatgactctactaacaaggttaattctagttggcaaatataggttcctcatctatcatgaactacattctcgatttatgccttctatatacatgtcctttaatttagactttgtatgtctaacttttcattgctgagaggtgctagaaagactaatttatatatcatatatattaagccttggtagtttcttatctcaagcacgccccacaatctaatcgcgaaattgataaaatatgcttgggagatacttgatcaggtacagggaagtttaataggagctgcaatgttagtaacgataacactgaaataaacagccgggaagctgtatagtgcgaatatataggagttggtgcatactctggcaagcatctcagtgccttgcttggcttggtgcgcgccaaaaccgattaagtcacatcagaccattgatacctgtattcgtatgctcattgccggtaatggttggaaggagaaatcctgtgatgcaacctgatactcatggggcatgtggcaggacccagactttgaccagcccacgagtactgtaggggtttggggtccagaacagagagcaactactagtttagctcaatgaagagtctcatcacaacagaataattgactgagttatcatagctacgttcctaagatagagataaagaatcggtgtgccctttgaaaccatcaagataggcctcggataataaatattgcgtctacgatgtgaggggtcgacccaacccgtgatcggtaggtacgggtcctgaccctcgacctgacccgagggttcgggttttgaccttggacccgtcacggcttttgtattagtctagcaggaaccagaaacaggaaaatgccaaagcccactatctcggcgcgggtttcgggtcggggtgctgaccctaaacctgtcacggattttggcttggtctacgtgttatagatcctgcccgtcttggatagagaaattgggagcctcagccaacgaccaagggagctccagaaaaagcaatcgagatccaagcttgctactgaattagaactaccctcctatgcgccccactctcgcttcgcttcgaacaatattcccccttcccctctttttcccatcaagagacccttcttatgcgcaaaacacacctaccttagactaaggtagtttctccccaacattgacctcgtcatggacctgtcgccaggctaaatcatatatgcccgcagatgcatttcaagacacggatgatccggcctggggtttcccaaggattagccttgcattactttgaccattctttcccctacgttggctttacatggcaatggtagcctttcttgttaataggctgatctatactgatgaagtagagctttaacaagaggcttctagcgatgtggtccttacgttatcaggaaagtataaaatgtactctatcatatgtgaaacaggattgcgcggctcggcatcttgcgcaacttggcgtcatggtgccctgccccgcttatcctaggcctcagcaaataggatacgccggactgcggaattaacttgagccttgtacgggatgaaaccgcgatttcgccgttactgattgcccagctagctgagatttcctgagctcctgcttcgatccaacctgaattcagggctacgtcctgtctccgtctatgcatctgtttaatggcctgactttgtatcctgcctgttgtatgtaatccgttatatcgttctaagaatatttcctgaccctgcactttcacattatgatctgcacaggtgctctgataatctgtgtggtacctgtgcaaaaaccctaagtgccaagaactttcaccacaaggagaaatttcgggatttctcttatggagataactcctagatacctttgtaaactggacattgcagtaatcctagtcaagatttggaagaaatagcggcgtacggttttctgggattatagagctgttttgtatgagttacaaggacatcacgctggagtaacctgacgactatgggagctacggatgggcatgtctctttcgtatgccctaggactttacgtattccgctgcacgtgtcggtatggataggttacttgatggggactatccgcaggaaagcgaatggaaatgctctgagacgttgggtctctatgggcgaaaacgctctagaactctaaattagactgtttcagactggcacatcgtagtagtctctttcttccggactgtgtactgcgtaccgagcagtcaatgatagtgtaagataatgtgccaatcaagcatgtgacctctaacatcttctatcagcagctctaagcgttgaaaaccctttctaaccctgttagaaatccctcattttgtggaggcaagctagacatgtttcaagattatcaagtgaccttatccatccatgaacttcgggtggatctcattcctcttagctaagcggtgatctaggacactaccaaggcagttcaggagaaatgctccattctaacgcatatcttgcatgtcggtgaaggcctctttcatggtatagtaaaaccagggtgcttgaatccgggtagatttggtcgttattgccaggggtacagcaccagtggctagcgtgcctggactggactatacctacagaatgcaaaagcaaaacaatttgccaatcttctgtaggatctgtttgccacagaagttctgctcatagcaggtacggcacatctgaattatggagccgttgtgtttgacagggttgctgccttctgacgaatatattctgaaacagccggcgaaaatcctgaggtgtgtcaactgaacataaggaaactttcagagctgtatctgtcagggataaactatcaggtcactttgaggtgaaatataagattgacatccatcgtccggtcaatagccttctttttgattgtttctttctatcgcgcatactctcgtttagattacgtccttgttactacatattcaatcattaccattggcagaccttccctaccagtacatcaaaatgcgtttcttccaggccgttgttgctcttcctctgattgcgggtgttgttggcagccctctgaatacccgcgctacccttgaaaactgcaatgacgagggggtgcaagcaattaacaacgcactcgcccaggctgcagagatggccatttcaggagccagcctcatccgcagcggatctggctactcatacagccttttccagagcttcttcaagaccaatgacgcgcaggctcgcaaccgtgttgctgatgtcctggagatttatctcacatcgtccccgaacgttttctcaaggcgtttgaacttactactgtttttttgtgttcattacattcgtcaaaagcctctttctttcattatctcctctttattctctattttatctcttttatttttcgtctattttcttatatttctcttttttttttttgatatttccgtacatccttttctattttctcttaattcattcatatctcttctcttattcactctcttttctctattctctttctctttttctactcgctttttgtattattcacttaatttccattttttttctttttccttcctctattctcttcttcttttcttcattacgcaacttttcttctcctctcctttctttcccattatctttatctctttctcttcttccttgtacacttt

SEQ ID NO: 3933 - DNA, 6040 bp, Emericella nidulans
cgtattttatgcccttaggctgctaataataatgcggctgagatatgcatggaagcgattcacattatttagctgccgaccggcccgaatgcccatacgaccgcttgtagtaagacgaaccatcgtaccgtcagatgacattgtagataggtcgttgtaccgtggaaatcatgcctttttctttgtttatcctactgttcaactagctaataaaaaaagtgttgagtctagtcttgctatactggtttatgaataaagtgaatggaaaaagaaagtcctaaggatcctcgtgtctatgacattaagggtactggatggtatcctatgagatccctattatgatgagcgtcatacgctgaagcgtgagatatatcttcaactcttaacctgagtaatataaccagtccaagatgcctaactatatcactgcgcagaaactcatcgcgtgagttgagactgtatacgttgccgttgacaccgtttctgtacttaagcgtacctggaattaaacctatatgcatggcccaagaatctgtctagtactgtgctagcaacttttagctggataagcttgttttgttctgttctacaatatctattggcttgttgtgtccaaatacgcaatacgtaactcttcggacagcatttataagaataggaatcttgtccatgtagtctttataagatccaggaatggacgatttaccgatattcctgcttacttgggtctgcaaaagcatcagcaggttctggagcgagcttttctctgtctcctgtcaactggctcttatcaattgggattaggccgccgaacaaaggctaccgactgtacgaattatcagctaggctgctatgggcagggcttagctttgccccggttcaaaatatcagatatcagccttaagtagtatctttgattccccatacgctttcaagtttcgaatccactatcaacaccctgccctatcatgtatagttgcattgtgggaagacctgacacataattgaatctaacccaattaagtggctctatatagatcgagtttgccatcagcgtgtcgtgaatcatcaggcaaaataaagtcaagccagtaagacattacgcagctactcctctgagatctggcagagcccgtttcggtatccattcaaagtcaacgagctccgtaaagtgagcctttcattcggcctgaaggccagaattccccttaatatggcaaatagggcattcgactcggcttcccaacgtcctctattgcgctaccccgctgcggctcctgcactgtatcaaagaagcggttgatcaatagtctgcctgctccctcgcacgttctcttgacctccgtaaccgtctctctctcgcggcccatttccgccaccagtcgcacggcaacttggccaagtgtatccacggcctcctatatcatccagtcgctggatgattgataccctcacacaatgggctttgtccgatgatttcccagagtgtacatgccagagtccgtacatcagggcaaaagataatggttcatgacgcaaaaagtaggtcttcagaggagcaacgacatcgggcgtattgggatagtgacgttgagtaatagatggcagaaatgactctccgaacctgagatcagcacgataccaaggttttaagctagccctagattttttgggattgtgacaatttcatgtcgccgctgagaggcgaatacctcgcctgaaaagaggcagtactatcgcctattctcaacgtccggcctctcaacccactgtgtttgttttttggaatcccctctctcatttcccatcatagatctgaggccagtttctcgcaactccgaaaagagtgcgagagcatcattatagagatgcttagggctccacccgtcccgagagataataaaggaaacagagtcccaaaattcttgagcttcgttccacccctcactttcttctgagtggatactaagctcatcctctgtgaaatggatgggacaagggaagtcaaaccccagccattccaatatctgcagctgatttagactaggattgacaaattccgaaatatcgggcacacttacttctctatccggattaaggattccctcaagggcagaatatcatcgtcccaagtatcgccaataaaatgtataggttcgcaccttgttcgaccatgattatgatggagaactttattcaagagaggtacctccttggcaatctgcttctcgtaggggtggagaattatagacttgctcatttgttcccttactttatttttgtcatctggctcaaggtctttgaagttcgcgggagccttcaagacaatatccccatgatattcaaccagcagcggatggtgcgcctggaggatcaaaggggcagcccaggtgcctttccagtctatcacctggaaatacgcccatcatgaacaaataaatttgctgcatggaggtccgtatgccatatatggggcgcgacgacagctgattcatttggaaggaggtatggagcaactttcaagtaccggtaaagcaacgaaatatggctgctgggagaattctgcgtcgcagaggctaccaagtggtcatcctgcaattccggaaccgcatactgtgtgatccatttggactctcgaagagctaaggaaatagtataatcttgcggatgtttccctttaagaaatcagacagagactgaacaccggaagaaaggtacctacatgtgcctgtctctatccatcgctgcgcgttctttgttccaatcagccctctctgcaaccggcccgataatgaatcgacgcatcactgtgtttttgacattcgctggcacatcaccaacaacttcagctgttgaagcgcccggtatagtctcgatggcatagtacagattgctctaactaggtttccgttagtgatatgaatggggtaaagttcgtggttgcggagatctcggactcggcgttcggcattagcgccggcccctgtcatatatccgaacatgggatatattgctcacatcatacactttcctcgcccctcttcatcttactatcccttcacaccagaaaggcggtctccaaatccttcacaaaagagagtcaagatgcattcccattgcacctactacaactcagcgccttctttcgccggtcgaggtcgccggttctttcgccagaactacatacgaggtttcaaccctcgtgctggcggcagagggggcttggtcaaagttgcccttgttggaacggccacctattttgtctgcaagaagatctaccagtatgacattgtttggttcgctgatggttgttctgttaaataagaagctgactgctggggcttcatcgaatagtgccggtgcggaaagcaataataatgtcaagccctcgcactaaccgccaaccatcctgtttaccgagcaagggagtgactcccagactacgtgcattcagatataacgtgtgtgatgcttgcggactttattcttaccaacggcgcttgtatattgttcattagatcattagggttcaagagtgcctatcgacagtctctcgctatttgtactcttgcatatatattcacttgcatatatcgaaatagatcaaatgacattcttactcttcgaacgcccattaggcttgcagaatcaagatggcagaaacaggggcctacgcagagaaccaagcgagccgccgaaccaaaagcctgagggtctgcgacagccaggacagggtgcgtacaaggcatttagaatagctggccataccttacgcaattgggctgagtacatacgtacggtctagttcatccctattgtacgtagtgccccgatccgcctaggccgtggtcactggtggcggcctaatcaggcaggtactgtacttagtgatagactggcacgacagaccggggggcccaaacgtcagtagttacggattacactgttgtttaggtacggagtagttgagccttttgggctgaggtgcgtacacgtgctcgagtactcaagagatccgcggtggctggattgttggtggattgaaacatatatcataaggaccaggcaccacgtagatatttacgatatatacatactagctgttaagtctcaacacgggcatcgacgaaaatatgtatatcatcaatagattaggtagggttaaagggaagatctgggtttgcccataaaacgcttttacccgtgcctacccgtggacgatatagtgtgcttcaggtgggttgttttgtctacgtatatctttctgctcaaagaaagcaattctcattacaactgatcagacaaagaaacaaactatcagctactccagcttaaaaggcaatgccagaagccctgtagacgctcagttgatatgtgatacagtaatcctgataaacgctggactcgtagttagcacagaaagactaggtcaaggggaacgaaccaaaaagcgttgacatatccaaatacacagaagagaggaccctagctcctggggccactatccggctcatgctccgctgtctggaaagggtgtgggctcaggtacctctgaaggctgagcaatggactctccctcgaatcctcacacacagcggatattatattggctctactcaatgccatcgctagtgttgctcattctggtactttgtcgaaaatctgggatttatactatcctacccctggatgtgacggccgagaagacctcggtatcggcagcgtgggaaaacatagtataattcaatccagaatagcatgaaccgggttctattcgctgactcaattcacaaataaggattgctggggacaccgatactatcgaaacataaaagactagcgagatcgagatcaaatgcaggatcctacttgaaagtttagaaacaattggtctttttggatattcatcccacggaatagaaaacgtaccactggctgtagggcaaattgagtaagattcggatcaggcaaaccaagggtagcttcaacagctgtgctagcaggctctcctgccattgcattgccaggtatgctagccatagttgaccgcagcagcgcatagcactcatgtagaccctgctttacagtctcatagacaactcgctttatgcattggttcgactccatagcacggatctgagccagtatcgctgcgagaaaattatagcttttcatgttgggactcccaagtgagatgatctgaagaagctgggtgagaatgtgctcaagtatccgaacaataggagcacgagtagccttggcaatttcttctccagggcctaacaaagactgctcggaagattcgtcttccagttgagtcacaatctcaaggccaagaaccgagataatgtccagccctaagggtcccttgaagctgccggtaccagcgaggatcattttggaaaaatcgtctgctggaattgctggtaaattcaagctatcagcgtacgatgcaatgaccattgcagactcgagagaggccttgcgtgagtagaagaatcgcgggtcctttcgagcttgcacaataaatggcacatggagtgccaggatgtatctgcgaaaatccatatcaaggaatcgtttgtggaattcagtgggccgcaatccaagacctgacggtgatttcttacaagactgtgtaaaatcagccagtttgcgacaagcttgtctcatatccgtggtgagccgcaaggcttgttgataggacttttcgccaggactggctatgaaatggacaacttccatacgaagcttgaccgagtcttgaagcaacgacagaaaggacatatctgtccactgcgtatgcggctttgttggagggacttggtctatgttaggaccgatgtcccgatcatccaggttgaggggtggtctcggatcgaatcctgcggcaaagaggcaaggcagacccgattccaatgctgattgtaaggccatttcacgaatagtggcccaaaggcggacacgcatctcacactcgaaaacagataaattagggaatttagcaggatcaatgtgaagtcccaatcgcatggccata

SEQ ID NO: 3934 - DNA, 3466 bp, Emericella nidulans
caggatcgccttacggcgggtcgcatcgctgggggcctcgtggcctaggaggtcgtcgttctcacttttaacagcctcgtttgcgcgttcttcagcagttcggtcttgctcgaccgaaaaaggagtagccatcactgtttcactagacctactatcaatagatgatgtcggtttcggcagcgaggtctgcagtccttggatataggtactcttagccataaggtcctccagacttcctttatcaacgagttggccactttccaggacaacgatctcgtcagcatagcgaaggaggtaccctatcgtcctcacgtacagttagccatacctaccaactgaggtctagaaataccgcggataattagaagaagaggaacatgcccgaatgcgtagcaagcacaaccgagctcccaatccttcgtgagagccctgttttcccaaagagattccgtgcaataatctcagtcccttctgcgtcaataccactgaagacgtcgtctagaaggataatttgggcgcgggaatagagagctctagaaagggcctgtccagaatcagcatacgcactctgaaagactgctctcaggtcaaggctgggtataggcgggcatacaattctctgcttctggcctccactcagtgtcatcccattattccccacggctgtggcatcgccgcgcggcagcctcgagaggtccttttcgagtccgcaggctgatatgactgtccgataccaggtttcatcgggaagggatctgcccacaatattcgctttgatgctctggctctgcagccattgtgtctgagaacagtatgcgactgagccacggtatacccaatctgcatgtccagacgtaacgagggtctcgccgagaatgctctctaggagagttgacttgccgctcccgattgaaccggttatcatcgtgattccgtggttgattgtcaggctgatctcccgcaagacgggggctacacttttttcccaggtgacagtgtatctgttgaatgtcaccagcattttttgctcctctccctcagctacagctggcatatcctgaagtgcggttaaggtattctttttctccaaggaatccttgaggtcctgctcgggaatatcttggccatgcacgggtacactgcaatactcctggatcctctcgaagcaccccaagcattggatgacagcaggcaccgcctggataaacgtcagcaccgggttcgtaacgcgagatcagcgatagtgatgtgaacgcctgcgcagccaaaatcgagttatcgttgcggacgagcgcgatgatcacatagatggcgaaggtcgtcatgggggcgaggtcagaaggggaatttgctgcaggtagactcagtattagcttatagagaactctccatctcactgggacggtgagaacgagtagcaagatagggccggcgtacagagagtgatggttccgataagcaatttgcggaaaacagcagaggtcgcgatctcagcgtgccgtagcccctgcacaatgctgaagatcttctctgatagccctaacatcttgacggctttaatgttctcaagcgtgtacgaggttagtccgagtctgtcttcgaccttttcaatccagagacgctggaacttgtttgtcaaggtggagagtttgaatgttgctaagatgaacactgtattcatttgtgagcttctactccctcgttctatgattcaaaggactgtagacaatcgaatgagtaaacggagcactcaccagcaacaattacagccggcgccagacatgcaaccccaacctgtctttccagcaaatatactgcaataccgatctccgtcagactaggccatagctcatgaagcaatctaaaaccgctgacaatccgctcaacatccgtccccatgagcgtgatagcagtacttccgccgagatcgacggctcgcgggtgcacagtttgtttatggatgagactgatcagcccacctcggagacgaataatgaagcgaatgttctggtatccgtagagggccgtgcagacagcctgtccgacataaacgagggcaaacgctcctatcaacgcctttcccgaatcggctggggcatctggtcttcctacccaggagactgtcgcgttgatgaggaagggctggcagaatgcgaagcctgcgacgaggaggcgtggaattacggcggagaggaagggcttcaggtaggcttaaacgcttgcgcggaggagggcatatctggctgttttatctgataactccattcttcagcaacatttctttcccaaccagactgaatgtcacttgagtcttacccgtagtcgcccaaatatattccaatctttctctaaccacttcactatccaacgccgggtccagctgcggtagatcatccacagacagaacatgaacatacccgcgtcgaaacgttccagacagccaggcgaaactcgcgcacttccaaaggccgctgaaggactctggtgtagcgggaatggcttttcctattttcctcgcgggaaggatgttagacgtcttctccgttgactcgaggattgcgcatagtagggtagccacaaatccagcagtaaataaaatagctgccctgttggcccctgggataagccatagagttcgcacgcgcgcgatgccgagcggcgaacgcgcagataggaagagaatcaggagcgtcgaggggcggagcgagcggcagtggtggatatacgagaggacgagtgccgcagcagttgcaaggagttccagaatatcggcaggaagggaaacagcattccgcaaagttggagaacggagctctctttcagaaaggaagacgatctggggaatgaacaacgccgtgagagagatctatacagccataaagataagcatccataccaaagatgcttgcaacatgaaaaggccatacaagcttcgcagccaagagcgccgatcgctggatacgacgagcctcattccgaagctggcaatgtgaatggcgataagagcaggaataggaccgcggggagacaggttaggaatgcgtcttcaaaagcgagggtgaagtcgaaggtgcggcagctggtgctgactctggggccgaatgagctgtcttcgacgcaggagaaagacatgtcgcctgtttcttggatccctatacaggcaaagacggctatgaggggttggttacattttatctacctggaccttctcttatcagtttctcgagctgcgaatagcaggcgtctcgcgcagccacagcagtcaaaaatgaatcgcagaggaaggggtctccaggattggggtcgagccactatctagagggcaaagatcattcggacagagcgctcaacataagactttgatacattgctagtctccagaatattgtgattggttgcgcaaagcagcgctatactagggcatggttagccgcctgcaaggtaacatcgtggattgtttccccaa

SEQ ID NO: 3935 - DNA, 987 bp, Emericella nidulans
ggtgcttttaaggatcgtgactttccagacgcctgtttgcatagtactgagcaaccagtatgtctagcaggaataacccgcaaaacagcaacgtcttagctcgatctagtaagcttcttgcactggtcggcaccactgttatagacgttcgttgctacggtatgctcacgaaagtctgatcggccaaggctacgtcaagattgcatattggcctcgatttgagctctgacttccccaccttgacgtatgttactggggatctttaccaacgtgtatgctatgcgcttgcaccggagaaagtcgacagcaaattgtcagaacattgcataaggcgcatggtggcggtgatggaaagtcgttgcattcttcggcattttgtcacacatgaagaggcaaatacaggatagttggcttataatgcaatgttcactcaatgctacgggtatggaatggttgcccgtatccaatttcagttctgctttctgagatgaccctctaatttcttcatatcacgaaagttcggattaaaaatccgtggtgcctcagtagtcatagaatccttttcctgatttcttgcccaaccagcccgcattgaccatattcttcaacaacccagaaggcctgtacttgctgtctccggattcctgatgcaggacattcatgatggccaggcacgtgtccaacccaataaaatcggccaacgtcaagggccccatgggcacattagtcccattcttcataatgctgtcgatgtcctcacgcgaaccaataccagtctcaaggcagatgatcgcctcattgatgtacggcatgaggatgcggttcgcaagaaaaccaggcgaatccgcggacacagatgcgatcttgcccatacgctggacaaacgcaatcgcagtgtcaatggtctccttggacgtctgcaaaccagcgataatctccacacccttctggacggggactgggttcatgaaatgggtcgagataacc

SEQ ID NO: 3936 - DNA, 6246 bp, Emericella nidulans
gcgccgcctggcccgtataggtttccgtaaactgggctattgcattcccatcactttctttgcgaccggtgctgcatagataaacattagccataaaaataacgacgagccactttgtccttaccggccaattcgatgaacatagtcctccacagtgagcggaaaagtgacatttacgaccagtttcacatgaggtatgtcaaggccgcgagccgcgacatcagttgcaacgagaacggtggccgcacctgatttaaaggcctcgaggcttctaaatctttcttgctggcttaaagacgaaccgtatacccgctaccttgaagcccttggttcgaaggagtctctcgacccgcatagcctccttcttgtaaaggcagaaggcgagcactttatcaggagttccacgctgatgcctgttcagaatttgcactagtctttgctctttctcgtgtggttttaccacttcgacaacctgtttaatcctgctgtttgcacgtggatctgcagacgggtcaccaccgatggtgaccgtgactggagaagtcataaatgtagaggcaaggttcctgacaataggaggccaggttgctgtgaacataacagtttgacgttttgacactggcataggagagatgatatccttgatgtcttgctcaaatcctttatctagcatacggtctgcttcatctaggacaagatatttgaccctgcctaaatccaaagagccgtcattctgaaggtctttcaaccttccaggagttgcaacaaccacagctgcagacttcaaagcttcacgctgttcgtctttcttgacaccgccaaatatgcaggcgacttgaatatccactttttccgcgaacttcacaagttggtcataaatctgcattgcgagctctcttgtcggggagataacaactgcaagtggtctgcatgatttttgtttggtcttcaaatcaagcaccttctttagacacggtagaccaaatgcaagagtcttcccacttccagtctctgcaattcctatgacatcgcggcctgcaaacagaagtggccatgttgccgactggatagcggtcggcgaggcgaaaccatctaacggagcgtagaggtctttattgctggggggtaagaatgaaaatgagataattgggcgcagagacggtttatctgctgaggcatccgttatcttgatggaatggtcagaaagaaatttatcaatttctgtttgaggaacattatcaagagcaggggattgaaaataaggcggcgaaacttcagtgttttttttcgtgtctttcgtgcctttagattttttgcttggtctgctatcgccagtctgatcttggtgctctcgttttgccatgattcggcttttcagggctacaatcaaaaagttgaagcagagtggagagaagatatctttcaggtacgcttttttttctcaaattttgttacattttgtaaactaatccatgtggcgagtaccgaagatattgcagtaagccatattagtagttagcggcttggcatggactagtctaccgactgtacccagaagtcagcggttttactgagcgaattatactgtacgccaagcacttcctcaggctggcctctcgagtcaaacggttctcgacttgccactattaataaattcctgtactcagtatcatatctcaaccgttggctcatcaaacaatgtactgagcgtattttggcgcactggtaatatagtaagctcgtggaggggcagtagtgccagaagacagttccaagttgtatgcagagagattagataattatatacgttattcagaattattcagactggatgttattccatgagattagattcactcaagtaaccccacattattatgagtcgttcccaaatttctatacctcaagtcgatacaaacaaggcaggaaaagggtcgacaacgacaaaaatgctatagaatagctttgaggaaagcaaaagccatcaaccgcccacaagatcagaacataattaggagatactgtaactgtcaatgatatctgcaagacgagatgcctcttcggagtagttgacgggtttggcatacgatacttggtatcgaattctggagatcatgattagcattgaggatcatagtattccggatccagacttaccgttgctgatccccataatgatctatctttgctctgcatccgaaagtccaggtgcgacaggtggcattctgaataacgttgccaagtgccttaccgtcgttctgaggcaattccatgagctggttcgcactcatacccaacaacaaccggccaacgtcatcgaaacagttaagataaagctgtccagtgtgatcactgacgttgacaagcattatatagcgatactctgcgcgtgggtgagtcttgtcgcaacgctcgcaacgccactgaccggggtcgacctctgtgaccttcttattacaaccctccgaaagacatgcggggtaacacaggttgtcctgttttatgtacacgacggtcgcccttagtgtaaagtaggaaggctcctctgacatgcccagctgctcctcgcgaacttgggcgatggttttcaattgatctcgtttcgtggcggacatcgttccgactgatgaagcatgagaagcaaaattctcattccgaccttgcgcatcgtaccagcctttgagtctatgtgcttcttcaatatcggggtccacagtcacagaacctgaactgagtaaactcaagctctttccgccaaagtcggagactttgactcccttgaaggctaccacagactctgggctggcagcaaaattcattgccgtcgtgccccagatcgtcaatcgcacagagaatcccgtgttgtcgaccaatgtcagttcgcgcttgtcatagggcttctttgttgtttttgacacgatctgcgtggtctctccaacatctttcaacactcctataacatcgatcgtcgtatccttctcaacagactgtaagtctccaatagtggtgaaattgaaacgcacttgtgggacgtcattctgttcttccgcctataaatagtgtgagaatatgaagatggacagcagtttaagcaccgaccttctcgaccaaagtatctctttcaaatgtaagctcataatcattgttgagattcgtaaattgtttcttcgcaatctgaacgcggcaggggctggaaatgtagtagacctcaccctcttgaaagagatcgtacaacgcagaacactgctcattaaacccggtggcgcggatttcgccactatcatccagcagattgacactaaagagcgtgccgtcaccactccttccgtggaaagtttttatgggagacttgctcgtgcatcgcgctttgatcgtccacttatgagcatatggagaaatcgcctcaatgggatatatagtggcaggtgcagatccctgcataggccgtgtatgctgagcccgggagctgatttgcgagggtgcattttgagctttggccccgtagaacccattgctggagattgtcgtgggttgtggcttctcttcctcctctgctttgctctccaagggtttcggttcgccaagcttttcagcctctcccagttccttgagaacctcgaggtcaagaacaataagaatcctataataatcagcatatactccgaatctggagcgtaaaatactacttttttcctttaacggagtttgcttgaaattgcttgagcctcacaaaacagcctttgcgtaggagaccatccgtcacaaaatgatttgcttctagatacaagatagctcattagaaaccttgcatctaatggttcacgctcggtaccacatacggatggcaagcattgtctgcacatagcttgatatatcgctgaaaacaaccctgtatcgttcctgattgtttgcttggggtggcagtggcttgacttggacacattgaacgataggttcagagatctgaggttttgtggcgtcaaaaatcccacttgggacactgtcagtaccgttacagataaagttgagggagacaaaaaataacagtgagttacctgagagctcctacggagacatgtgatgcttgcgaggccatggcagtaaccaggcgtctgctgggaaattttggccgcgtccgggtccttgttgaattatgtccgtaaagctttgcaacgagcgtaaatccaacagaagaagcagtgaatagtttgacttcaaaagtttattatcgaccaatgcaaacaacccggcaagaaggatggttgaaacgtggaggggctgtggaaaacatgagacgcggtagggactgctgagcgcgctggtgagacgcgttaagtggtggcttacctaagtgaatcaaacactgcgaccaacattagttagcccctcagaccaatgacgaccaaactatagcggccggcagcctttaccccacttgatgattcacttctccaaccagcattttgggaagtgtttgaattagtagagcgagtctgtactccgtacacgctggcagtagtctacttgggcttcccgttagtaaccttcaggactgattgtatctggagccctgccttaattacatcatatttgcttcactatggcaacttgtgttcatgatttacctggtgcgttcagcactccaatcttcatggccataattcttgccaagctaactctattgcagaactacggtcaccgcctgcctctcaagccgtttatcgagaagactgtacgcaatgttttgactctgttgtctgagaacaccctttcctcgttcacgtgtttgttctaaccacgggagttatcaggacgacgagtctggcctaaatgtctgcctctcctgctttaatggaggctgcgctggaccaagggatcatgcacgtcttgcactttgagcgtttcggccaccctctggcgttgaatatacgcaggacccgtaaaaagatccaggtactcagccaccacctagcccatgactgtggtctgacgtgctgactgggaacagcgcgaggagcctccacataagatctcaaagcttgccatcaacgcagagactgacgaagaccgttatgacacaagtacacgtgttgtctgctattcctgcggcagggacgatgttggtgagccgagtggcaaactccagtcagtcattgaaggcgtgatgcatgccacgaccttctcgaagagagaggagataaaagcctgggaacaggagtttattccctgcgagcacactactggcttgattcagcaggagtccaagcgcataaagtcacagggtaggaatattcatgaggtcttttgagtgagtctaaccaatatgagcagatctcagccagtgctcaatgtgcgacttgagacaaaatctctggctctgcttagaatgcggtaatctaggctgtggtcgcagtcaatttggaggtactggcggtaattcacatggacttgcacactttaatgcgacatcccacgccgttgccgtgaaactgggttcaataactgccgatggttcagcagatatttactgttataaatgcaacgaagaaagaatcgatcctgaccttgctacgcacctgtatcattggggcattgatttagcggggcgcgagaaaacggagaaaagtctcatggaaatgcaagttgaacaaaatctgaaatgggatttcttgatgacgactgaagatggacaggatctgacaccagtcttcggcgcaggcctgacagggttgtcgaatcttggaaacagttgctatctgtctagtgtggtccagtgcctttttgatttaccagagtttcaacgcagatattaccatcctaacgaagacccgcctctggcagaaacaccagctgctgatttcgaaacgcagctgcgaaaactggcggatggtaccctctcaggacgatactctcggccagatgataagactgtcgcctctccaaagccacaagaaatccgacaccaaaagggcttggctccatcgatgttcaagcatcttatcggtcgcgatcatcctgaattctcgactatgagacagcaggacgcctttgagttcctactgcatgttttcaagcacgtcacattgtccaagcaccctgtagggatggataatccgattgattctttcaagttcagcattgagcagcggctgcaatgtctgaagtgcagaggagttcgctacaggctcgatgaacaagacaatatctcgattccagtgcccgctcgtcgagtaccgattcagaagg

SEQ ID NO: 3937 - DNA, 5302 bp, Emericella nidulans
agcgagcccaccagcactcgccttggtaacatggagctgctgccgccgctctggattcgcttttcaccgtagggtgaaacagtaagcaagtcggcaccgcggtccgtcagccgttttggttcaggcatggtagatagattatccctagtgagcatgtaagctatgagagagtatcaccttgagatcaaggtataaagacctctagtttgcccacccttggccgagaacatcagctctgccggacagacaacaagaaacaaaaagccgatcctttgttttccaagatgtatcaacgcgctcttctcttctctgctcttttatccgtgtcgcgggcccagcaggcaggcaccgcacaggaggaagtgcatccctctttgacatggcagaggtgcgaggccagtggatcgtgcaccgaagttgcgggttccgtcgtgctggattcaactggcgctggacacactcggttgatgggtacaccaactgctacactggcaacgaggtaagtttctacctggtcaatcttctcaattgccagccggctaatcccctatatagtgggatgcaaccttgtgccccgacaacgagtcatgcgctcagaactgcagctgttgacggcgccgactacgaggctacctacggtatcacgtcaaatggcgactcgttgactcttaagttcgtcactggttccaacgtcggctctcgtgtctacctgatggaggacgacgagacctaccagatgttcgacctgctcaacaacgagttcacctttgacgttgacgtctccaacctcccttgcggtctgaacggcgctctctacttcacctcgatggacgcagatggcggcttgagcaagtacgaaggcaacaccgccggcgccaagtatggaactggctactgcgactctcaatgccctcgtgatatcaagttcatcaacggattggtgagttttctagattccatgacatttgaggaatagattagctaacgcttgctcagggcaacgttgagggatgggaaccctccgacagcgacgccaacgcgggcgttggtggaatgggtacttgctgccctgagatggatatctgggaagccaacagcatctccaccgcctacaccccccacccttgcgacagtgtcgagcagaccatgtgcgagggcgattcttgtggcggtacatactccgacgaccgctacggcggtacctgcgaccctgacggttgcgacttcaactcctaccgtatgggcaacaccagcttctacggccccggcgccattatcgacacctcctcgaaattcactgtcgtgacccagttcactcgcgacggcggttccctttccgagatcaagcgcttctatgtccagaacggcgaggtgatccccaactctgagtccaacatctccggcgtcgaaggcaactccatcacctcggaattctgcactgcccagaaaacagcgttcggcgacgaggacatctttgctcagcacggcggcctcagcgcccatgggcgatgccgcatccgccatggttctcatcctcagtatctgggatgaccaccactccagcatgatgtggcttgacagctcttaccccaccgatgctgacccaagccagcctggtgttgcccgtggcacttgcgagcagggtgctggtgaccctgatgttgttgagtctgagcacgccgatgcctctgtgaccttctccaacatcaagttcggtccgatcggctccaccttttaagcgtgacgcttagtgccattgtactttgagtatatggtatcaccggaaagacatttgagaacgttcttgtacatagtggctctagattctgccgggttatcaggttgttctccttttgtctcagtatatggttaaacaactggaccacttttttgagcagcgccagcacttgattttgctttgtactttcggttctcctgttacttcttcaaaatttcgaatggaatatcttgacatacaatactttcttgagtcccaacaattctctcagaaacaccttcaataatcatgtagtcgagtgtcttcctcaatcaccaaagcagtggtaaagaaaggtagactcatggcgccgctaaatcacatgatatcagaggacagcctctgctctcaggcgggagttaacaggagtgtatgaacaataaagatcagaatagctgcactggttaacatgtttggaacatcagccttggctcggtacaactaagaatgaggctagacttagcaagccggacgtgagtcaatagatcgtttttgaaggcagagagagtaaggaaaaagcaaggaacgatgaagcacgtggcataaactagtgatatcagggataatgctctggcttgggtggagagttggaaatgcacatattgcatgagaatggtcaatgctgctgtgttcctgcagctgagttctgaaaccaggctggtaattgctattcggtagtgccattgaagctgatatcgacttaagactgaaatggtcctaatatatacaattgtaggacatatcgtctttttcatgttagccgagagcggccatcactcttgtcaatctgaccaaaggtaagagatgatgcacactattgtctgtgctagttagacattttcaatatggtttgattgtgagatataatacaactggggtattgcggatagtgtatagaacgcgccatgatgtcaaggttctctgctgactgtttccagacaggtggaaatgaaaccattagtgcgcttgtagcagtcttttcagcatcaattttacaggtccttcctgtagtagagtcggtggaacatcccatctctgcaagagtactattgataggcggagtattctcggcccgcacttacaaacaaaacaaattatcccaggaaagcttgaagctccattccaaaaatccgacaatccccaagggcagcttctgaattgcattctacaaaatccagacaactagacgtgtcttgccacaatgttcgacacagtctgcacccttccgctaagcgcagacctcttcgcgcaagcaattcacccctccgaacctatcatctcagtcggcctatcaacagggcatgtccagacgttccgactccccactgaagaagaggaggagcatagtgatgacgagcaggcgtcggtctctagctcgcgcaatggcaagggtcatattgatacaatgtggcggacaaggcggcataaggggagttgtcgcacgttgacgtttgggatcgatggagagatgctgtattctgcgggtacggatgggctggttaaagctgcgaaggccgagacgggggttgttgaaaacaagatcttgatcccgacggcgaaagatgggtgtgtgccatcttgattatactcaatggcttgtcattggcttcgaatgctgacaatttttctactgcttgacaggtcggtcgatgcgcctaccgttgttcatgcactctccccgcagacgttactactcgctacagactcgagcaaactgcacttatatgacctgcgtgtcccttactcgaaggtcgcggctccgccccagcagacgcatcgccctcacgatgactacgtttcgtccctgacaccgctcccggcgtcagataccagtacttccgggttcagcaagcagtgggtgacgaccggagggacaacgctggcagttacggatctgcgccgtggcgtgctcatgcgcagcgaagaccaggaggaagagctcgtcagttcgacgtacatcggcggcctatcagccagcgggacaagccgtggggaaaaagttgtcgttggcggttccagcggcgtcctgacgctctgggaaagaggcgcttgggatgaccaggacgagcggatctacgttgagcgaggcgcgggcggcggggagtccctcgagacacttaccgtcgtccctgaagaactgggcaagggcaagatgatcgccgcgggtctcggcagcggaaaggtaaagttcgtcaggatgggcctgaacaaggttgtctcggagctcacgcaccgatgagacggagggcgtgattgggcttggcttcgacgttgagggccatatggtcagtggcggtgggcagatagtcaaagtctggcatgaggcagcagattcgatagggggtgagaagcgtggctttgggggagacagcgatgacagtgacgacgattccgacgatagcgatcatgagccaaagcagggcgatgactcgcggcggaaacgcaagaagcagaagggcaaagatcgtggcaagggccccgagatcatggcgtttgctgatttggattagggctgtgcatagcgatacccttgttgtacaatatacaatagtgctctgttgggccataaaatagccgtaacgatattatactgcatatatccgcaattccgttctaatgccggatcgcgggggatttccgacgagtacttgatcagcgaaagtataggatagcgtatgatcaggccggaaccgggcaccagacacaagagcgctatcttacaactgcccttgaatgttctctcgcgtactgtcttctcgatactatggtcgttacatagtcaaagttcgaaacctacggctaagtcgtatccgactacagccccgcggcttcgagacccacggcaacgactactgccgaaagtctacaagcttcatgacgttccaaacgctgccggtggggtgtggggagaatgccgattattcatgatgatcaagcgctcaaagttctatatcaaaccgtggacttcctcctcccgttttcttctttccccatctgcactttctgaccaataatccacaatggacgccttcgagtacaacgccaaccctggccgcgtcgtcttcggcagcggcacccttcagaaactccccgacgagatcgcacgcctggacaagaaggcgcccctaatcctctcgactccgcagcaggtcagccatgccgagcgcgtgaaggaggtcctgaagggccaggttgccgggatcttcacagaagcgactatgcacacgcccacgcatgtcacagacaaggcggtcgaatacgcaaaggcgcagaatgccgacgtcgttatttcgatcggcggtgggagcaccattggtctggggaaggctatcagtatccgcaccgggctctaccacgtctgtattccgacgacatatgcaggtagcgagatgacgcctatcttgggcgagacggcagacgggttaaagaagactcgctctgatcccaagatcctccccggaactgttatctacgacgttgatcttacgatgacacagcccgctgcaatgagcgcaacgaacggtg

SEQ ID NO: 3938 - DNA, 8025 bp, Emericella nidulans
ttgtttcttgtacgtgcggcgtaattgactggagaatccttgtatatataatcttatttttgtatcccagcaggcaatattgatttcattgctgttattaggtgggttagtttggtcaaggatattcttagctttaatcatatgggcgtcccttaggatagaatcgcgctatttggtatagttatctcggccctgcaaaacaggctgtttttgggttctgaatcttgagttggctagtttctgaatatcttgttgcttgtaatatatcaaatctcgctgctgtatttctgcatttcgatcatagggagcaatttaattaatttcttggtataagtattgggtaggagactgttattgctctgtacatgtctcgcgtcttacctcatcgcgtacttgcttagttatctcctcgcgtatttggcgaagtaatcctggtaggatattttccattgtggctggttcgtccggttggtcttcgtccgccatatcgtttgatatctggttgtcagcagagaatgatgtttccggcttgtatgtacaatgccttctcgtcatttggaacggtacgtcgtttgatttgttgccttgtaaagcttttagcggcatcctagcgatcccagcaaaaggtgccttgtgatcctgattcaggtgagtacacaggtgaggcggcgggtaaaatatgtcgggtgtctcgctaagttgcacgtgatcaaattaagagtcatctgaaccacagtgtcatttacccgtcaattcagaatttcatctgcttaccgtacacattgaagctgcgatcatcaggcctgcaactagttttcaatcatttttgactggaaaaaaggttcctacaatgtctttgattggacagaacaaatggttcaaaaaatataaagaagaagtgaaaagtggcaagcttgacttgcctgctttggaattcgtgaggcttcattatcactacattatcaattaactacttgctaagtccttactgcgtcaaggatgcgaatcagaatgttgtcatatactatggtgaagtcttctgtcgctacgaagattgtgtgaagaatcgcgtgggtattcaactattttctagctgtttgtcaactgttcattaactgttttacaactacttagtcgccattctctaccactaataatctccgaacccatctccgcgatcagcatgactgtaaattagaggagagcaaagggggtcgcaatgctcacaagacgattaatctgggcatacatgaggatctccaactacctggcaactgctttctaactacttagaatggtacaagggcctcttctccgagcaagatgcacaccggccagttgcccttgaagataaacatgaagccgttcagcagcaaattatcagcaatctacaaacccagtccaagtcagacctgtccgcggccctaccttccctgccctgaaagaaggatggaacagtaagattaattacctgttagctactttatagctgcttgctaactactcaggttcatatttctaacatgcgcaagaaggtcaaagagctgggccatatcataccctgcaataaatatccatctgctaaggactgctacaaggatcagaatacctgtgagcacttccattattttgagaatgatctagaggaggacgaggacaaagacaaagaatgagatacatcttcgtagtaactagaagttctgtcaggcgttatggagcttgaattatcagaagttctctaataagttaccagttagtttatagctagttatgaatcaatttcctgcagtttcttctgtctttccataagctctaattccttctccttattttgaagctgcaaaacctgaatttcttcctgttcttttttcagcttcatcttaatttgctccagctccaaggcctgccgctgttcctcaaaagataatgtatcctctgagggtcttataaggctttctgaagaagatgacctaaccatttataaggtggttagcaagtagatactaagtgattgctaagcattggcagagatattatccacacaccagattaaccttggttgtgatcgtgacgtacaaccagatcgtgaagataaatgtgctgatgatgactgacagtgttttcgagattctagaatagttaattgctgatataatatattgatagagaatatacctaccttcacaagctaaatagcgtaggtaattagcttccatattcgctgtcctatacaagtgatgaactccaaagtagtcatggttttgatactaaataatatcttgcttgtcaagctttgcagagctatattaatgcaagtagttagtttgtgattaggaggtggttaggaagtagttagtaagccaataacttacttctgaacagcctcaattaatgaaagctgtttaccaccagcatttgcattatggtgtgactgctctgctgaattagtataattccatatagaatcatacaaagatgatggaatcctagagcagtttttgttaagcccagctttaataactgcattctttttatagagagcccaattctgaatttttgggtccttatatactaggataaattgttaataagtacctcccaaatatttacgaaacacttacctgcaagtaagtcacataactgatcataatcctcctctgatttacaatcaaccagactggggatgcgactccacacgcctgttcctttattgtcattaccaacaatctcagtaatagtccggaaaaaatggacccggcagaaaataatgatgctctgtagttgccataatagggaacgatggtagggatcaatctctttaagatatcgagccaggcctagctagttgttaactacttatcaagtgattcccaagtggctgattaatgattgacctaccagcatattatttcgtgtccatgtcaacaataattccagatattccatttccatggatagaattaaattccacaggttgacctgttactttctcaacaagagtaaatactcttttgaataaaagatagtagcctgtcgtagtttcttggttcgtaaacacacgcattaaggtgataactggagtagtttgtaagtggcttccaagtagttgttaactggctatggaatacctacttttcccgtgctcatgtaggtaggttgcaaaaactacctcattcatgtttttttgtcttatccttttgtaggacatatcaacttcaaatgaggttaacttgtttagaagcatgatctgctccttataggcacataatatcatgatgccatcaggatcacggtatttctcctggatatattgctagatattgttataaagcagctcccaactagttataaaatatttatgatcttaccttcaaggtagggtttatgttagatatgtataccacaccattgaaatcctggccttcgggatatgtaagtaaacgttgtttctgtataatggcagatattctgtcaatattggaaagggaggcgtgtatttcagctggtgtagaagcattatactgttgaaaaaaagcctctaactcaggactttgtaggaattttgctattaagtagttggtaactagttattaaacagtaattaaatagtattagacaacttaccaaggattaggcttagattccgcatatttctaattattgatttaatcccttttaaaatctgctccggtagcttgtgtgatggtagtagagaatattaataaattctatataaagtaaagaggatatagggagtttcctgaatattaactggtactaatgcagtaaagattatactgcattttatatgttccagcttgccggggccttgaacatggtcaaagtctagaagtagtttagaattagtttgccgaatattgccaagcagtttaaaagtagttgggaactacttaccacagaatttgcaccatgttattagtagtttaataacagcacactcctcctgcgacaggagaatagacttattaaataactactctaagaattcaagattaattaatatatggcctttcagagagctgtgataatatttctgtagaagacctagtatactatttatgcagctaatatatagatagtgcttattattgatatccttttagcaagttagtaggtagttaataagtagtttccaaggacttactgggtagaaagattttcaaaatacaggcatacagcttaaaaggtttttgatacaagctttgccactgtaaaaaatctcttctttgagtaataaagactgaatagaagcaattccttgtaagtaattggcatttagtttccaggtagttctaaagtacttacctaaatacattcctcttctgaatatcattttcaacaaggtcaatatctttctgaattatttggatttcttgccatgctttttcatcaaggtatgtataataaagaagtcaaagacttggcttgatatatttacagacaaaaactcccaagtatttccaactctatttcttaaccttacagttcaagaaataggaattgatatgtcttagcctatagaggcttgaatgagaatactatatcttcaagtaattaactaacagttcttaagcggttacggaacagttctgaagtacttatgtcttgaacttgttactccgcctctgattgtgacattttatctgctgcaatgatatacgtatgaccattgatataagtctttggatactcaggaaggttatctatatattcaatatagagcatctgtaaagggtataactttgcatcggtaaggtctgtcaaagttgttggttggtcctaagatatatatttagttatgcagtacttaagagctatacagttatattttacctccaatacatcctctcttacctcctcttcaaacgtatctgatagaatatcattaatatcttcttcccaatcaactggatctatgttgtcatccattataaaatcactctagaactgattgggaagtactttgaaagtggtttgtacgttgggagtacgaagaaataataaaggagacgaattgaaaatgaaattcggtaattaactactgtatttaaaggctcagttgactagtcgggttgccaagatttggtggggccatcatccgagttttccgatgaatcacttgacctgtaacctgcggtactgaagggcagtatgccccgacaattgttacacagcagtgcatccagttcagtataggcaaaaataaattcctcattctcaccagaatctgacagcaaactatctctaagcttgaactcttgactccatgttggcctaccattatcctagattataaacaacgctgggatagaaaagcttcgagtgatcttatacaaaaccgctcaaaagctcgccatacttggcaatatataatacatctatcattgttgctgttcaacctcgacgttcgcatgtcgaaaatgaccttgtgcactttctactctagcccccacgacatctaggctccattcaagaaaatctttaaaatcttcaccagtgtgtttctgccagttacgtctcacaaacgctttgagctctgcaaagaactcttcgatcaggtttaaatcaggggagtacgtggtaagaacaacagcttgacaccggcccttgagcatagctcggttatttgctccgtatgatggaaagacgcattgtccataaacaggacggactttggctctggccatctacccaatgatggagaagctgttcaataaagtcctcgaacaaactagcatcagtcaatccttcggagactcgcgacatcaagatgccatcctggcaatacgtggggagaatctggtaccgttgaccccgctgaaaacgggaaacttggacaggtgccaccccacgggggagaccagcctgtcctcctaaagccagcccgcttatcacagcctgattcactgatgtagactaggtgatacgagcagaactctgacagctgatacgaatagttatcccttaaatctgcattcctttctcgtgctatccgtggagctactttcttgctccaaccatgcgatcgaagggcccggctgatagtgtaggcggatacggacacatcaaattcatcatatagaaactctgccatctcatccaaatatagatctggtttctctagcaagtgatcgcatagcgcttcaagaatgagaggagtaaccactcgaggacggccgccaggaattaagggcgctcggacatcgccaaacattcggaggttggcactgatggttataatcgaacgtttgcagccagccgcttcggccatctgagaagtagtcagtgagttactggtaatcgtatcgcggatcattataagctgggagggggcaagtcagggcgccatgacggcctttgtgatcctgtgagccgaagaaggttcgtgaggtgattcagaggcactgggcagaagccaagtctgggtcggttcgggccgactacagagccgatatcaagccaacaaccagcatccacttgacagattttatcttgagttttcaggcacgatattattgggtcatggtattcaccttgaaaatatagtcaacagtccaatttatgtgagccaatatatctatatttgtagttctatctccttgcctggaaaagcaggatgacttattgtggcttgtcgcgtatgagacgcagtctggttcgcagcctcgctcttggcgcctattttaccccgcttcatctcaccagacaagctcgacctctaattcttaatccgaaacaagtcgctatatctctctacggaggaatcagcatctatgcagtgtttccaacatggatggtttatctgcagcggcgagcgttttcgcggtcattcagctaacgggaagcctcgtggagctttgtgggggctatattcagcaggtgaaacatgcaagagacgaagttctgacactacaacgggcaattgtagggctccaggggacactccaagacttgcagaacctcgtccaaactaacaacggaaacaccctacccacctcgtcacgactagtcggcaatatcacggattgcctctctgacctacgtggcttagaaacgagacttgacccggggaagagaaagaagctgatgagaaaagtgggatggcgagccttaaagtggcctttgaaacgcatcgaggtagaggaagttatccagaacctcgagagatataaaacttcattcctcttgtctctacaagtagatcagaggtaggttggaacttagtcctgttgctctttacaattactaaaagaactgcatagttctctgatggtcggtagggcccaggacatggatttcgaaaagttagaaggtgtaatggaagcagcgtttgagtcattctccgaccgagacgaagtccaatgtctccaaggcactaggactgtgctcctccaacagataatggattgggctctgcttccatctcagaagagtattttctggttgaaaggaatggccggaacaggaaaatctacaatatctcggacagtggcagagtcgcttaagaacatcaaccatctaggtgccagcttcttcttcaagaggggtgaaggagaccgagggaacgcgaagaagttttttccaacattaatacggcagctaatactcaggattcctgggttaaggcctggtgtgcaaatggtacttcgtgataaccctgacatcgcgtcaaaatcactcagggagcagtttgagaaactacttcttcagccactagtcattcttgaccaactaggccgacaacctcagaccgctgtgatagtggttgatgctctagacgaatgtgaacatgatcaagacatccgagctataattcgattacttccttctctacagaaggcaaaatcagtccaccttcggatctttttgaccagcaggcctgaactccccatcagccttgggttttcagagatcagggatcatgaatatcaagaaatagcgcttcatgagatacccgaagaaggaacagaacatgacatatatttattcctacaagaccgagtc

SEQ ID NO: 3939 - DNA, 1084 bp, Emericella nidulans
tctggctattccaggtctgcctgaggctggacagcttctgaatgcccagcagtttgccgctttgcatgtccaacaacaggcggcaatggcgggtcagcggtcgcggccgacatcgcccggcattgccatgcaaggtggcgccttgggtcccatgggattcacttctccccaaaacaacggatttttgactgcatacgatccgaacaacccgctcattggcaatggcttgggcgcacttggcatgggtcaatttgggctgagtggtcatgagggctatctttccgaccactctgagatcaaccgaggtcgttctcctcgtggccgtcgtggcagttcgaagccaccagaggaccccaccgacccgaatcttctcaaggatattcccagctggctgcgttccttgcggttgcacaagtacacggataacctgaaagacctgaaatggaccgagctgattgagctcaacgacaagcagctagaagagcgcggtgtcaatgcgctcggcgccaggaacaagatgctcaaggtgagttttgcgttgacatagtcgtagaaccacaactaaccgagttccaggtttttgagcaagtcaaggaagccaaggcctgaagaaaactctacaatgccacggcttgatatgcacatggttgacaatttgcgttggacattccgatctaatagatatgttacattcgctctgctgcattaatttgactagattggctctgggcataagtggcaggatccgctatttcctatgaaagatcttggaggagaacgctactgcatccgggccggacacctgctggccagccagtggaagcctgagagctgattgattgtatgttgtatgttaccgtttgatgcatgtgatgtgatgacgttgcgagttgagggacccggctgtgtctcaagcgttccagataattacgacgagcacgtaatattgagtgcaatagtgataaatatatgtacaattggctaccgtcactcagctgctctcaagtttaaatgtgtagaagcctacgctgtctgaaagcggactgttctggcagaatccctcgaatatcttcacctctcgcgt

SEQ ID NO: 3940 - DNA, 1632 bp, Emericella nidulans
attaccattaatacaaaaccatttcattaccaacgaacattcttaccccaatccaagccagtcccagtcggtccgggccaaccagccccaaggaacacagactcccatgagatcactgcagtgtgcataatccccattcagccagcggggcgaaaaattccccgagccaccagtaagaatcattatccaaaggcagcgtccgaggtacccctccttctagaagcacgtggacagtagaggacacgcatctgcattcctcccgctgtctgtacgagggttaatacgccgccgtcagcaataacatcccgtcataacaagcagacgcgaagaatttgcgatgcatttttggggcgcaacgccataagagcaagactcatactctgtcatacactgctgtgcgtagagcgaaacactgcaggaccagtgtctgcagctgggcgaaggccgagactccgatccatccatctatgcatgcatcggattggcgctggcagtgccgaaggaggggtaatcaatcactgcctactgcccaggccagaggtttgcgctatttctggcataggcgtccgggcgttcaaagtcgcattttctatgcgtcgcattgcagtagtggggcggtttgattcgctgatgatgtgatgtgattgcattccagcagagtaccgagagagtcaacatgcatagccgctgctactatcacggttttggtagggatcattcgtgttcgagcgttggggtgcggctacgggatcggatatcaaactgccgtattatctaggatgacatcagaagcacagtgtgcagaatacagtacttgcagggaattgcagatgttgaaaattcaggtatgtacgtatctacgtcaggccagagtaagggtaaagatcaagtaagtaagtatatttccaagtctattagtagatggtagtagtgggttaagcatcaaagagcgaatcaaccaccaaatctgagacaagcagatcgagatcgcagaatggtatcataaagcagagatgcagagcaaatgactcgactcaagcactaaactcctgtccatgtccatgagcatagcgtgcactccaaaagaagtaaaacagaaaagtaaaacagaatcccttcctaaatgctggatatcgcaaatgctaatggagggaaatcgaaccgaaccgaaacaaagctgtatgacaaaggaaaagacaaaggaaagacgttctttggatctctggtaaaataatagatccgttctgtaaatgttcggtaaaccaagcagataaatcgcttgcaaattcagatcagaagcaacgagcaaaccaaacgcgctcaaatgcaatccgagtaataaacacttcccaaaccgtggaagtggggaaatccaactggggtaaactgggttcgagtacaaccaaggtactgtctggttgtgctatagttttttaggcagttcgctttcgcagaatgtcatcgcagttcgcatcgaagcgcatattccacacacggatgctgttcatcagcttctccgtattctccaactcacgatcgcgaccaaagatagactcgacaaattcacagccggcgttgcggcccatcgacacactcttgccgtcctcccgcttagcggactttcacataaat

SEQ ID NO: 3941 - DNA, 2900 bp, Emericella nidulans
aaaaactttaaaaatttaacaccagtttaacaccggtttctaagcatggagactgctttatatactcatcgacctcagttggactgcgaataacagcacaaacgttgagccgtgccaaagtcattgcgggggaacgcttttcgcatacaaactgggccttggcagtcaacacgaagacagcaaccttgaaatagtcttggagagggtttctgaggaataccatggatgtcagctgaggatactgtcctttattgatattggaaagcacctgaccacgctccttcctaaggacgtctccctaggctgtacgatccgcctccgcagcatcatggatctgcccctcctcacgatggactgcgcccaatgccactcgttccaaagctattgatatcagatctggtccatctcctattctacccttactaagatgaggctcagaccttcgctccatcccctcccggttctctccctagtagcatcgaccgtatcgatcgttctcccaccagccaacacaaccttgaccaccaccgctgccaacgttcccaatctcgcacccagaattcccagtcactacccttgcgactgctacatcgtctctggcgatgagccgggctacttcaccgactaccaattctgggactttcgcgatgtccctctcccgcagagcctcatcagcgacggctacgggccctcaacagtgagccattgggaagcggaaacggtgccgctatctcagacacctttcagcaaagattggcagacgcagtcgtggagtcggcaggagacgacggacagcacggttcccatggtaaacgacgacgcgaatgcgttctttgccaaacatcctaatctccccgctgccagccagcttgttctgcgtacaactcggctagaggactactcgtcttctgcagaggtggagagccagcacggaaactacttccacgtctcaattcgcgttcgtatgaggcttatgtcgggtgaagcaatctcgagacggccgtgggatgagacgccggatgtcaatgaggtacctaagggtgcttgtgctgggatcttcacatatcgctcagctacgtgcgagtctgatgtcgagttcctgacgtctgatccaccgaacacgatccactacgcgaaccaaccagactatgacgccgagaacgatattatcatacccggtgcgagcgaggttgtgacgaccgtcccggtcccctggtctgaatgggtgacgcatcgtatggactggtttgcgaacgagaccgtctggtatgccgatgatgagttacaagcggtcgtttccaagagcgtaccggatcgtccgagtatcctcgccctgaacctgtggagcgacggtggactatggacgggtgacatgcaggtggatgatagcgtctacatgggaattgaatggattgagattgcctacaacacgtcagcggcaggtgacgccccaattgaaaccggccagcggcatcgagttcggccctcagagcggacgaaaaggagctcccacaggaagaggcagacatcgggtgatgacgctggggagaggtgcgaaaggccgtgctacttggataagatgcagcgctattagtaccttgcagtatttttatctaccaatcaatacgtttatatctcaacacttaagttcagcgtacaatactacgctttctagcgacggttcgtagcttcagctgaccatgatgagcatcttcactactccaaatgccagatttgttactacttagcacatagaactacgggtgatgtcctccgcgtactcaaggctacatattaaaagttcgacccgcaaagggctgcgctactttctaactcccagcagtatttttggattaattttacctttattacctaaagcttctataaattatacttgtataatttatgttataggtgtaataactcagctcagtcgggcccagaagagtatctacaaatattttgtgcgcctactatctctcgaatttgatgtggagcaacgttaacttcttgtcaataaagatgtggtcatagtaggtacacaggtagtaagactggaagcatacccgtcgtgcaggcactgaaagacctgtggcgtgatctgatgtttagctcgtttaggtcgtatggattcaacaagtagccagtgcccgcacgacaggtaggggatatagtgaagcaagaaagatgcataaagcctatcagtggtcctggcattgaaattgcctgaggcatgctttggtgtagggtgaagagcctgatcaaaagccagcacccgcacaacaggtaggatatgtatttgcatcaagaaaagcgcatgtcgggagcaatgctccaccgacgggtatttaaagacagaaaaaagaccaaaaacgccgctgcctttgcagtcccggccgaaacaccggggaaccctggaccaaataaaaaaaccaagtgaaaaccaagcatgaattaagccaaccccagcaccaggctcaaccccaacaccgaaaccagaacaaaacccgaacccaacgccagcctctgttgtaccgagaatgtaaaaatatggaaagcataaacgacgaagaaaatggcaggccatgaacgtagaggtgtcgctggtaataaatcagatatagtatgctgtgttgaaagtcgctgtacaaatgccgttagcgatatttatagatacggccgcggtcaatgcgtttcctccatatacatatatatgtgtgtgtatatattcccatgtttgcgtttcagtcgtgatgtagtcgggaagattaaatgttcagagcgcaccgtcaggggtaaaatccccttcaaaccctccgttaataagttcggctactatcttttggcgaagcaaaggggtatcacgggcaccataagcgggtggttccattaaagcggtt

SEQ ID NO: 3942 - DNA, 1468 bp, Emericella nidulans
ccagtgttatagctgcagaatgacgccagtaacataggacttgcttggtattgcttgactgctggtcaccgccagtgaggaatgtactccaatctacaaattggttatctctggatatcgccagcgcaagtttctattatgatggtgctacaggtgatgatactcagcgactcagatctagaatgttacatgaagtttatcggtagttcttctggtggtggtatacttatcgtgggcttatccctcaagatcgtgttttgttttgtgcatgtgagacgtctcaattaatctctaatatcgcccaaggagccattttttattttttttttagattgtttcaaaagtccgagatgttgcccaggtgtgagactgatgacggttggacgaaaatagcagggctgctttcccccctataattcaggcaaacgtttgcatactttgcatgtcgatcttcgccatctcagctgcggctcatcgtaacctgctatcaacctcccttctatagatctccttaatgctatgatcagacttaatatcgttatgaccttaaggatatctcatagcaaaacagcagatccctgtccaacgtcatgatctcgttatgtgatatctcatgaacctcctccgctacaataatcaagtatccggacagctaaacaatcgcggagactcctgagctacgtcttctatgagcgctaatctctgaattctgtactttgattaagacggctgaataggcgcgcaactgttaactgagcccaaacaaactgcgtattgtctcacttatccgccgccatgtttgcaccgcttggattattcagggacatcccatgtccacagcgagaggaatgttccctgatagcctgtctattctctcaccgcgatctcaactcggctccagccgctcaagatcaggtattggagcagaaagagcccgctaaactgccccctaagagactcaaactcgagcctcgcccagaagcaaaggaaactccaaaagacgacttacggcatgtttctgatagtggaaggagcacgcccgttaaaaagacaacagcgcctgctacaaatgccgagaatatttcacccgtttcacgccagccgaacattcctaaaaatacagccacagcacccattaagcgcgagcttaatgccaatacagggtctagtatcccacctaggcgggctccgaaggaagccctgaatccgcgcatgatccagaagtcgcctgctacgtataatgtacggatggccatattaaagaaattgcatggcactctatgttctttgaatgaccagcttgctaaagacaaagctcttgaggataagtgtttgatcctaacaccagacgagctgataacaatggcgctggacgaagaggagaaggtggcaaaggagagccctactgtatactcgaacgtggtcaagctccgtatcgtgaagctgtctaggatgagcaaagaggact

SEQ ID NO: 3943 - DNA, 1682 bp, Emericella nidulans
ggcctgtgacactattggcctgcttctgtttctatctcactatttattttttgctcagagcgcaccattgaaaggggtacttttatatatgggggggcgcttcatttcagacaggaagaaagatttaaaaacaagcaaaaaaacctagcagttcggagaacgccgtcagtgagacgccgagatcgtgcctggccgtggcgggtcacagctgtgccctacattgatcacccgggttggcctgtcggtcagccagccacagccacaagccatcaggacgcaaaaacaaagaaaagagcgcagaccgcgaattggcagccgcagagtcccctattcttttttgttgggttcgagctgcaattccgaaactgtgggtcgattgttgatcggtgggccgatattcgatagagctttcttgggctgtttcatgttgtcgccactactttggctatggtctaactaatctgggtgttgtttgtgtcgatttttgactgttgacctgagatgccgagtgcttgtctcgactctttaagaatgcggggggttattagcggaattggtccccaaggcgaaatatgctgtcaagggcgagctaaacttgagtcacccagcagcgtgactacatcctgaaccatgtgatatcctcgttaaagcgttccattgacacggtaaactcagttccatctcaccgggctgagacctggcacgttcggtctcgctcggcatccattgacagcgctgactgctgctgctgactccacgcattcatgtgcacgggattgagaggctcgggtcgtgcatatttctgtccagtaagggttgaacctgaactggctcacggtttgcgtagtaccttcgagattcttctaaagcagcgcatgagccacgttgccaatgctgttcagcaacgccgcttcggtcttgtctcgccctggggaggctcagccggcgcctgctgattggacccggatcaatagttcacaagttcatgccaagtgaccactcatgtgagaacttcaaagtgaagcttctagtttgttgcccacgcgacatggttggcactattatgggccatggcctggtattttgtgtctgaccatgtagaagtgtgatttcacgaggcagcaatttctcaaggatgtgaagcggctatcagtaccgttgagacagttaccgcatgtggtttacaaaggcagaatgaagggctgtaggtcgaaaagaatcctcctaccaatcagacaaagtcgccggtaacccgtggcctccagtgcactgagaacaattgggcctgggtgcttgtctgtggccacggcggccgccaggatatattgtctgcgatttcataatctcccaaacaattgagggcgcgggacagggtcaagacggttgcatcacatgtccataaagtaagtactttcgggcgtatcaataattaggagtccaagagcaagttggcaaaccttcctagcaccgcgacctgcgaagtatcaaacaactgtgtgtaaggctgaatcttgcgctgaagctagatttctctcgtcgccagctccagtcctgccagagcgcatggtgtcttgggctagaagttgacagggtcgtaattgatgttcgaaataatatgctcttatctcgaacgcggagcggcccacgcaatcagggcggacctctgcacagaagacaacatc

SEQ ID NO: 3944 - DNA, 5696 bp, Emericella nidulans
tcaacacctgatgtggatcgtctgtagctacgtctcacgtctgctcgtcacgatcagacgccgatcacattccatagcagaagcgttctactgcaatgcggtgaactacaacaaagatgaaaactgaacacacttatgtcgaagctttctggatgtacagaacgcataacggtagtgctctggcctgggactccttgcatggtcgcactaatatgtacagtatcaacaagcacttgaggtgccaacgcaattcaagaaggttgaatccaattctgggaacgaaaatggtcctactttgtgaggttatgaaaaagccccggcacctctgtcaccgaggatctggcagtagaggaattaccctacagtccatggaggaagatgcaagtccagccaacccagccaataattgaacaaggactgcctatccgagggcccttacagagtacatcaatgattgtcatggtctataccaccactagcggattgacaccggcaggacccttccattatggattcgttcatagagtgatgtaatttatgcaggatttcgaaaccatagattccgcttacctctcaccaaatctatggtccataatggattcgcttgatgccgagtaggtacttcccatgctagggacaaatgactctatcaggaatcagccgagctactgtcagacatgcaggctagattaagcatgagctggaggacaaccgggatggatggtgggagttcatacgctaattgctccttacgcaaagacaaaccagcgggacgtcttcaattcaggcaacagcgataagaattcggcattaaatgtttcgaaagacattattttcattcaacggcttcagtaaggaacaagggtccccggctctgtcttcctagtaatttccccgatctgtgtcattggcgttgtctttccaccgccgccgaggcggtcttcccgaaacattcgcgccgtcaatccagcttgttgaaagccttcagttccacgctagtatcgtttactaacgatggactgacagtcgcagatcccagctttccccgttccccgttcctctccacgctttccccgctatgtatccgactttccccaacctgggggatcgcgggtcagaccacgcgtcttctgaacagaagggacgaatcagttcaggggtcccctgggaccgttgttttacgtcgtttgaagtaggattgcatctcctgcgtccagctgtcgattgccgacttcaacgcgagacaagaaggcctcaagtaaagaggagaaattgatttgtttatcgggcaggcattgaagacgcaaggctcactgttcgtttccagtaggatcgaggttagcaccattcgcctggcctgtcatgcaacggattgttccttgggatattcccggaagcttttggcgtacaaacctgagtctggccatgactcgggagacccgttgcgcggagttggtgatcggagagaccgagtgacgaacgcttcttgctttttcggacaagttccgttcaacttgcgtcctcattcgaccgctcatccctcggtctcgcgggttgcgagtcagtatatcagtacgggcttagagagagagaagaaacttcgctctcgtcgctgtcttgaacatcctactcaacccggtccatgcccgaatccccttgccctcgcagggaggacttgttggttgagcagccacttcttaaggttagttactaacgcttgtaaactcataagtatgaaactgactgttctgcttcatcgtttagtgtttatctagaattgtctgatataaagtctcgacagcctttagagatcaggttcccttgttcttgaagccgaggatggttcttcttggttcttccttgattcttccttgggcgtaccgacatctaaagcaataagttacgacagcacgcaaagcctcagcttcagtccaagactctgagaccctaaagtccagaactgaatatggggtatctccacattttctccaggatatgaccggcaaaacttcggggtaactcgacaccaagagaagacgggggatactcgaaaacacaataggaggtacaagcatacctataagatctcatgggcagcattaaagcctgctatgttattacgggaatttatactgacgcttgcaccatctgctgagaagccattcttagacgaagacaacaaagaagcgaccaggcttatataggctgtaggccaccgattatataatactgcctcagtcataaacagaaaaatgactgtacgggaatcccagaaacccgacaatgggcagctggcggtcgtttttgagaccccatggtggagtccccaattgcgtcgtctcagtttctgcatattgtccttgatcttcttttgttagttattccctcctccgcgactaccaactaaacttataagtctgacaataatagcttcttcaaatggctttgacggctctttggtcaatggtctccagtcattagacagctggatgggctttatgggacagccgtctggtacgtggttgggtctaataaatgccgtctactcgctaggcgcactggtctcaaccatctttgctgcctggtgcagtaacaggtatggtcgaaagcagtgcgtttggataggcattgcttttatcctcgctggttcaattctgggcgccgctgctcccaacgacactgtctacatagtctcccgcgctgtcatcggcgtgagctctgggatggttagcaatgcgcctcctctgttactgaatgagattgcctaccccgcccatcggagtatatcatcttgtctgttcatgattggatactactttggggccgtcatttcttcttgggttacgtttgcaactcgcacatacgcctcctcatggtcatggaggctgcctactctcctgcagatgctctgccctctggttgctattcctgggtttcttcttactcctgagagccctcggtggctgattgggcagaaccgcgtggaggaagcccgtaaggtgcttgcggatttgcacgcaagcggtgaccttaccgcacccttggtcataaaagaaattcatgagattcaagaggcgatttctacggagagagaatctgctgcgtcatcaagttattcggacatgatcacgacgcccgggaaccgtcatcgtctattgataactgtgacgattggtatcttctctcagtggtctggcaacgcgtgttgtatcctactatctggccatggtgctggatactgtcggtgtatcggcgacaaaagaccagctacttatatccggatgtctccagatctggaaccttatattcggcaccattggcgccgtactggtcgagcgggatggtaggcgtcctttgttcctgacatccgcaggtgtaatgcttgtcagttatattatcattaccgggctctcgggttcatttgcatccactggctccgcgccgatggggacagcagtaatcccgtttatcttcatttactttgcaggttacgatatagctttgtgagctcaatccttctcgtttttatcttcttttactagacccgtgatcctaatttgccgcaatagaacccctttgttggtcgcatacccctgtgagatctggccgttcgcacttcgatcccgtggtctgagtgtcgcctggttctcagcaatcggagcattgatttttaacactttcgttaaccccatcgcgctgtcagctatcgggtggaggtactatttcgtgtttgttgctatcctcatttgctacggtctcacgtcatggttcgtttaccctgagacaaaagggtataatctagaaagtatatcccatattttcgatggcaatcaccagcctggccatgattcggaaaaggccacttcatctgaagactgtattgagaaggttcccgaatctcgtgaagtggagcgcgtataagcgtgtatatgcgtgtggaaggtgttcgactagatgggaatataataaaatatgtacgttattcgtatctaaagactcgtcagttacatatgagcgcgaaccagatggactaaatgtggtgctgaggtgattcctgcaccacccaatcgtattggcatgacgtacttggtttagtgttctcgaaatatatcacaacactcaaaactcccctccaacatctccgcacagcaacaatgtacgacagaaatccccaaggcaatcggtctaatcatccagaaatataatgtcatactacaacgctctcatacgcactcatcacatcacctctcgaaaaaaggtctccgccctaaaacgcgccgccgactctcttaacgtttttgctctcctccgctccggcggctgcccgggaataatgtacatcgaggcaaaggacaaggacgctgtcgagtcgtgggttagcgtggttcgaaatctgcggtataaggactttcagcttgtgagtcggccggcttgcgtggtaattgaggaggattttatgaaggtggaggggaaacagaagaacgatgcccaaagaagaggaaaggcgttcttagatgctgggctggaggaggtggagagtgtcaaagagtttggggacttgatggcgcagaggggggtttggcagtggtggaggaagaggatggggtatgttcgcggagattgagccagattcttttgtctgtacgccgtcaattcagtgcgcatccacgatctgccattacaaaggatttgctactgcttttggaacaccaatcgttctgcaatagcggttcaaacgggcgaatgcgagatatgtgacaagtcatatatatgaagggatgcattgacgttgttctggtcaggctatatgcatgttctggcctaagtcagcccacagcatgggtacttctggattcaatgataaggcagccacgggcctcgtttgattttttgtgatcgagcatcccggatcctgcaaccaaattttccccgtgcatgtctcaaacgcgttggacagggcagtctggtcagtccagccatttataaagtctccgtgcaagccatatccaacccggtcgcctgttgcatatagcaagttgtgataatctggaaagggcgccgtgttgaaaacaaattcaacgaagatggaaaagatcgctacgggatgagactcggggcagacgcctttattatagtccccaaatgcgggatatgccatctacggaagatatgagctttagaaaaacatccaattgacacaaagagaatttcacatggcccttgtggttcgaactatcgaggttctcgccatcccagcaagacggaaaaaatacctgtcacctcagcttctcgcagggctggaggggaaggtgttttgtttcattcaataccccgttcttcgctatgcacatgtgcgagattccacgctgagcaaagtcagagccattatatgtcctgcacgctgtcagttttgtccgcgagatgcatgacggtaagccatcctactgaagcatcgcatctccagcaacaactcgcaaaccagctggcggtgccagagaatacgccccgtccgcacatgcccgtgcaccaggagcgtaactgcacgcgcggttgagataatagactgcctactcatgatcatcatcattaatcatggcacccctttctctgcctgccaatgtaggcgaggaagacatggtcagagaagcaaaacacaaactgagaaacatacactccactcatactctaccatctca

SEQ ID NO: 3945 - DNA, 3758 bp, Emericella nidulans
cctgacctgagctaaagccgcccctggccttgaatctgaccctgtccctggccttgaccttggccttgtgcctggccctgaccttgtgcctggccttgaagttgtccctggccttgaagttgtccctggccttgaagttgtccctggccgtgaatctgaccctgtccctggccttgaccttggccttgtgcctggctctgaccttgtgcctgaccttgaagttgtccctggccttgaatctggccctgtccctggccttgaccttggccttgtgcctggccttgaagttgtccctggccttgaatctgaccctgtccctggccttgaccttggccttgtgcctggccttgaagttgtccctggccttgaatctgaccctgtccctggccttgcccgacactagaacctggaagcagcgtggcaattggcgttgagacaggctttggacacggcattcctctactttgtccctgaccctggccttgcactgggtagttgccgcagtttcttagagtcaggactgatgctggagcagccgttatctggtgcgggaggattgatagagacaagacgaggaggatgaggagggagtaaagatccctgcctcgcccctgagtactgcagcgagtgttggcttccttgggcatggttgcgtcttttttccccttgtctcttttcgccttttaccgagaaagggcctgggaggaatgataggtaataggaagtgagatgtaaatgaaaaggaaaaattggattaatcaaatacttaaggagaagagaaatggtcatgatcattacttagcatcattaccgctcatgacttactcgacttaacctttccttctcatcccggccgcgtaacagacttcgtcgacgagtatgctccagcatcttgattgattgcaccaggatacaaggcagaactttcgagttgcggaagtaatttccataaaccttgtgacctagctgatcaagcctttcatgatcttggtgacaacgttcccggtccattcgagttcttgaagaagttcagttcacgctcgctaaaattccgctcctattatgtcgcacgctcaaaacagaatcgaaactcattgaaaaaggaaaagactcaactcaaccttacgaaaaggaattggggtccagcgactgtccatccatgagatagtccactgagccgaatttgttggggtcgatagtcgcagcgaaatccggaagaagctccccttcgcctaaattcaacatgcttgccagctgtaggtcctgtgagctggtgaaagcctggctctggctctggctctggttctggctctgttcaccactaggttcggcgtttgtggtgagctggaagaaatcgagaacctcagagtagctatatagcgtgcttgagttagtgttctagtctgcattacagcgtgaaagaaactacatccgaacagtggtgaacgtacatcataattttccacgtatccaaaggtagatcagcgtcattaaaagaccagtcgaattgctcagttgcgacgggttcatctgtgggatcgtgatagggggccatccaagggtgcatgagcccctgctcggcggagatacgtcggtcaaggtcaaagacgaggaggttgtcgagaaggtttagtgctaggttcctttggtcactggatgttccggataggggggcaggaagcaaatgcacacttaccagcgtcctcagcggcgggaaggatttccttcaacggccgtggattccttttggccatggacttcaccacccgacgagtctatccggcgatttccgttagcgggctccagatggttggagggttgaagatccggggcggggttacgtacattattcgttgttatccggtcaatcacctcgtccggcggatttcctagcaggtctgtaatcagccagaactggttaatgtggtcagtgcccggaaacagcggccggcccagcaacatctccgcaagaatacagcccacactccacagatcaaccttgctcccataccgttgccatgtcagcatgatctccggcgcgcggtagtatcttgttgaaacataaccagtcatctgcggctcctggacacgggccagcccaaaatcgcagatcttaagatcacagttctcattgatgaggagatttcccggtttgaggtctcggtggattacgcctgctgagtgtatgtatttcagtccgcgctgtagtaagaccagaaccaggcaagacggagcagggttgcgtcagtcagtaagccccgggaaggaaatgagattagtgcgggatgcaattgcaatgttgcgtcttaccaggatttgataggtgaagtactgggcaaatttgctttcgagtggctttccgttgagcagtctgtgcagatctgtccctaagagttcggtgacaagatacctggaagtcacgtcatgtcaattgctgccgtcaaccgaaactggagcctcagggagtccgtacacatcttctagtggcgagatgaagatatcgctcatattgatcagctggagaatataggtcagtgccagttgtcccagtcatagtggcctactccaaagcggcctgccccgaaggatccgcacattatcatgtcgaagatgcctcagaagtttcacttctcgatatgtccgcttcgcaaccgaagtgctgtgaaatggcttcatcatcttcttgatcgcaaccacttgttccgagatcaagtcgtaagcggaactagcagtctatcagttgttatctgactaccattacgatagtttcctaaactataccatacaactcctgcagtgccgaggccaacgggctgcaagttcgcatatctgcattgttagtggttagttgcctgaggatcgtcttatccaatcgtggggaagtacctgctggtggtctcaaaggtggttcccaagatatcagagcgaatgaactcggccatagcgaaaggaggtggagtagagagcaaggagtgcggtgtactggtgagggaaggatgaagtcagagggaaaggaagaaagaaccttgtgttgaagctgtgatggaggtaataggtaatatgtaatgcccagccggcaggcacgcggtgggctgtcggcggaagttccaaggttacgggtgatggattcccgctaatgggcagcttttattggcggattacaatgccagccagcagggccccgtataacggcctgtcgaactaaccaatctttcgttcggtttctcgaatattcaaatccaattcatggcatagcatagcatagcatactcatatcatcagaccatgactaaattggtaatcgggcggactggtcattcacagtaccgtctcaaccaacacaagcaacaaatccaccagcaccaattctataatccgtgtctgtcgtgctaccgtctcgcaatttcccggatagtttcttatcagctgtgattcggtgaagaccagctgcaagtcgtgctgttttcgcccgcatcctcccaagtatacttgattgtccagatgccggcgaatgagcaccctgttactaggattcaatcgccactctctgctacaagtcgcaacccaattcacttatgaatgacgcctcctgaggcctgcgcgtcgttcagctccacgaatatgttctcagagcactagttgttagtcaacttctcgcccaacgagtgggagatccctgctgccatgtcggctttcttacctctctggggcacgtgcgcctcggcaagatatatgttgcgccatatcgcgttctcgac

SEQ ID NO: 3946 - DNA, 5144 bp, Emericella nidulans
aaaagagaacaaaaggcctaagaatataaaaagaagggcgagggaaacctaataaaaagtaatgaattaagatagtaacgacttagtaacagggagacacgttacggcttgacggcagtgaaacagggaaggacagagataagactggaaggatgagaattgaacatggcttagggataggacaacgtaagataatcgatttttaaaacacgggttaaaaaggccatagcggttggcaagtatcacaaaaaaaaacggctcagttctgtaaggtcaatggtagttagaaagaaaaaatgggaatggcaggggattagccaagtaatttgtatgttaaggtgggggtttccagccgggaaaggccgaagacttggtgcatgccaaacccgggcggaatgcgggtgaagcgttgagtggtccgaaacggtttcaattgcagacggctattgaaggcctggaaattgaagattggcggtgtgatgggcaatagaccaggcgccaatgcatatagctggagtaaagcttcaagcacgagggcaagggtttaaagaggaaacacatcttgagtgcgtgtaatcagttaacaatcgtaccttcatcgatgagcactaaactcaaataataccgggttgaaaacttcatgttgacatctcggaaggttggagtcaggtcaaatccaccaaggaacaaacggatagggatggtttcgcctgtcgacggtaagcaagggtcatctccatattccgtcacaggactagcttctatttgaggaaggtcgagaaacgaggttccgggtaatgagcgcttaagcgatgcgatgagcttacctcttgaaggtgaaccatccataatctgtgttcgggttcgatcagcaataattcaacgaatcagtatcctgaccactaacctcgaacctcaccagcgtctcactctcgttatattcattcggccgcgtcccagtcgtttctcgtcgaataatcgacaactccatatgcttgattttcaggcgcacaagtaggaaatagatacgtcccacaatcacatccttgaggtggtacttggattttgagtactcaaactcaatgtgcagacaatcctcgataccgacatccatcttgatcgggctgttggtctccagtggcatgcgataagagtaaacccacaagtccttttcgcgtatcacgtccgccatgcgcctggataccgttacccggacaaagtatcgtagcttcacatttatgccattgtatgattcgtactgcttctcgacgttcttgaagttgaaggggaaggtttgcgggtgctgcagctcgccgggagccgcgagttcctgtaccaaagatagaaattcgtggtgattgcctctgtcgtagaatatttctgtactcgggcagtgccgcatcagcatttggacacaggttctccattgcgacagctagttcggcatgcaaaagaaggcattcagctagcttcccgtacctattgttccgataaactgcactttgatgcccgtgtgttccagccgcttcccatccttcggtctcacagtcacagcacccttgactgattcaccatccatatacaagggcactttctcccggtggcctttgtccagtttgacatcaaccatctggcgctcgtcgccatcttcgagaacaatgtcgatgtcgagcggggtcgagaagaagagggaagtcattgtgggtggaacaggatatgaatgaagctcaattcttcaatgtcgctaggcagatcgaataacacaatgacagggcaaagggtgactagttgagctccgttgagcttccagctgggttgatggcacctcgcattactgcctggcggtggcataactaggtactctgattacataaggcgtcgctcaacgacaacaggaacattgctgccgcgctacaccttcgcacttcccacttcgataagcttgctctcaggatataccgctccatgcataatccaaagctaaagcttgggatcgctagtgtttatcgttacataatcgatgatgagttgagtctgctgctgctgagaaggcaactgcttaacagtacatctctccttctgtcatcgtcgcatcctctcgcacggtagctgagtatcatggcaagtttatgaaaccgcattccggtcttctttcctctattgctcgctggttccaggtgcgatcgcttgattctggaaatatgccgtctcagggattcttcagtcggctagccagcgtcggacctactgccgagctttctctagataggctccggctactttgcatttcacaccggatcgacgatgataccgacgctcgtctcgaccatgagcagttgactgacctgagagtcctcactggggctcgcgtggtttacgctctcacaggcccaaggggttgccggtgccatctcgcagacaaatgtctttgactaccgccgatttgaggggcctagccatttcggtgccccattgagcacggtcgagcttcttctcagtgatttatctgaagataccgagcaaggacaggtaggcttttctttatttttttacacgggctattctttgttttttacacggcttttctaattgcaactgattggatttatcactaattgtttctattagcttaggggttccggcccttcggttacctccggccggacgaccttcccagtacaggctcgtattcgggatgataacacttttgacctttgttagttggtgaatgtgtatcagcgatgattcctctcactgggcagtctgccatcttcattctgacttcaatatacgtgactccattgcctatatatgcgatgttaatcagcatctagcgtactttccatgatgaagcgccaatgaaattagcaaaaaatcttcgcagatacaagtacacctgaatagaaattgctcagaaaataatgtacattcataatcaatgcagacggcccgggttcagttctgatgcagcagttgagcctgtgccaggccgattgtaggcttttgtcgcacgtccttgggtgtcattttcttgatttttgcgataaacatgccaagctcattcgcacgcgtcttcagcgctgacgagatgtgtttgttatgagctatatcatccagttgcaaagcaagcttcaatccgttgtaacatggtacaatccgttgcaggagctgatcgttagacaaccagtcctgcccttcggcgctgaggttctggtccttcagactggcaagaagacgccgtgcgtaagcctcgacctgactggcattgctgccgccctcactcagagcgcgagcagcggaaagctcgagcaatgtaccaataactagggcactcctcttgggatctctctctaagtcacgaacagcgtgttctggagtttccatcaaaagcgcaaatgacttcgcaaggccctggattctcgcgatgccctcacccgtgaaatcaatccgctgccctgccaggtgaagctcgaagaaaagccgctcaacgacggacacgtttttcagcttgaacttagttgcctctgactgctgcgcacacatcaagaggtgccccaacccattggaacttccggctttccgcaccagccattcccagcgatcctgacgaatcaccatacccgacttgtgaattccaataagaaatgtagccaggtttgaccagtttttcgtctcatgcatcagggttaatacgcgatacttatcgttcgtcgttggcactgaaaataggtcgattgagcgaagttgatacggctcttccttggggccgattgacacgataatcgggtgtccatttagcttgttggcattgcgtggacggtatatcaggtttcgctgctggatatttagggaatgggggatgaatagttcgtcgcggaaacggttgaggagttggtcaagttctggggagtgtgtcggggctagcgaagggattgctgcttccaaattagcaatcccaagacagaatactactgagcgaaagccttcttacttcttgctgaccagctgcgtttttgtgtcagattgactgactggtggaaggtggtcggagtttggcagcggaggagcctgcccatggcgttgtgcgccattatggtgcgcgggctattatttgttgcgtggctgcgatagcctgttgaccgagcgtaagtagatgagtttaggccggaagttccttgtatcgcaggagcaagaacaaacaataatgtatcccagcgattcggagatgctggcggcagaaaagttcctgggcggtggttgtcctagacaggcaactgaggtcttggcacaaaattggctccgcctttcagataattgttcttcgccgactacggagttatccttggacttcatccatcctgcagcatggcaagcttctcacaattgacccggcagctgggctgtttaaggtcgtcagcaaaaatccagcaaccggtagcttctcaaattagaacgcttaccacaacgtatacgccaaagccagcgccggtgcctttccctgaaaagcttccgaagcaattcctctctcaaatacccgctcgattccaacctcacggtatataaaactgtctcaaatcttggaattgccatgtttgtctgacacttgtgcagagcccaagaaaataaaagtccatcctcccccgccatcggctcgcgacgtgtgcaaggatcccattgcgacagtaagggatgcccagttggcaattcttgatcctaccggagaacgcaaagcgctctttgactaccgacggaatcctcgaagtgtaaaggtcggtgatattgtgcgggtgacgttcaaaaacggcgatccgttctctggtgttgttttgagcatcaaactacagggcgtcgacacctcatgtttgttacgaaatgaactcaccagagtcggtgtcgagatgtcaattaaggtgttcagtccgaatgtggagagcgttgagattgtccagagagcggagaagaggaagagacgggcacgcttgtattacatgaggtgcgtattcctgatatcacccagcctcgaatggttctcaattactcctccacgagaacattgactgacacttctctcaggcaccctaagcacgatatgcgcagtgtcgagaacattgtttcgaactgcctccgccagaagaccgcggtga

SEQ ID NO: 3947 - DNA, 1425 bp, Emericella nidulans
gcccaaacgagtcagtgttgctgtttgatgtggaagtggggtgttgggcagcgtacgtagagaggcgcacggccagcacggttaccatcaaaggtctgatagtagaaggtaacgaactgttctgtttagaaggtatcagattccatcttcctctctagttgttgcttcgcagggtagcagagttgacgtcgacgatcgcgaagtcagtagagatgagggcaacgtacgagcgatggactggaagtctggaaatagcaaaaacaggtgttagcaagtcgtctttcacgtagcgtccaattgtggcttttgttgtcatggaggggttgatttctgagcctccaggaggggcaaacaaaacattcaagagtgctgcgacggtcggtgcggaaaggaggggggcttaccggccatgatgatggtgatggtctcaggagaatgtaaaggggaagtagaaaagaagatgtaggatggacgcgatagaagtaacgaggagaaatgagagtgattgcccgatcaacagccttaagagaagcttgaggaggaattcccgagattggagaggggaagaggcacaaattgtgggcctggccttagcgctgccttaaaatccaaggcattaagatagttaactagttatgcggtacaagcctggaagcacctactgaaaaaaaggactagtgttaatatagaggcctgagattgtgttcaatcattcatacatatcctgaactactctatcctgccttctgagtccgagtccgagtccgcaaacatgtcctccgctttgggccgtggtttgcgaacgggcccagctggtatttctgggggtttttcagattttgtctgaggctgctcttttggtttatcttcctcttcgatctcctcgcgcgggttttcatcttcatcaatgtcttctagatcgctatcttccattggttcgccatcaatatcactcatcgccgcaccgtcgatgtccatatcttcagcaacctcttgatggacctccgccgaagggggtttgccttctgaagaaccgcctggttcaaagcgagcagcagcagatgaatcctcgtcaacagccttccagcggctcttgttcttggaaactgcggcagctgctcgttcagactctgctttctccttctcctctcgcagctcttcttccgtgagcggtggcttttcgaacacctggaagaaatgctcctggctcgactgtggaaatacgcaccacccttcccaaagatgtaaaagagagcctatactgcgcttccacttctctgccctcagccgtccccagctcagatctttttcaagtctccctaggtgttcgaatactttatgcgttttcaatgctgattcgaacagctgccgatatcgccaggcatgccgtaccccgctggtggcggatgaggagaggatatcaga

SEQ ID NO: 3948 - DNA, 1973 bp, Emericella nidulans
tcgttgactatccattcttttatcagtcgcgccaaggcgggtctcttaaatctccccagccatccccagtttcacagccgcatcattcccatatacatcacatcctgtctcaacttcaccaatccactcagcatggctcctccttctgctgccgaaagtgaagctcaccaaagactccttgaccgtctcgatatcgcggccgttccccgccccttccgaagccagacctggaagccatctcagcgacgaaacaagaacgttaagcagcttctctccgacagctcaagaaaggaggcgtcttcgattgctacgcaggttaattccggtgcaactactcccggagccgccgctagtacagatgggagccagacccctgctgagggcaaccagcgcaccgcgaacatcgcccaggctgcgcataacctgcagacacttgttttagaaaagaatgcacgcgctgcatattcttccggaccatccgtaacctacaccaatatcgagtccgcgccttcactgcacccgtcgcagcaacggccgtattgcgacattactggactggcggcttgctataccgaccggaaaacccggctgcggtatcatgataaggaggtgttcggtgttatacgaaccttggggcaaggtgtgccggatagttaccttgagctgagggctgcccatgttgtgctcaaatagggtcttaggttctgctcaggcacgttccatgacaggatagagctacatcagagtgagacacctcttacggactatgatcaccaccgtctagctaacattgcttgatgaagaaggctacttttaacgaatatgtacgaccaacacagtcaagctcttccacccaccatgcccctttcgggacaggctcaagaaagcgctccggcttattcgtgatcttgtatattatacgatttgatcttcgccttgtgctcaaagcactcgactcataccgacgctccacgaacggaacatcagttacagcacccggggatgctgttgccgcggcgtatgagctgggaagccagccttggtatggaataaataaaaccagatctgtttgtcggcggggtttgaaaatttgggcatcgcgcacccagaaagttcgtggttcattgtagttgttttggccttcttgacggcacaactccgaaattagaacttcataacacatccatcattatatgtcgggttcaatgtattgtaagctgttagcaaggatgctttcattattcatctgaaatagatggtccagcaggcgtagttgtacgcagaatctgggttgacaagaagcagaaataagagcttttccgctgcgcgttgattgttgtgcggtcgggagatttaaggagctccagaccgcctccctggtacatcttagcttccaatcgcctaggctcaacacggcagaatttttggactgttcatcgcaatcgtggtagtcgttgatcaagcacaccgaagtttggccgaaactcgctgcgagaatcaaaggcgacttggtcacactcgattattagacaaacctaacgaccgctgcgctctccatgtaagtagcttacattgacgttcctttccttattctcaagctccttatcagccgcttgctaaccttcacaaacaaatccagaatccgctgcgtttcctcaaactacgctcaccgtcgcgcacctctgttcctcctaaacgtcactctgacttcctccctattagtatatttctatctttacccgatcccaagatgccgtcagtgtggatgacagacaaccaaagtaaggaaccaaggttctctcaagcggcccgccaaagccgtcatacacgtccacgtttattctaacggttttactcaaataaaagaaattggtgtcatattctgctccggtggtatgttcaaccgtctcttagcacttcctgacgcctccaacctctgtttcaatgcgccgcgccgtatcctactttttgcg

SEQ ID NO: 3949 - DNA, 3058 bp, Emericella nidulans
aggagcgctgtatcagcggcaccgtagcggccttatcttaatatatgccccttgagacattaagaggtcgcagagtacgccagctgcgatagccaattagccataactattatagggacgtgttatccaattcaacagtaccgcagcatccttgcgcatccctgctcgttcccttcccatctgggaaccgcatttctgcctcccactttttaaccctttctgcgctgccagttctggaaggtaatcactggtgtggcctgtgctttcacgaaaggctcaaattgaggccagtgttggctctgacagatactgtcttggaatatcacgaacgttatatcgaagagcgagctggctcttgcttaagcctggtcggccactatttgtcggacattcagattcactcttttacccgccatccagcctttccacgctttgagacacgacccgttctcgtcatccggaatgcagggccagtctgccaaccatgaagggcaagtctcaggcaggatcttaggcacggcatgccaggcgaaccgtgaagtgccatccatgtacactgcatctcccgagcgaaggcggattatctcacacccggcgccgtcatcgtgactgataagaaacagaccatcgcagccaaaactaacactgataaggcctgcgtcacattcttcactgacgtcacggtgcgggctcaaggtgtttccgggagagtatagattcaagatagcggcttcgggttcggtctcaggaaaagctgctcggagaagctctgcaatgtcttcaggaaaagcaggcgggcgctcggccgggtattccttggcagtccaatcgtactgaccacccagagtgacccaacgaagcttcttggtcaaaacactttgcatgctaagtggcttatgtacctctggatccttgggatagaatgtccgtgtctggatgtcctggaaaaaagagatcggttgttgataggactcgtttagcgaggtagtcgtgtcacggtactcaattccgccgtccgtccgcacagggtacattacatcgtagtggagatggagattcgtcttgtgtgcactgttggagagatctcggtggaacaggcggttgagcagctccatttggaccgttggtgggaataaggacgggaccatgagaagccctaccactgtcagaaaagttcagaagatcaaaccattcaatgctaaccggtgacagatcgatgagtgaacacggggatgtttttctcaagccgcttccgggtttgtgatgtgatgactgaattagccgaagcccggctgaagaccctcgacagatattttccgcacaagcgctatctggtcagggagagcatctggatccaaagattgcaagtcaacaatgcccgtatcagcttcgacttcagacagtgacgcttttagatactgcttatagcgcagtctcacggcatctggaggcgcctcgtgggcgtttaaacctgtgatacgagccatattaggatagatgtataacagtgacagcttatatcatgcagtcataaatattccatgatttcgacggaggattcactctggtctggagatggtcaacctttactctatccaagatctgctgtttttctgctggatatgattactgccggcaactcatctgaccgcctatttttccgcctgttccgcattgcctttctacaccgtacatctactctacacaatatcaggccgtttgtttgtttttttttttttttctttgggacaacgcagtcagtcgagctttcctgacactggtcattagtattcgaataatatgtattatgataacgctacgagctttcgtcggtgctccaggctgatagactgtctgatgcactcaactgataagatgggtgttccccaccaccccgccagagcccggtaaatagtacaaagcccgctggggactagcggaggggtcgagagcgttggagctcttccatggacatgaacttatcgacctgccgttttaagggctagtttcgtccaatcttcgccgatgtctacctatcgtagtttccgatggaggggttgagatcttgatacgaggagtctatgggtatatatatattgatacagttacccctctcatgtcttgaagacaggtctaatgcctgaacttacattaaacaccttccctcagcatggcgatcacttcctgggaatctctggcgaacgaaaagcgtcaggcgaccttaaatgcgatccctacaaagtggagaatccaagagccaatccctccaccctcagagctccgtgatgtgacagggacatacatccagaaattcctgacccctcgagagatcgagatcaccgagctggatgcatatggtattgccgagaaaacgaccactggagagtggacggctgtcgaagtgaccgaggcattctgtcatcgggcggctcttgctcatcaattcgtatagtttcccaccatgaactgagcatgggtgactgatagagtgataggtgaattgtctgcacgaggtcttcttcgacttagctatcgaaggcgcgaagcggcttgatgcctactttgctgagcacaagaaaccacttgggcctttgcacggtgtgccgatcagtctgaaggaccaattccacgtgaaaggcgtagaaacaacgatgggctatgtcggctggatcggcacctttcaaggcctgaaagacgaccccagaagcagggtgtttgagagcgagcttgttcgtgagctgcgggccctgggggcggtgctctactgcaagaccagtgtgcccgcgaccctcatgtgcggagaaacagtcaacaacatcatcacctacaccaataaccccaggaatagactactcggttgtggaggcagttccggtggcgaaggagcactgattgctctgaaaggatcaccaggtggttttggaacagatatcggcggcacggtgcgtatacctgccgtattcaacgggttgtatggcattcagcgttcgtcaggtcggattccatatgagggagctccaattccatggatgccagaacacgattttgtcagttattg

SEQ ID NO: 3950 - DNA, 3887 bp, Emericella nidulans
ggtgagataactattgtggcggtgatctggcccatctccggcgcagggatggcctcatctggccggaagaagtaggagacgtctgcagccgcttgcaagctgttttgagtgacttcggccgtgtatcgtggagacccaatggttgtcagtcggaaccacaaggcgatgaattctggcaccgcaccgagaccaacgatcaggcgccagatgcggtcgacatcttgcacacagcgccccgtgcagccagcaccagagtcgtcctccagaagccgatgatggaagccggcaacggctatgagggcgaccatgttggccgctagggagccgagggactggcagcagaagacggccgccggcatccagcctcgaattcgggtgggcgcgaacctgtgatgttagtaggtattataagtacattgcagtgtacatactcggagcatatcacagcagacaaggaatagtcacccccgagtcccacgcccatgaagaaccgccaaaaaatcaagaggccacaatagacatagactactcggcaccagaggagccagcaacacccccagtgttgtaaatatgaggacaaccaactcgagcccgttcattaagagtgatttgctctcttacagcaatcggatgaagcaaaatgcgcaatgtgctgccgtaaaatttcgtctattgatgatgcgagccacccggattccggcgtctttactgagtgccctcatctactgtgtaccggttgtttcgctcaatataacaacatccccaccgcacccgactcgacagtgctctcttccagagggtctaaaaaagatcaatgttcaatatgcgggcgaaaccgtgaacgtaagaaaagaaacaagcgagaccaatatgtacagtgcagccaaggttcagccgatatcggccattcatcgaagctttcatacttggtaaacagaatatctgagcagtgccaaacgaataaactgtgagtacacatcgcttcaggcgctaagtacaaagctaactccacagtattatcttttccttttggacaagaacctttcaccttgtggaacgcttgctgaaaagccaaggcattccagttttacagatcgatggttccgtgccgtcgaagaagcgagatgatattattgcgtcttttagtaacactcgtacgaatgtcctcctaatgactttagttacaggggccgttacgccgccatgcaaatgacgagtggaattgaaagctgtgccgttgacgaccaaagtatttctacctattattctctgggagctcatttttcctggtttgattgcatacaaggctgggagcattacgggccctttttctccatatctgtcctggaataaatgctgctccgagtactgaaagtagctaatgccgagttcaaaatatgttcttatagcattgcgcggacaacaaaattcagctgcaaggcgtattggaagccagctgatgtgaatccggcgacatcatcattgcagccggtggtttaaatcccgccctgaagcatcgtatcacaaaccaccacggacacgtcaaccatgggcagcctattggcaaaactcttcattgtcctaggcaggtcttgaagagcagatgatgcgctgaaatctctaaacgccggtatgcggcgaaataccgggacacatttgagcacctccaatcaagatagcatgatttgaatatagcatttccaaacagtccggtcggtccgttgaaggcagacggactcatcaaagctataagagaggggtgttgcggtttcatgaaaacttaaaaccccaactgcgcaaactgcacagttgtgttttcgactgtatggagagagtggacattatcatttacatctgtcttttggcatgagtacggaacaagccaacttcattggttatatgcccaccctgtgttctgatgtgtaacgcaaggggtagctaaagcagtcaagaactgggatgaccttgcaatcatcttaccattacgggcatgtaccacttgcactgcaatggaaaacgcgcagtacagaacaactaagatgaggaagatgctgtacttgcttggtgagagagaaaaatagttacggaaacgcgaatgtcattgagcggatgttcggactatgctaggctgaggagaattgagagattttgaatgagaaaatcatctcaagctcttccagggtggtggctaatcgagcttattgcttttttgtagtaataagagacgggctgcggagactgggataagtctggttagaggacgtccagtcatttgtaagaaccacacagataaatcctatgaatgacatgaaaccaattctctatattgaagagtatcatgttattaattcatatgtacgtatcttgggcgacgttagaggcatgttggcggttagttagggcttcggtgtactgtgctagcgtcggctaaagctggttgctcgccgcgcgggactgggttgtctatatactgactggaacttttgaaccaaatggaaaatacccgagggtagtatcgaactaaatgaaccgtggaaactaacctgtggcattatcgtggtgtgacagcagtcagatttcaaagctcccgcgcccttccgcagccaccgctgtattgttagagtgggcctggacatataagctgcatcctatgttcccacactcaacacatatatgtaattcttttctttccttcttagagtacatcagcttgctcatctcaccgagtaactcacaatgctcaggaagaccgtcctcatcaccggctgcagcgacaacggcatcggctccggtctagccctaactttccaagctcaggactactacgtctttgcaacggctaggaacccagccaaaatgtccaaactcgctgacctacccaacgttactcttttacccctcgatgtctgtaaaaatgaggaaatcacggctgccgtggaggcagtgaaatcccataccggcggcaccggcaaattagactacctaatcaacaacgctggccaagggcacttcatgccaatcctcgaccaggatctgaagaacgcaagagacctctatgaaagcaacgtatggggccctcttgctgtaacgcaagctttcgctccgttactcataaacgcgaacgggacagtgacattcatcacctccgtctcggggcatattaattgcccatacattggcgtatatgcagcgtcaaaacaatccctggagatcattgctgagacactccgccttgagctccagccgtttgacgtgagagtcctgtcggttgtcactggcgctgtgcagagtatggggcaggttgggcggtttgatgagtacaaactcccagaagattcaatgtacaagccaattgaggcgttcataaaagaccgagcgcagggaaaggacgggatagagagggaggagctgatgacttactgtaacaaggtcgtgagtgagatcacggatggcagggcgaaaaagttctggtgtggaggtagtgcgggctttgcgaggtttgtgacttcatgtatgccgggggtatatttggtgagctagtccactccctatttttattggatttctccaaaaaattatcatggctggctccgactgactatttcgtgggcaggatcacatcatgtcgaaaggaacggggcttgatgttctggcaacagataagaagggcaattaacgagtacttccagacgcagcgtctggtctgtggaggacgctttggctcgggcgttatagttcacattcacccagtattcgtgttcatccatgtacggtcctgtatcatcagcgtccattatgcttgtagtacacaagcatacgtgcggcagcgaaatttttcgctcgacgtcggggtggagcatgacgtgccattttaataccggtaaagc

SEQ ID NO: 3951 - DNA, 5147 bp, Emericella nidulans
tggggtattgaagggcaatgccgtgagcttaccctaaaaaattctccaagggtcgaattatacggtttgcagggtttacctttaatgtatttctgttggcagttagcaggaaagagcacattccctaaaaacgaggaagaacagcaaaccaggtctttggtaaaccagaatcgcaaaacctccagcatccgtcccaatggttcttctgatgtaccgatgctgtagatttccagtcagaaactgaatctgggaggttgatgacaaggcgatattgctgaccttacgaaggtctccggtctatccaagtaattccagtattctaatgaaccaaagcccggtcaacactctgcaacacccaccatcatctaccaatatcaaggatcaagtaacctacccaggttaggagttggctccagaagctgtgcaggtagcgaaaatctcacggatgcaatatcgctcacgccgacgaatctgaatagataatgcggctcggttagcgcaaaggcaggatcattaagagttttgccagcaggctcaagaacacatacttccgaaggatggacagaaatgtcttcagctttgaagattcatcgggggtcttctcaggcaggtcgggcgttaatgtgaaagacataattattttggtgcttccgagaacctgttacaatgagagtctagggatatagctgtaagccagctgcagcaggctttagctgacggaaatatgtgcaatatgtaggaaaatttcgacaaatctagctttggcgtccagacgcaaaagatatggatgtcaaactgagaggcccaaagcagggcagaaaagcaggcgtgcggtgatatatagcaataggagcgggcaagggggaaacgaaagcaattccaatagtctctgtagcatctaggcaaggggaagaaaataaagagcaaagaggcaagccaacgttgaagcgagttgttgagacgaagcggtcggtttggagagcaggcggtgacgtcttgaaccggtcaagcctccgattctcaggtcttctttactccataacaacacccattatggtcgggcaaagcgtgctttacaaatactgtgaagtgcgcctttcaggacacggatgactcggctgaacgcggggttgtcgaagcaagccgccttgaagatcttcgtagttagaactgaacaatcttgaggcctcgcgacttgctactttcggttacggcgaaaaggacctctcgtccaatcggcgcgtcacgaaaactttccacctttcttttgtggctataaacagcaccccgtagttggtttgattttcaggtaagttcattgatcattcgtgcacaactgtaagtagagtatcttccaatcagggcaactaagaccatattcgttctaccatcgctgttgggatatgggaatcaagtcttcaataatccgcttccgggccaaaaagcgtagccaagttcttattgccggtccataatcatatctccgcccctcggcatactcttcgtctgcccgctgcgactgctgttcctctcgaatagccgttcggaggtctagttgtgccctgctcagttccgtgcggtgttttgacaattcatctgctgtaaaccctgaatatttttctgcttccccaacaggcatagctgccttgttgaaggcttcttcggtcacgccgtaagattcatcggggcccaagagggtgttctcatcaaggggttcactagccgacgattcgtcacaacccagttctggcttttgtgggtttatagccctctcaatcgcctgcagctgtttaatgttcactgcgagtcggttgacaagatccggtagcggatctcgaacaaggctcaggattgagaactcgatcccatatttatccatccgggcctctatgttcggctttaccaggtctagccaatcgctttccggctcgaatacacctatagtctatattagcaacatcgccatatgttccttcattacacagcacgaaccgagggcctggggctggcgttctaacccatcaaacttccaaaccttccccaaggcaggaacaaaggcaataaaatggaatcccgcatcagcctcatgctcctcatggctacttttcttcgaccgattgcgcttgaatgccgcctcgtatttaagctggaggtcggaattgagcatatccattctcctacgcgcaatgttagatccacttgacaatcgtagctgcttatgattatgtacctagcaaacgagttatgtattcttttgacgaattcaaagttatttattgcgtctcctcgcagtgcgggtgtaaatggcatggtaaaatctttgaagctccgaagattctctccgagatctgcgccttcaatgttgttgacgatgttcaggagagcaacgctagcacaggcattattcgctgtctagcatgacaatcgcccgtgagtcaacaacaagacggtgaaaatagagctgggaatacgaacttgatttgcaaaccaaagtccttcaggacagcttgcttcctgtttctctggatcatcttcttgccagcggaacaaaaatataatgccgtaaactggcttactgtacggatttgcgcgtgctcagtatacagcatgtatcctgaggctcagagacccttacttcaagaaagccaagagttcatcatccaatgatacaatctcttgaactttgacacctctaactccaaattcccggagcatcacattgaagagagccttttgagtatgagtatgggtggggcaacataaatcaagatatacatactggttccgattccagctcgcagaatccattccaggactctttctcgtctttcgaggcagctcgataagaatcaatcctcccatctctacgctccgcagaaccattcaactttctccgtttcaagcgatcactcataatttgtacgatgaacgaagtagtgagctgtccagtagttttgaaaggattggaacaatatgctgcttcaagagcttgctgaaagagtctgtcagattcaacctagcctttctgaggacgttttgtttaaatgaaacgataaggttcgactggttagaataagacgagcttacttcgaccgcgtaggcttggttctcacatgctctggtgtggttatagcgatgctaagtcttcaattaagattcagcggctggtaagaagagattttgtacttggtctgagatgcatggagctcaggttcggatgctggctagctgtagggatgatctccctaagactagtcccgattagggatgtgcgcgtcaaagaaaatatcggccatcagacgggcttcgacttaacaactatcccagagttagaagcgcaacaccgacgattgggtcaagctgcgcattctctcgcaagaaagctgcacatattagtctctgtttaaaccctctctacaaaccttcagcatatcgttggcgtttctctctgttgggagtttgcaccaactacatcatcgcctgctgagagtccgcgaccacagcatgccatgagcgacactccccgccttcgctccgcgtttccatcaacgcctcaaacgacgcagaagacaagagactacaatcgatccccctcgcggcccataccacggaatgctccacgttcaaaagtcgtctcgcaggcaccgtctgctgatcaggatgcgagttcgtcgctcgtcccatctagcataatcgacccgccgacgcaacgcttgtacgtagcagccgcctacgtcgccctcaacgcgtggcggttctacgaggcctggacagcttctgacgatttggactctacctggctgttcctgaaatgggcctctatagatggtgtctttctcttcggtcttcaggctttgcgcattccctggttggaatgggccttcccaacaacgcttgcgctccttctagttcacgtcgccttcaacatcttcttgatgtttcgcattccagtaggtgctaactcaaaatgaatggagttgaaatccactgatgtttgtcagattcccgttggcatttggctttctggaatgatgagactagcttatgatcgagaactctcaatctcggggcagagcattaagcctggcgacattataaataatgcgtcactcattctcggaaagcaaataatcaacatccttccggaagggtaaggttacccaccatatgcttccaactttattctctttacaaaactgaggcgtatgtaggtctgccgtcttgaacccagagctggcaccactttgcctggacgctcagaaaacagctgttgaattgccaatccgagtgaatcaaaccgatcctatactgatagagctgctacgccttgacttcaacaatggcgacagtgagattgtgacgattcaaagtaaacaactgaaacaattgaaacggcagtcagacaagaggcgctcccaattgtcttctgagttacaccgtgatctcctcctaccaattcggaaaaccggaatatatcgtttacagcgtgtcgttgatgagtccaagcttgaggtccgggtgcgagcttcggattctatagtcactgcctgccctcgcgctctaatcaaaaactcacacacgcataagtgccgtggtgagctctcgaacctagtgctagccgttgagggtactccgcccttgaaaataaagtattccaggcaggtgaacgaccatgaccgaggtttctcatttcaaaacatccaaccagaccatttacggactccacttctcggtcataggtcgcttggtcggttgttcgatggacgggagccagatatcacctgggctaaaagtcagatcattgaaatacctctaaacgagtctctgaacattggcggtgattggctctacatgatcgaggaggttcatgatggctcgggcaacgttgcgaattattcgatggttctagaagatcttgatcgacaatctgtgaaatctctagctcagtggcatcacttctctgttcatgaaatccccaagctatctctctctggatgcaacgatcaacaattccttgaagtcgcacgtggagaaagtcacccactccccgtcaaattccatagcacagaccatggatacgaaaacgatgggccattctctttaatttactccttcggtactgatgggcaggggagcgtcgacgattc

SEQ ID NO: 3952 - DNA, 2159 bp, Emericella nidulans
gctaccaatttgcatgcaagaaactcggtctagatcagaaccccagtactttcggcatcaaacgtcgaggaagagaaaatgcagctatgtcccaaaacggctcccgagtccatgtccatcagtggacccgagccccagaaggatggggccctaaatctgacacatttttcaccactcgacaatcatgagtttggtcgaggagggcagccccaattcatctaagtgctcgatggccgatggattcgctgatgataaagggatggcttgaacgactatagagtttggaactgctgcaaccttttatgaatgttcagcgtctgcttatgaggactcagtggacactgtgcttgttgcctctgccttaacctccaccagcgtgcccgaggactccgcttgactcaaatttagtctgtgtgtttggagacccctaatgtaccgaccgcgtcctctgaaccacaccatcagacctacgacattggtttttggttctgtcccctccgaattcctacaaggttacacgccaacgataatggttgcggtagttattgtaagtgcataagtcgctcgaattgcagggacacttttctatatgaaccgaccacaagaacaaatcacaatggaggcctcgccacttattgaagccatcgttgaggttgcggaataatgtaagcgatgcggcagtagtctgtcacaagcggctcgccagacgccaaggcgtgtttcaagtctcttaatctccgcgccgcctgtcaaatcgccgatcccagccctgatggtcgagccgcttagagctctgacgcattctgagagtgggctggtggcttcttgtcgtgtttcaaccctgaagaccctgcaacgtcggctggccagtactcctgcccagaccctgattaccaagggccccggctccttccaccagccaaagcaggtattcgccgaacctcatctacttgaggagatggacattgccaagtttgtgattgtttgatcctgtgccacaaaatgccgttgaaacgctttatcctcttggccctgaaacaaagcccaagtaatagtcatgcgcctaaccgaggagtatataaagccgataatccgaccgcagggttaggaccaccatacgctcattcagtcattctataggccacggccctctctccttaaaatggtgtttgttcctttcttttatctgctggcaggtttgaccttggcttctggaaagccgattttgctccccaggctggcccaggaagcatcgcaggacgttgccgaacactcttttgacgtaaccctcgagtcccttggaaattcaactgtgaaggcggaggtcacaaatacaggcacagaaggtcttcgactcatccagagaggtggtatcctcgatcagttcccaacgaggaaagtcaacgtcaagggtggtggtaagtatctcgacgcatatgtggataataactaacaaatatagattccgaccccaagttcaccggcgtccgcgttgaatacattctttctcacttaacagccgatggcttcgtccaactctcgccaaatcagacagttggatctgtcttcgacgtcgccgacctctacgagctctctccgggccaggaatacacagcagtcgcgaaaggcctcctccagtacacgacgctagcaaatgagaagagattcctcaccttcagctataaatccaacaacatctcattcaccgcaccaaccgacaccaccaaacgcctggaagatcgctccactctcgtatgctccgacgaatacaaccaggttgtgcaagatgcgatctcccgggcagctgaaatggccactgctgcggcggccgatgctcgcaccggtagcgctctctttcaaaaatacttcaagtccacatccgaggacgatatagaggaggttgctggtcggctagatgccattgctaaagaagcaacaacgacaggccagctaaagtactactgtgagccacggcagaagactactgcgctggcaatgttgcggccatgacataccccactctcaacagagttgtcaactgcccagggtactacgccagcaccaaggtctcgaattattgcgggtatctcgaccaagctgccatcacactccatgagtacgcacacgcggacgctctgtacagtcctggaacagaagat

SEQ ID NO: 3953 - DNA, 3243 bp, Emericella nidulans
caaatggccaaagagatgcaacacacactcaacgttggcgaagttaattgtgaggtcgaacgcagactttgcaaagatgcccgtgttactgcattccccaccatgtatttcttccgcggaacagagagagtggagtacaacggtcttcgaggtctcggcgacctagtcagtacgccaatagagctgttgagattcggaacggcattcaggatgtcgatgccgagtctttcaaggctctggaagaaacagaagatgtgattttcttgtacttttatgaccatgcaacagtgtctgaagatttcgaggccctggaacgtctcgcccttccgctcatcggtcacgcgaaattggtgaaaacagacagtgctgctctcgctgaaagattcagaatttccacgtggccacgccttctcgtctctcgaagtgggcgtgcgaactattacaatcctatcgcccctagagatatgagagatatccggcaaattctcaattggatgcagaccgtttggctccccattgtccccgaacttacggcgtctaatgcccgcgagcttatggatggcaagtttgtggtactcggtattctaagtcgcagtcgtgcaaacgagtttgtcgaagcgaagcgggagctgaagaatgcggcgcttgagtggatggataaacaagtgcagctgttccagttggaacgacaagagctacgggatgctaaacagctacggattgaagaggcagaggatcgcaatgatcagcgagcgttgcgtgcagccaagaatatgcacgtctccattcgcgaggacgataagaagcaagtgaggtttgcctgggttgatggtgatttctgggaacgctggttgagaactacctatggcatcgatgtgagcaaaggcgagcgtgtcattattaacgaccaagacaaccgccgttactgggatactgcttccagtggtgcttccataatggcttcgcgaacctccattcttgaaaccatccctctcgtcattgccaaccctcccaagctgacgcctaagtctactatcggcacttttgagtccatagtcttcgtctcccacgcattcatcacacgtcaccctattctcttcgtcatcctcctaattctgtccatcgctggtgtgacatatgttgcccgggggagagcacataagcgcggaattcgtggcggaatcctcggcattgctggcaatgctggtggcttccttcagcttgacgggaaggaagggcttctaaacggaggttcaaccggaaaggtagactgatgtggaatgtaaagcagcgcagttataagctactttgtttaccctatatttaggctttcatattcctttcttgttttcttgataatacttgaataaacctagttctttactatattattgaatgactggaaatttggatgcttcttccatttctacttcttgggcctatatattataaacttcgaaacttaagccttggcccttgtatcaattgaggatcacgtgtttacaatttctgagtcgctgattggcttcgggcgacacagtctccggctccggttttcgtcgacggaagtgtcgcgaatccgctcaacctcgattgtctgacgtcctctgctggcaagtttcaatccacaagaaccatacaaaatggtgtgtacattcctaaacattggtattctatgctagctaattgctaacgttgcggttcaacccagttctctcagaccctccgccgtgccgcagctcagtctgtccggtcatctcctcttgccggaaggtgagaactccccgggcgaagctatgccacacatactgtctataccttccctgtctacctacctacctatattcttgatgtgatacttctgcggcagactactgggtatctgtgacaatcaatttagccgttgaacacggacaaaagcacgcaccaagcggcaaactaactacacaacccaacgcgacgagaaccacaagccccatgctacgtaactaactcgaatcaaacacacaggttcaccccctcccctcacattggcggctataccatcaacgacgctaccaagctgtgagtgctatatccccaaggatccgatcaaccgcctcggacaggaagagtccgactaacccatgacattaacagcggtggaattgccgccacctttggtgtcagtgccggtgtcttcgcccttttcttttttggcgaagtttcccgtgtccgcaaggatatccctcagaagctccctttctttgacacctacctcgaccggactattgctcctgaggacaacgtatgtcattcttttcccgtgttctctttgtcgcatcgctctcgcgggctcactgcagtttgctaaccgattactctgcgtccagcccttctaaatgagtcatttttcttcgtcgtgtcccgcgttgttgtttcttcgctatgtacgtcggggtcgtggataaatagaggaaatggagatggtctgtactctgtagaatagcaataagatgcactagcacatagacttcggttgctccgactaatccgctaagttcggagtatagaaaattagtagagtctgttctaagcatggggcctcaggtagacacatctacatcatacgaatcttgacctttcttagtttaatggaacactagtcaagcctagtcttcgtaggtctgaagttcggatcacgtagctgatttgcatacaattgctcatttatatatatcattatctcattgatgtaagacctgttcgcaacgtagactactttatcaaggaggacccgagcccatacggtaatccctggaaaggacatctaccgaccaagtagatactaaatggtgcaaacaccacgacaagtaggttggccgtaacaaagtgacgcaacaactccgcataatcaagtagggctggaaacgctacgacatattaggttcgagcgcaagaccatttaatagacaataaataaactaaatgaagcctaggagcccctaaaatatgatggagactagtaacctaaagcttgggagacgacctatgcgagacatctgcaggtgcgcctgcacctggcaccacagtcgtctgttcctgactaccatctatgccatcaattatatttccgtggataacgtgttccaagttaacctttggccccttgaaccatttatgtgcatcaaatatccccaaatgctcaccgcaatcataggtcctcccagaccagacaggtccagttcatcagatctggggtga

SEQ ID NO: 3954 - DNA, 6350 bp, Emericella nidulans
catatcaaccccgagttgaggaatcccttcgagaccacctggtgggattagggagagatcgcaagtcgaaggcagagcggactcacctggggcgctacgctcttgacatcgacatttttgcacacgatggctgcatccttacctcccctacatctgttagcacccgtatcatgtcaatcaccaggggaagcacatacagctccagagtcacccgcttcagggttttgcttgcactctccatgaccttcttgccggtcgccgatgagcccgtaaagctaatcttcccaattccagggtgcgccgtcagccaggggcccagcctatcatcaccactcagagcctgcactactcctggcgggaaaaactgctgcgccagctcagcaagctttagcccgcagtatggtgtaaacggcgacggcttgatgatgatcacgttcccggttagcagcgcaggcgccaacttaattacagcaagcgcgaggggaaagttccatgggataatccccgcggcgacaccgataggggtgtgccggacgacaatcttcttctcggcgctgtcttcgacgatctcatccttgagcccctcagcgatctcggcctgcgcgcggatggtctggacggacgcgaccgcttcataggctgcgaattggagctgtttcggtcagccgatgctacgggatcaggtctatagtcttgacaaatggacgtacgggcttgccctgctcctgaacaaggagctttgagaaatcctccgcgtgcttctcgattgcatcggcaaaggctagcagcgccttctggcgctccacaaaagggacttcggaccaggtcttgaaggcctcctcagccgcggcgacggccttgtcgacgtcctccgcggttgcgacggggacgtctgggttcggctcgccggttgcagggttgatgccgtggcgtttttcggcagtcgaggtctgcaccccgttgatggtgttctggtagttgtcaaagacggagaatgtcattttgcagtgacttacaaagtacctgcgagaaatgagggaagagcgtggagcagtgggagggagactgcctggcgggtgcccccctttaagtatacgactacgactacgactatgccgaccaccattattacgaccattactcgtaccaccaccgcgacgaccacttcaccgggaggagctgagcggggaaaccgcagctgacagccgtcgccgaggctgatcttcagcctgtcgggcatgctaccgcaaatggatactctgcctcagagaatggatatcgtgcctataggaaagtggcattgtactgaggggctgtggcttaatagtggggttcgactcttggtcttgcgctttagaagcatctagctcggcgcactggggcttttccgggtctagcgaggggcacccctggatataattgctcttctgctgtttttgctgttcagaaataggcgattctaactaatttcgctttgcttgtgtcggcggtaacgggtagccctaactggcaagctctggccagttcaatgtccagcagcccaccagaacacgctgccgcggaaatgatttgggcttctgctgtttgagacgggaagctcgttcttcatgtggagacacttgcaggtgccaattcgacgacgtctgtgacgcttgaactggctctcactaaagaaacgccttggcaaagtaggctcgtcccacaccgtagacactcggcaaaacgccgttccgtgaagtcaactttgggaataagattatgcatcaaagggcaccctgctatggggttttctcggcatagatccggctgacctctcatcgcgttgccattatcttacgggctccggtgggggaaatgcgatccaggtattcaagatacaaaatagttattcaagatcacaaaaagcaaatagaagagtagagcaccagatcgtatttggattattacttcgtggtgttgtagggtctctgaaagcaagcgtaagggggtatatcaactatacatgatcaaaccctcatagctagggccctcattttggatgggatatcgaataatcaggataatatgaatactgacgctatatattaccggtaagctatggcaagccaattatgaataagcacaggcttaaagtctccgacggtaagcactaacatgtcgcaaccaggtcaatctatgcggatctctgcagacagtgcggggaagaaaccctacgtcggcaattcgaacaatacaagacaagtcaggtcgctaaagtctgatcagccgcactttttcgcattatatctgcgccttcagatctcggcacaatattcacgatttgcgcgggctatttgtatcgactggggtgcggccaaatacgtacagggtgagacgcaaaccaagtcaaagaatggatttgagcaccaaatcagtatgatgttcaatatgaggttgccatcagagggttcttttctcttatctaaggatgacacattgaggctcgagccatggggacttggaagctagtaatttggatgatcatattgcgccactggcaacaggatgcctatcaggactctgtgatgcactcagagagctctggcagcctattcatttgacccgcttcataaaaatgtagcagaacggcgtcttgtagaacggagacttcggtctaacgtcgggcacttaagagaagaagtagaagagacatttgtagctcaccggaggctcagtaccacctagaataccttgtgaccacttcaaagcaaatagttgcctcatttctggcgaatagttgaattagtttttgtgtcaccctgtagagcacgactgttacagctagacacgtacggcattccgagtgttttggatgttgccagcttggtaggttccttccaagatacggaaacgtgggcgtcttgctacaacgggaaagctagctctcagatctgcagcaatggcaatattaatggggaaggtccatctatgcagcgtgctaccgacagtctccatgtgggatgaatgcacgtatgcatgcacctatgcatgcatagagacctccatacatagattaatccgctggcgaacgcttgcagaaatcaggtacttggttgattggttgctgaaaagtatgtcgtcagttcgcctgctgctttttagcatctagacgcaagagaatattgtcatcagcgagagtcaggattgcttccttctcccttcccgagggacgaaatcatgccagtcttcgtgacccttttgcacctgagcttattcagccatatgccttaaactctggcgccacgacattttgctcctgtatgtgcggaggacagattttgtaagcagttagtaggtgaagttgttactgtgacggacatgaagtacgaccatgctcgcaatctcaataatcgggacatggaatgctgcaagatcattcagtattaccattgcaagcggatcgcagtatcctgcttccgtagcctagtgctatctctggcacagctatcagattatacgagggggtctcatggcctgaatacgaagaggcggaagatctatacgcgtaaatctttgatatctaacgcgcatttagtcaaactgtgcgggaaatcaagatgaccgacgttaacagagaccccaagcatgttgactgaacatcctcgaaaaaagtacaaccgctctgctggcgcttgaaatttggtcctgcgagtttgacggtgtttcgccagaaggagatcgcgatcttactcgactggccgtctttaatggcagcagacgggatattcattccccagcctaattatattctctacgatatgcagctacctaggcggagaaacagttaaacgcaggggtgagcttctctagcctttgccgaaagcagtgctctgtcgcgtatgacctcctgaatggtccctaaagtggtccctaagggttcgctgggtggccgaattatagcttgcttgacaaatctcagctgatgatgacgtctagacaaacccgcggtatttggttaacgcgataacctattggcaattgcaccacgacccatagactgtaccttcgggctagaaatggataccggtgcaatagatactacatatcagcctaggagatctttctgcttctaaccctcgacataatagagttacgcttcaacggttcagaagtgaagtgagtacttcctctcagcctcctagagagaatcccaacaacttagttcaaagggcaggcccccttggcgtcgagagtacaatgtcaagattcctaccaagtcatccatcttttgccacggcagtacaaatatctcaaggccaagctgcgctatcttcgggaagctggacggcctgagctaggaagggtggacatatttggtgcatgtttatcagcgatacatcggtttagcgctgggggttctagctctcattattgtgtactaggctgagtattttaaagagctggagttggtggatatcagttgagctgtctttaatctacgccgcgaggagttcgctgagaacctggacgattatgggcagaagaggctcaacctatccctgggcttttccactgttgtatgcttataatcacacatggcattccaagataaatattgccccagctagaatgataacgtggaagcgtgacgaggttgtggcgttaaaaatagcgactggccgtcctcggtccgaactccctcggcagcaggatccttcaaatctggggaaagcgggcactcagactgggcttggatgaccgaagttcttcattgaaattggcgtagcagcgtcttatgagtcctattgacgttgagttcgcaatatgctatacttccgatccgcctgcaacttcggctcatgaatcctaagcaccccaaggccagatatggtgctacgttccgaatcaggactatataactggcccggtattcaggaaaagaccctgtcttaccccgcaaattctatttctctgactttaaaaactactgggcttgggagctgccacctcctcccgccaagctggttacttgctatctggcgtttcggtggagctaccctgagcttctcatttgcgaaaaaagtaggctttttaagctggaacgtactaagtcagcagatatgacagctttgttccccgcaacatgggctaaggttcggatgtttgagttttgcgtaggatggtgtccaccgtcttcatggtctaggagagccaagggagaaggaatgccgggtaacctgatacgttcgacaagtcgctcttgacggggtatataagaagctggactgtagaagagaaattgcagttcttttttgcagttcttggtcgtggaacttaaataccgcaaaagaaaaacaaggacaatggccgttatggcggagatcaaatcgtcctctgctaggcacgtcgaggataacgaaaagggtgtgctctctccacaggtttcggacagttcacttcaatatgatgaagtcactgtgaagcgcatcaagcgcaagatcgatgtacggctctgcgtcgtggtcgcagtcatgtataccgtctgtcagattgatcgggtgaacctggcgaatgcgtataatccccatatcccccaggttcagcaactgttgatttgatttagggtcgtcgcaggcatgggtgccgagatcgacctcacggggacacactatgtatgcctgctgccctcgtatatgcccctatcaatcacactaaccttgtctcgaacatccagtcgacaatcgtcgccgttttcttccccacctacacggtattccagccggtgatgacggtcattgcgcgcaagctcggcccacgcatattcatggggttcatcaccatgtcctggggcttagtgatggtgggcatgggcctagtcaatgactggcgtgaacttgctagactacgcgtcatcctcggccttttcgaagcaggtctcttccctgccgctgtattcttgattagctcctggtatatacgccatgagacagggaagcgaatcggcctgttttacctgctaggaagcgcgattagttcgtttggaggaattcttgcttacggagtacgtttcccttcttcctaaatagaggctatctggagtctatgctaataaaagcagctgcagcaaatgcacggactccagggccacgcaggctggcgctggatctttatcatcgagggcgttctcaccgtcgcgatagggttagccgggttcgtgcttattgtcgacttccctgaagacgcgcgccgtacgcgctggttctgacggacagggagattgatatcatgattgccgagttgagaaagaccgtggcgacgcacatgaacgcccgtttgtttgaaggagtttctgaagtacggacttcatggca

SEQ ID NO: 3955 - DNA, 4783 bp, Emericella nidulans
tccatcaccaggtctagtcggcattgacggttgtgtgaagaaaggggcctgagcaccataagtcagagtctttgtttgcgggtcgctgtagaaatcaatcgtcttgtctttgttgcctacaacctcgatcggaatagggttctggctataacaaccccatgacggagtttgatcttgatcaaggatgcaaaattttgactggtttttcggcgcggctgggatagcaaaccggcctgttggtataggtggcatgttgtacggagtggcggtaaaaggagttgcgtctgttcgaggcggaactgtcatggtaagaatagtcgtttacggggagtcatttgcctcctctgcggcctttttggcgcccagaatacctccaatagcacccccaatgcttcccccaacaatcatgacaaccgatattaagactaatgtccaaaccgggagtccgcagcatactttcttctgaccccttctctttaacttttcctcagacgccataacacccgtaggtggtggtccatccagggctccacgccgcgttcagtcggttggtctccagcagctaatgctccagcggccattgttccagcagtcaccgtcccagcaaccattgtcctggaagatgcatccgatgtagcagctcctcgatcgctattacggctggtttggtttgagttgatcgggtcatccggaagtgcgacaacagagggttctagcttaggtgaagcgccttcagggtaacgagaatatggtggaagctgctccgtataaccatctggtccgattaagtcgccaacatcatcagcggcacgattgggcggtctttgatacgcttcgtgattgtgtcccggaaatcccagtggaatgatcggatcatctaatccctcctcaaccacaacattttgtgagtacatagcatacggatgctgcggaccatttgagtctatcaaaggcccgtctaccgggcggattgtggaggtagtggccacactgggcgagcgactaacgccgacctgcgggtacatcgcgtatgggtgacttggaccggtggcaccggtatatggactaagggcacgaggggggagtgaaaagcgggacgacgtgctttgactgcgctgcgctgtcgagtggactgttgaatttgatgtgacggagttgcgatacgatagatcaaaccctttttgaggtaagctggaacgttgaactgtatcctgttcgaacgagagacgggcgtcgtcccggaacggattctctagttgctcattgtcattgtcggttgcggatgtatcataaggcttctggtgatggggtaatgatgatcgaagggtatgtgaggacgcaatagatgaaatggacggacttcggggcgttagagtcgattgttccgactccaagggttccaaagagtactcgtctgcgaagacattgggatttgacgagcggccagacgtagattggtcatgcattgaatcaggggcgtgatgcccggatcgagaccgagaagactgcgaataggagcgagaatgatcggaagatagacgcccagacatggcgttatacagccctggcgggcttcccagtcggatcgatcaatcttaccgaaggttcgagtcaatccggcacctaggttggttcgaatcaggctgtcggctccacggcaaaggagtgttggagaatggccgcggaaggtttggaggacaaaagaacggaggggcgaccctggcggcagagcaaagattaggagatgaagttaaatcgggcgagttgagccggagagtcggtagtggaggcgttaaagtgtcgagatggatggtcgtcagtagtgggcgaggaggcagatctgtgatgagagggagggaagaggattgagagggcaatgggggcgggcgcctgaggaatgaggaatgaatcgtcaatttcgggactagcttggttctgttcttggctgagaaaataattcgaccacagtgtatcatttgtccttggaagggggtctactgagtacatcagggagataagagtcccttcagttcgttctcaaggccatggcatcttgttactattcctgtgctattcctgtggccgaagactattttatatcctcagcttaatcatgtctttcttcgcttgtacttggcccgatgatcattagtgatgcaagcgcatgctgcgcctcagtatcctcggcccaaccatgtctcgagcgaaatcataccctgctggtgtgttccggatcatcctcggtggaggatgcataaggctagtgtttctgaagtggcccaaaaaagcgaggacaataaccgaactatcaccgagagtccgcgacagccttctatgtcaccaaacttggtcgttcaattgactgttccccgccggtccttggcatcttaaaaccttcaaccatacggagtacagagctgcagagcagtaatttgtcgaaagcagggttcccgctgttcgcaaccattatccggcaggaattgtatcacccccccaactggacagtcagtctgtcagggacggaattctatccaaactcaaacggagacagaaccgttggacccgggtcactggtggaaccaaagcaggattctgtacttcgtagtttatagattggcgctatgagttctttgtactgtctgatcaaatagcgctactcaacttgaatgtgaaagagccccgttgtctacgaaccattgaggctgactccgcattccgaaaggctcatcgtcgtcatcaaatcgcaaggagcgcagtgaggtcacctgatcggtacttggatgtggacacggtcataatatggtaaaagtaaccgtgctgccagcagcgcattcgactagctcgtccgacattacttgagtcgatatactcaagctatccaacgatattcttcaatgaaagccaagctggcccaaaatcgtcagtctcccgccctaggagtgtcccggatccaagacctcgattatcgagagatttatcccttcgtttcccactggattctcattgcatgacgtgagatccactcgacccaaggcggacctagttcgagaacaagacattgtttcagacgttgtaaccaggtgcatgcacgagctgtcagcgtttctcctatggcatggaaattatgcccaaaaggaggcgctactgcacggggatttctcccagatacgcagataccattttagtctttcgatgatgcaagccttgaggagtgagtgaagttaggttaatagacggcagccactaatgacggcttcacgaaaatctttgacgatgaatgctcgtatattctcttccagttctggcatctcaaatcggtgataatatggcaacggatgtccagagtcttattcaaaattgtcctgaaaccatccagaacgaattcattgcaataatggcaggctggcgccagccacaccaaaactgttacccgcgctcgtactactgcaagctgctcatcaaaagaaatgtcaatgaccttagtgaccacgccaactcaccaattcgtcaggactgcctcttcaaggccagtatgtctgacagcctcacagctcctttctctccccatccttctattccactttgaacggacggtctcacacggacataccatgaccaagcacgcctatccaggtcctctgcgctcagcgtggaagcccatgattgacacaccatatcgatagaccgtaggagatgacttaagcaggcttctctttctgtctcgatctttgttacgctctttctctttgatgatgctgactctccttgatctttatcaggtgatttcatgaacgatttgagaagatatgagcgtgctgcgtctggattgtgtattggaagcgccttgcttgtattcgcagctgtctcaggcggatatgattcaccacgttttaacgccagaacatcaataccccaaagcgatggcctgggctccgagtcgtccgtaagacattgccctaatatgtcatcagaagtggcctccgcgccctgagattcctgcgagggtcgaccctctcgaggattgtagtcccaccgttttaacaccttgatttccctgcccaagaccgaaatagtgggcagaccgtcgccccatccttcctgctcagcaggtttgtcgctttcaagacccaagctgatggcttttgagcggctattggcgctaacaacagcttgggccaggctaagcctacttgatattggctgctcaggcattgtgtacttcagaacacagacagcaaaggcaagcactagtggtgctctatttgtgatgagcacgacatctgagagctcttcttcgctggctgttgagaccggaagagccagtgcactttccactgtaaatggagtatccgtagaactttgtaatgacgatttaagcttcttttgaggcgatccaatctttgtttcttgaggagcgtaccgtttttggagctttttttgacatttaaacactgttggccatcttgcttcttggaaacctccggaagggtgggccctctctgtttatcttcgggtggaacaagaaggttcaatatatcctaactgttaatactccttggaatcccttcatactatacttttcccggtgtctaagctcttgttttgggagaaaaaggtactcctattcctcctttatcttttcagtaatatatttcttttttatttaattgttaattttatcctatcttcttttcttttatcagcattttctttattttttattctttatatattaatattctttatttatttatttttttaatatattatccatcacaccttc

SEQ ID NO: 3956 - DNA, 1400 bp, Emericella nidulans
gatatccaatggacataaggaggagacgcatggtgtctgagaggctagcggaaggacgctactgctgtaatcactctccagctgagaatgtccgctgctcgttggttggtgaagaggcgctaaggcggcttgtcctattcgatggcgccaaatgccagttaattatagccaacttcgactcaattaggttcaattagcattgttttacaaagtaaatatcgctgaatatagaagcaattcaccgatcttggcagatccttgcatatgaatagagcgttgtgattgctcctcaatgcatattgaagtgtgatggggttcctcgccatgctcctctccactttacgctcttgtcacacttggggccgtcagtttcgaacctcaaataccaatggatttcccgccctttgaatccttcctcaaggcttgaagaccgctctttgactcttcaccagtcacattaggtgtcatgaggtggacgcaccataccattgtgctggtgccttgttcgttgtctcatcaatatcccacgcaagccatagtaataaccgtcgtgccatgcttacatttgttgggacggtcaagtgctgaggatgtcacattctcaccttcaccaggtaggcttccgaatactacacaatcccattgggacgatcataactggcagcgtcaggcttcgtgagagccagactttgttggcaatgtcgctggccgttcgtcaacatatccttgtcctgaccgttgtacaagactcgtcgggatctggagcgcccacgaagtaatttctagtgacctcggttcagtacttgacactgcaggactacaaatattgcttcccagataccggcgctatccgaagcccgttgtctggattctcgctattatctcaagaatgacctcaatgcgattggttccaggttatggtttcattcccaaataataccgcaccgaagcgcatcctcatgatattagcatcgcctcaatcgcacaatggaaacgtggcttgtgtaactcttgactcgatagctccggcttctgacatcgcactcatatccccggtagagaaatcgagcccaaaccttctggctcttccatattgccgctcatcctcaacacccattgtagacatttccctgtcagtattcaattataacggtggggaaatcctctccattttactattatatgtgctggcgctcgcctaggaaaaaaaaataaccatgctctaggcccatgataggcaatacactgcgcgagacaagatcgaaggctggttattatgtacctgcacctggatcaatttcccggtcttggaacagccatacttaaattgtcccagagcccaaatcttccaggtaccctacgggtctaagcatgttcctgcggctcccatccatgggcga

SEQ ID NO: 3957 - DNA, 5192 bp, Emericella nidulans
tgtaaacttcttaaaagaaaataccaatgaccacccgaagaaataacaccgggtgactagcaaaatatgactctagtaggtattaagggaaatgaacaaaacaattttaacccaagatatcccgcggactgataaatcaaacccccatttgtagagtcaacctccaagaacatccactcgcaagttgaaagaaatcccgggtttaaaacccccagctttgaacggccaaccgaacagcacggctgcaaatctcggattgtagcaggtaaatcctacctgatttgatgttttaaccggcaagttcacccgcccaagctggccaaaaggtggtcaacatcctggccacgcaagccgtccgaccaacggtatgttatgtgttcaagatgctctcttggcccaatgcccagaccatcagcagtgaagggactggaagaccccggcgctaacaataacctctctggaagccatcagagtctttgatataccaaagctgttgacttctacgccgattgcattcttgttttcgtcgaacagtatccgtttcgccatcgtcttctgatagatgttagggttcaaagtcgaaagccctggcaggaaagaggattcggaggtactgcgagactggtcttgcggccggatcgtcgacgtgcaataatggtagccattcaattcgccgctgttaaaggccgatgtctgatgcaggccaatggccttcatgccgcgggcgacccacgtagagaacggctgcacaaagtccgcaaaggagacttgaagtggcccaccggcagggtcaaacgcgctgctgttgtacagcgccgtcgcattcgccagcctctggacatgatccggtggagtaaaggccacgctacgttggtagtatgggaagatattgtcgaaagcgtaactgaggtcatcaacggcctcggcccacgtatctagcgcctctttggtcggtctgcatggtgttattcgggctcttgacatggatggaaagcctaccgctggtaaaccatgaagttcagcgccgacctagttcgtcagcttaactgcccaagcaagaatgcccaactagggctactcacgatcccccgagacacttcccgcgggcaaagtgtacgcgcctcccattgacccctttctaaggcgtggtgacgaaaccccagtcggccttgcaactggtatcagggtctgatccgactggcaggacatcggcgccaggtgtctttgcaaacggatagctgatctcgtagtatgtgccggcctcgacaattgcgacagaatgcgattgcgccagacggaccgcgagtggtataccggacgtgccgccgccaacgatgatgtagtcgtacgtcttgcacagagccctcaacgccagtaagagaacgataggtaaaaatgagcataacattgcgaggttaaggaataaggaaacaagggttagtggacaccaaaggactatccaggtgtcgtgcaatgatcttttgagtgatgaaatgtatcccgaacaaggcagcaacgaccacgtccagtattagcgctttctactgtttaccggtctcattattaagtaaatacaataccagaaagccgtgtcatagaggctagatgctaggaaacggggttgtgaatatggtctaaatacagatatccctcctctgctccacaaaccattgatgccttagcacatccttcgtcgtgaacctcttttcgacttcaaactcgagcaggcctcttaacaactgcttcgttatgttaatttcctctggcgagagcccctctccaaccgcttcttcgagcagttcttccaatgtatgcgaggtcggccttccggttatatcaaagtcacggtctcgtctccgaataaaatggtcgattggctcgccattagatctgaaaaatctccgccagtttggccagtgttggttccgcaatgcctcatcttttggaaacccgaggatgttgtacatgtcgataaagtgcatgtcgtccgttatacccgtcacagggtgatcgctaaggtcgaacaacgcgaacccggtgatgaactcaaaaataaggcacccaaagctccacatatcctgattagcagagatacaacgttgaaagagcgtctctggaccacggaggtgaaggggcggcgacggtgctgagggcgggtgggaagtgaggaaggctgtagggtcagctcctatcttttctggagggaggtgggcacgtacagccgcctagatcagacactttgacggtaaatggctttgaaatattgaggtactgcatcaacgagtgcgctggaacaaggtactccggccccttcacaccccccttcagctcagtgtcgacgcagagagtaatggatttgtccttatcctgcaccagctgatcctctggtacgtccttaaggtcttctagggtaaacagcaggttccttggttgtacatcgccatggacgacaccattggctagcaggaaatctagccctaagagcgtctgccagaggatggccttggccatctgaaacggaaacggaccgttagggaacagagcctccttcacctcggtgacgctggcgctcataggctcataaacaagagcttgatgcgtaccatttggaccagtgtaccgaaattgatccagcaagggaagatagtggtcacggccaggatgtgatggaaacttggtcttcgccaacagctgatatattcgagtctcctcaattggtgcactcgagctttgatcctcagcttgaccgacttttaatgcaacatagcggccaagtctggagccttagctattgccgataccatggcatatgtgttgaccgtgtgacttacttcgtgtctctcgccaaccacaccgtcgagaaggacccgtagcccagttttcggataaccctataccggctatccttgaaagtgtccatcaaatgcacaggatgaaagcggcgcgttgagtaataagccagcggctcgattatcctttcaacaagttggagcttggtaccggggttggaatcaggaccgatactggaaagtgactcgctgaaggattggctgcgactacgactgagactgggactttcgctggaaaagccacacgatattgttgagctactatccatgatgatgcagggtctcacgtttctattcgatttcctggtcgaagatgctagaaggtgcaagttaagtagcggtgcaaatgagctcctactaactgctgctgaaccgggctcgtgcctgatggcgggggttagttagataagcactggcctgcagtgtcctcctcgtcaagcgcgcttggctgcaaaattccatgcatgcatgcatgagctaagaatgtatggtgagatcgattcgcaggaagacacatgtcagtactgcaggtgggcagcagttcattggctgggtgactcaggagactgtatctcacttcctattgcttggaacgcgcgctgacagtccacttgtggggattgagagctccatccctgttctatacgggtgatttactccgcaaggaacgggtgacgtgtgtagtgctaggtaagttgtagtccccaaggcttgacgggtagacgcgtggggtgtggtgcagagtcgccttactagactagggcaatagatggctatgtgtggtcctcaaatgttaggtctagtacttgacctccacttcattatatgcaacccctcataacatggagagggaaaggagaatcttacacagaacctctcggctgagccctaaccaacgcctcgaaaacctcctccatatccccagccccgtcaacaacctgctctcccactctgcccccaactccaatgcacaaacacggcacccctttgacccctctctttctggcttttctctctgccgtctcgatctcctcttttcctccatccccctccaaatactccctcacaaggtccccgtccattccggccttctctgcagcttccacgacagtgtgcatttgactaacgtccttttcgagctcgaactggtattggaacagagtatccgctaccgtgcactgcatctgactccctcccttgtcaagagcgaggtggagagcccgatgcgcaagtcgtgacgagcctatgtacccaccgaatttgaacgagatgcctacggtgctgccgatgcgcttgagacgcttctgcgcagcttcgatttgggagcgcgtcatgcggcgggccatgcggtctattcccctttcatcagttttgacgtatcgatatgtggcttatgagggaggcgtgcgaaccgttgatgagaacgcttgtctcaggtgcaacctgatcaataaagtaaggtttccactcaatgacgaactcattttctgaaccgccggggtatgtctttttgtacagagctattgccttctgaagagtgcgatagccgatgaagcactttttgtgattagatagggctgattgacttgtgaaacgagggaagacctcaggagctatagatgcccacttacccaaggacagataacgtcagatatgatttctattgagataacggccattgctatttaacataagaattggacttgacaattgagccggtaagagtgttggtcccttgggggtttatagcattggcaaatgtgggtgcctggcctgggacagtcggtaagctggcggagttccgcagcgatcagcatgatcttaaggcgcgtctttattggcctttcttgatccatttatgcttcagctggaacagcatatgcctcaaaagagggggaattgatagtaaacgtggcgcggaccaaggttctcgaggggtatcccccagagtgagagtaaataggattccatagaagacaggcctataagatacagttaaatcctggatacaaccaatgagaaacactatacaaacaccgaaatctaaccctagaacttgatgttagcattctgactacccatcctcctcccctccacatatacaacaaactgcaccgtcgccccgctcggcaccatctccagatcaaacgacatctttttcatccaactgcccgtttctgcggaccggaagtcttccaggctctcaaaaggcacgtcaagtgtacagtcgattttgcaatgacgtaccacgctcttttccagtcgcgtgggcgggtcgtgatcctcgcattcgtacaattccacgctgaattgaggacctgggtctttgcgatagagccggta

SEQ ID NO: 3958 - DNA, 427 bp, Emericella nidulans
  unsure (1)..(427): unsure at all n locations
ggtgccttcaaaacacaggggggggaataaatcgacaagtctgcacacgagcgccgtgtccaccatgactacctcacttaccattgggaacacttaataataactgggcgtctatcggacgatgcccccggtcggcgtaccactctcctcattctccaaagcccacacgatccgacacggaggtgcagtatctttggagctataatatggccccgagactatatgtcacttgacaagaactatacgccanggacgaaactatcctatccgatgcctgctctcacgtttaccttcagaacactacagtaagacgattaccatggattgtccacatgcgtcctatatctgtgcttgtgactgtatataactattggccgacatattgccgtactcaaaccgcgtactgatgagggaacgagtcccacat

SEQ ID NO: 3959 - DNA, 1539 bp, Emericella nidulans
cccatgtgaagtataaagcttagtcatttgcttaatgcagcttatgcactttttggccagcgcgttcgcgtcgcgtcgtcgatcccagtgcaattcgaatgttaacttcagtctaccctattaatgatatagcggattcttagatgacagattcatctccaataaacctctcctccttcgatcccgctctcctacactcccaagaccccgacctcccctccgaatccttctccgacgagctcgaagcgctcaatgcagtgcgattagaaaagacgcgcaacaaagtcgtgatccagcaccgagcctggaacctgtctgatgttttccgcagcgacgaggacgtgagaccgggtgcgctatctttgcctactgcagaagaccggctttttcaaagaatcgtttctcatactgtacttctgcagatacccccacaagaccatcgaagaaccctcgatttagcagcgtgctttctccaatccgtgaacaggcgttcccgtcctcacctccaacacccaaaatgccgtttatctcttctgctgagctctcttcgagagcgactcctccagacttgcagaaacggaagtatggcgagcagtcgcagccgtcagagccaaagcggcagaagatcatgggcgggtttttggatgacgatgacgatgacgaccacgacggattagaggctttcaatgaggcgcaatatcagagcgagtttgagattcaggaacagcgtgtcgaccttcctcagatttctcaatctgggtcgagagcagagccgaagcggccgaagattatgggcgggtttctggacaatgacgatgacgatgatgacggattagaggctttcaacgatgcgcatctcgagagccagatcgacacacaagagcaacctgtcaagcttaccgaggtctcgcggtcccagagtactctagagtcggtagttattaactctgtaaccgagcgcagcacaatagttccagcatacgcgccgccaaatatatcacctacctcagtgaagataaagacctgcaatgggaaggcgctgaatgtcccactcaaaaaacccagcgctcgagtttcttatgaaagactcattgctagccgctcgacgactgctcctggaagggcacagaagagttattacggaatcgatatacacagtctacttaacgagtctgcgaaagaggtcaaagctgctgaagcccccaaacccgcccctgtagcggatgtacggccatccattgaagctcctattggcgacaagagaagcaaaaagctctctacagccatgtggactgagaagtaccgtgctcgcaagtataccgagctcattggggatgaacgcaccaatcgttcaatcttacgctggcttagaggatgggatcctattgtctaccccagccttgcccgggctaaacagaacaaaaagtataacaacgacgaagaggaacggcctcatcggaaagttctattactctgtggcccacctggactgggcaaaacgactctggcccatgtctgtgcaagacaggctggttacga

SEQ ID NO: 3960 - DNA, 3735 bp, Emericella nidulans
agtcaatgttaatggtgtcccgtttgttcgagtaacgttttgtatattaggttaagtcgggtatatccaaaagttgaaatagaggctacgttgcgtgccgacgcttatgaagaagaaagtttcattctcgctattgtgctttttgtgtagataaccttcaatgacagttgcccatattttacagttcatcatgatcagccttctttgcagcttcatccgtcgtaaccacaatgccctctgggagcttgtttcgaggcccttcgcccagccgaatggcatcaatccatgcttctacccgtactggactaaaatctgcacgatccgaagagtcgtacagtctccaccaaccccttcgggcgttcaaagcaacgatctcgacagacttcgaatcctcaggcaagccaagtccagctctaagagccttggccgcggcattcgacgcagggacgctatacagcgggaaaagcttggttttcctctgagtatgtttatgcgcaacctccgctagactctcaagtgcctctttggtggaagcgctggcctcggtgtcagggtcaccagactctggtatgagagcaaggacacaagtgccagacttgggtgctaggcaaactgcttctagagcatcgggggttccgagggtgtcgatagcgggcgggggagtaggcgttggggcggaatgtttagcttctatagtagaatcctcagagcccaaaggttcatttgatgttggttcctttccggacgcgctcgactttgaagagtggctctttgttttctcagtagcgggagcaggatcagcattaggagcagctgcttgactgaaaaactcgacgattggaccctttttaagttcaccgttgtaaacaatatgttcttttccgtttccaggaagcaaaactaggcttggaaactccgcaataccaaacctgtctacggcagcggtttccttgtcgcggatttgggcgactttaatgctacccagaaagtcgatcgcgagggcgcggatcaaagagcttgttgtgcctttctcagtgaaaaggatggccttcggtgtttccccgtcctcagaaagccactcatccaagttcttatccgtgatcctctttacatggttcgggatcctctccgctaccgcgtcgacaattgctttggcggtcctaggcccttggtaatcctcaactctgggttttccaggttttttggacggcgtcacaatcttcagcgtcgggaagccttgaactcccatctgcccacagaatggtttattcgcatcgtcgtcgcagttgacggccgcaaccttggccaaaccgtccaggttcttcgcggctttctcgtaggcaggtttcaagttctggcaatggccgcaccagggcgcataaaacctatagagttcggagcattcaggaaacgctcgtagcacgtctgcgaggtatgggggcttactcaacgatctgatcctgtgttagcttgaattcgaggtacttgagggccgaatggtaccacgtacggaggtgtagtttgaattagcaatgagttggttgtaactcttctgattgacctgaagaacgggggatttcttagtataaagtccgtccgcattaactggcagagctgccagaagcgacgcgacgaggagaagcgcagaactcggctgcagcatagtgttagtgtgggattactacctggctaattgtacgatatggacgagcaagtcaatggtcatagattaaacatgtcagagaggacaagagttgtatttgagctatggcaggacagggctggaggaattaaagcaaggtgtcctcagtcctgacgctcgtgagtcttggcatgtcacggttgccaactccgcccccgcagtttacgatatctcactatatctcccgcatgtattcactttttatatttcactttctggaccatcacttcgttgggttcactgcccacggactcggatgagttgtcaacagatgctccgtgatcttgctacaaaagctacgagtctaggaatcccctacccgcaattgccatgcaaatagtcacgatgccagactcacagacttcccatggcttggaccttcctctgttgcctcatgagctcttctgtatggtcctagactacctcgatcctagtgaaatagttcgttgcagacgagtctcgcggttatggaatgaggctttcggagatccggcaatcttgataccactgctgaagaagctgtttccactggcagaggaagtcagagaactctatggccgtcatggcctgttggaggactcaaaaaatagcgaaaattggcgcttacttttcgatcggatcgcctcgaggtatgaccacctcactcgtgggaagcccagatcaattcggaggcttaggctgtgtgaggaattcggtatatccggcgaaagagaatggtttcaggtacaaccttgggacatccatgccagtcatctaatgcagcgggtagatctgcctttctcggagtctttttggtcgtatgatgagggtctgttggtctacccaagcgccgaccatgcctgcttagtccttatggaccttgatagcggcagggagtttatggtgccattcattatcacgggaaaggtaatccgaagagtcagactacagaggcaggtcctggttgttgaatgggcggacggaaagccttccattggttgaatgacagcgacggtgtccatcgtcattttgcttcttctttcgacgtgcgcaaggagtccagccgctggagtataacctttcgcaatgagtggaagatcatgtttctcgggcatccactcagcgaaagagaccgcttctactcgacacatagtcagacccattatgccatctacatctggcagcccaatcgcagtctgtacactgcggatgaggatgctccgatagaatcattgtcgatatgggatatatctaaaccgtcctcatatagaccctcactagacccaactggccgcttgcgggtagatggtgaagagtcaggcccctctattgtgtcacgatttggtttcagagagctaggattctactccgtcagacaacgaggtctcccaggcatacagtggctgaatattacggaagacaatcaatcaatagagatttttgagaacttatgcacaggccccgtggatcggtttgttggacccgctgaatggacgtcgcaagtccaggtgacgagcatcccggtcaatggttacggaccctgctataggcaaaacctcgaccttatactcccaccgtatcgagggaacagcagcttgcaggcaagtcccctcactctcaaggtctgtgaagagccatggtatactaccatctcagagtcatgggatggaaaagcccaagtaggcttttgtcttcatctatcccaggccacatggccatttgacttgaaagcttcattgagtattcggaccccatcgtcagcggttactctgaagcacgccgatgtgtttgagcttacgggcaagggaaagatatgcggaaccgaacgttacctcctgggcgagaacggaaaccgcgaactgctcatttaccggttcgataagtaagccctgcatatagccggcgagtttggggttccttcaagatagtggtatattcgggacacgttcagagtacgctcgcctaaaacaagcttatggctttttaattctctcgatagaggttgacactacgacctgcatggccgcggcgccaaaatgaccaccttgctgtct

SEQ ID NO: 3961 - DNA, 3640 bp, Emericella nidulans
tcaagttgtccggtgatcgaccacaaaacgggcaacctggttgcagtgaagattatccgcaacaagaaaagggttccaccaacaagctctaattgaggtcaaccttcttcagaagctcaaagagtgggatccgcatcgccgtcataacgtggtcaatttcacgcagagtttctactttcggggacatctgtgcatctcaactgaactgctgggtatcaacctgtacgagtttatcaaggcgcacgatttcagggggtttggtatcaagctgatccgtcgattcacgaggcaaatacttaataccctcacgcttttgcaggcgaagaaggttattcattgtgaccttaaacctgagaacattctccttgtccatcctctcagttcggagatccgggtcatcgactttgggtccagctgtttcgagaacgaaaaggtatacacgtacatccagagtcgcttctaccggtctcctgaggttatccttggtatgtcttacggcatgccaatcgacatgtggagtttgggatgcatattggcggagctttacaccggctatcccatcttccccggcgaaaacgaacaagagcagcttgcctgcatcatggaggtctttgggccgccggagaagcacttgattgagaagagcactcggaggaagctcttctttgattctctcggcaagccgagaattacagtatcgtccaaggggcggaggcgacgccctagctcaaaagagctccggcaggttttgaagtgtgacgatgaggcatttttggacttcatctcccgttgccttcgatgggatcctcaacgccgtttaactcccagcgaagctctacgacatgaattcatgacgggtcacagaatggcgcccaggccgagaccctttggaagccagtccccaggaaagcgggcgaatactttgtccacgccgacaacgggtcgacctctcccagaaccgcccggcacaagtctcaaaaatggcgccgttgtccgcagccgcgacccttcgaatccgtcgccaataaaagcgacagctggcaagcgtcactcgactgtcagcggattgcctccgtcaacgcccgccaagcgagggataaatctaacgactacaccagggtccgcattgcctcgtgcttctgcgagaagcatcagcgggaagcctgaccttgcgacagcggcggcggcgacaagcttggtaggtagaccggctgatgcaccagtctgaactcaaccccaagcgacatggctaactcaagatagaagcccaaatgatgagtggtcttgtgttttttttcttttatcctgtttccttcacttcttgcatatctgtaataatactctgtttgatcattcagttgcatagcaggccggggacgcttgtggatttgattcgattcttacgacttatattgactgctggttcaacaagccagtggatgaggcaggacacttcttcttataccctcacttgaacattgcatgtctgccatgatttgatctcagttattcgttatttcttttctctctctctctttttttttgcgcctttctttcgttacctcgtgaatagtgtgtttattgttacgacggtgggagccgagttgacacaacgcatgtccgctacctacaccttgcatgcatttctacccctgactttatcttgcgttatttaatctttttatgacggccgagcgatcttatattccacttggaaagaggacacattgtccttggggccgtctgtatatctttcaggcgtctgatcgccgcagtgctgtatttgcagggatggatggacatgttatgattagaagaataggtacaaataagaacaacgaatagatacgattaatctgaattttttattgtttggtattgaacaaagagtaactttggcaaaggacatacttcgtaggtcctccgtatattgatgcggagtactggtgtttcgggatacttggcctcatttctcaccttcaccctttgcagcccctcgtaactcacgactccaccgatcattcttccgattaggacctgttattagcatctgtctattcaatgccacatcctatgccctgaacattcgattgactgcagtcccgacgccgatcgtcatgaacgggttcgcagcacacggcctcgacgaagacgcatttgcggagaagtccggcctaacgggcggcctccgaacttttgatgccttccgtgagttcctaactctgccaattgaagatgacctaccatcgcatttggatataatgcgcccagtcgatatatactaatgaggaacggtcaacagccaaaacaaaaccctcatataccaccccctcgcgccgcggcggtcaatggaccgtcctaatcctcataatctgcaccatcttctcaataaccgaatttcgcacatggctcaagggccatgagacgcaccatttcaccgtcgagaagggcgtctcgcacgatctccagctgaactttgacgccgtaatacatatgccttgcgacgcactgcatataaatatccaagatgccgccggggaccgcgtgctcgcgtcggaaatgttgaagaaggagccgacaagctggaaactctggatggataagcgcaattatcacagcagcgagtaccagacgctcagtgactccaggggagacgaagaaagggtcgcggcaatggaggaggacgtccatgcaggccatgtgcttaacgagctgaggcgcaacgggaagcggaagtttgcaaaagggcctaagcttcgacgaggcgatgtcgtggactcatgtcggatttatggcagtctggaggaaataaagtccaaggggactttcatatcacggcgcgcgggcatggatatcgggatgggagagagcatttggatcattcgggtgcgtatatttcactccctttttctggtccacggtttgaaacatgggtatagtgatgctaattgatggcgtgcaaagcattcaacttctcccatattatcacagaactctcattcggcccacattacccatccttgcacaaccccctcgacaaaacgatcgcaaccaccgaatttcactactacaaataccagtacttcctttccattgtgccaacaatctactcgcgcaaccaaaatctgcggcttgacgctctgccgtcttcctcgtccgcacggagcaacaaaaacctcatcttcacgaaccagtacgccgcaacatcacagtccgatgccatcccagaatccccctacgtgatcccgggcatctttttcaagtacaatatcgagccgataatgctgctcattagtgaagagcgcacgggtttcttgaatctgcttattcgcattgtgaatacggtttcgggcgtgcttgtcacgggaggttgggtttatcagattatgacctggcttggggagttaagaaggaggaggaggggtggggagaagagcgaaggatatttgcatgggaagttggaggaggagtagatcttttcgctgcattggtttaggtgcatagtttgattgtttgtttctatcgacatatatagctttgggctcatgttagaattgatttcttttatatcctagcagagtgtccggttgagctttagctgatacagacagaatacgtagcgttgatggagcgctgagta

SEQ ID NO: 3962 - DNA, 5163 bp, Emericella nidulans
cgcaccagaatatgaaatcaaagaatggaacattacttctaagaatggatcctagttcggatcctgacccatcgcgggacggaaaacgcatgcatctgcttgggataagccgacattcattgtggagtaacttgcgaagaagggtcccaagttgtgatatacaaacgaagcgggtgtcgaaggttgtcgcgaacgagcatggaagcaatgtggtttactttgcgaacgggagtccgcctgttgaggcagacctggtcattggtgccgatggagttaaagggatcacgaaacaggccttgttccccaaccagcagatatgcaagcccgaataccagtgagtgagaaccccaaaatttgtgtgtattgctgacgctccaggggccttgttggtgttggcggctttatctctacgaaagaagtacaaggtctggtcgaaaagggctcgatgaacctggtctttggcggcaatgggttcttcgggtacttttactcaaacagcgcctcgtccgcacagcagatgggctcagcatacgacatttccgagcctggagagaccttggcatggtggtcaacatacgccgtcgacgaatgtcccgaccctaagtccctggacatggacgccgtggcaaaacaactacgcgagagacatgcgcagtggaaagacccggtcattcagaagattctgccttcgttacaggttaggagcatgtacccaacatggacgacccctcaacttcccacgtgggagaaaaacggcgttgtcctaattggcgacgcagcgcatgccctcccatctacatcaggccaaggctcctcgcaggccctggaagatgctgaggcgtttgccgtactgcttagccatactctccgtggtgtatataagaaggactctgcagacgctatcacaaaaaaggaggccatcacgacggctgcgaagcagtatgaggcgattcgctacccccgagtgcaggagattttagaaaatgcacagcggatgcagaatagcaagcgggatatgggccctatagctgagtatattctgtattgtggactgtggatcgcaggcacgtcaatctatacagctggcttctgcttgctaacatttctaggatgtttcccgaatatattgtcgcgtttccagaagaaggtgattaattacaatattgccgaggatgtgaaggcctttattggacgacaggaatgatgttttccttgactggatttattaaagcgtcatattcttaatgggatttgagggattccaagacccgtagatacagaaacttagcaattacccaattgagggtcgtgctaagcttttatactcactctgtaggctctgctaagcctgaagatccacctgccatcgacaaggttgtctcgtccgagtccgacaagctcggagttaacagtatcggtgcggacagaatttcttgctttcctcgaccgctgaggtcactctcttatcaatccagcttgtacgatccagcaatctcagaaggaaatccctcccatgtcgttccctccagcataaccgagaatcaaagtaacccacgtctgatatgaccatgtgtcccaccatcaatcgggttcccggtctcaccgagtaactctaacgagtcaggattcttctagacgggccagaaatgggttgtatccgtgtgagcccactttaactgggtttccagtggtttatgagccattgcgctccatgaaggtgtggattatcaatcaatcggcacgaacaccatcgtatctccgagctcaggtatgaaaactctggcttccttttcgtttctgaataaaattcacagctaatggccagcaactgactccgccatgcagtcatacctccagtaccgccgcatcggccaggccgttcgtaaacagctatccgagcatccagaatggacactcaacgcacagcaacgaagagatgacctcactacatcgatccagaacaatggagtagctgatgacaaaccatcaagcttgcgaccactttccctcccaccaggcgtcaagcaaaaggagatcatcgacgccaatggggtctcaaggaccgtccttgtcgtgggctgggagagccatcaggaccccacaaacccgcacaattatagcctggcgacccgtattaccgctacgttgatagtatcagcactaggatttgccgttggtgcggcgtcgtcgatagagtcagccgtcctgcctcagaacagcgcagcacttggtgtcagtgaagtggttgcttcgctagcaactggaatataccttctcggtttcgctgcgggctctctggtgtctgggcctttgtcagaaatcgtgggccgcaatgctgtctatctcgcctcgcttactcttttcatgatcttcatcatggcaagtggccttgctcctaacatcggcgcgcaactggccttccgttttcttgccggtgtctttggctgtccacctcttacctgcgccggtggcacaattgctgacttatggaacccgctggagaaaaccctcacatttcctttatatgctattacttctttcggcggccctgttttggggccacttatagcctcctatatgggccagggcacgctttcttggcgatggacgaattggatcatgctgatcatgtctggcctcgttatggcgctgatcgtcctgttgcaaccagagacctacgggcctctcttgctgaaatggaaagctaagcactaccgcaaacttaccggcgacaatcgctaccgatctgagatggatatgcaaaagattgcgctcttttcgcgcattaccaatgcctgtatacgccagtttacgcttaccgtccacgaacccatcattctgttcatcgcgctctacatgactgtgatatacatcgtgttgtttacattctttgacggttacccgttcatcttcgaagaggtctacggggtaagtcaggggattacgaatgtcatttggattgcgatgtatgtaggtattgcactggcctcgttatgggtgcctgttgtctattcgtggaccaagaaggagtttgctgccgtcagtacctgtcccatgacggaaggctctttggaaggcaatgcgactgagactgagggttcaagctccgacgacgaaagcagcaggaaatctcaccccacccgacctgaaaatagactttggtttgcaatgcttggtgctccattgattccaattggtttattctggatgggttggactgactatgtaagaaccaacccaccaactttagagtttgcacgtactaaccagcctttgcgagaaatcaatctcaatctggtccccattatcgcctcggccatcttcggcttcggaactatcaccgtcttcatatcgagctacatgtatgtcatcgactcatacgacacgtatgctgcatctgcactggggtttatgacggtgtgacggtgctgcgcagccggtggaatgactgttgccgggattccgttctactcgaacatgggcgttcattacacgttgacgattctggcatgcatcagtgtggcaatgacaccgcttccgtatgtgttttggaagtttgggcatattatcagggggtggtctaagtttgctgttaatgcctagagaaatagaaaaagaagagatataggctatgtaatacgtcggttgtagccgactttagcaagatagactagacataaaatgaatattggcaaacgaatactgagtatgcagttgcaatattagcggtaaacttgaatagcaaaactaaactggctactgccaaaccagtggttgtcttgaggtcctggtcgataaatctagacattacctaacaccgcaggcgcagttaaaactttggcttccccggcgacgaacagtaacaataccgacttccataatcagcatcggaagtcaatcgaaagaccaaaataattatcaatagcttactaaatttgacggagcatagtgcatcgtaccccagtatctttcaaagcatcgtggcctgaggcataagtaaagacaagttagtagcttacataattgccatacaatgcgccgcaacattttactgcaatccgcaaagccgcagttaaacaattcacatcccattctcagttctcaaaatgcacgctacacgagttctcctagctcgctctgtgtggaagggtacgtttcctattctccggcatctgccaccatactgtaccaggtccaactaacagtcccgattctcgactccaggcccgaacatcgttccgtacgcataccgagcacccaacgtggccaatcccaccaaccataaataatgaaagctaatgacttcatggaacagccttcccctccctcgtcagtcccgccccccccggcacgcccccgatcaagacgcagaaacgggccgcgacgatcctaccgaacttcgtgggcctgcgcttctccgtgcacaacggcaagacgtatcaggatgtgttgataacagatgagatggttgggaggaagttgggggagttcgtgccgtatgtttcttcctatcttatccgttcttgtgctgggctggggttgagatgtatttggatacggaccgacgccttggtggaatctgatgcttttagtggattacgaactgttaaagttagggatatggaagatgactagctgacttgactgtctggtataggacgcggaagaggttcacatacaagcactcgaagaacaggtgatcgggcttattttcgtggaagcgatcaatgggtgaattggatgggtgtcttatttggttttggctggggttttcttactttactagcggtttgcaacattgtctgtcccgtccgtgagccttgaggagggagtgtataactatctgcatatctttatattgggttttgtcaatacatgccacatttcgaagctcctgatttgtcaagcaatgcgcatttacagtttgtagctgttgtatatgtaagatggattgtctaggactgttgacaaagattatgaactttgaccagtggctgcggtcaactttgcaccgactaattggcaaggtaactgaagtccgtaagcaagcagtatgtcacgggcttgcctttaaaaatctcaggagttcatcatgaagcgaaagacttggcttgttggctgtccatacagatctcaatcctatatggagatatgttgacccat

SEQ ID NO: 3963 - DNA, 1832 bp, Emericella nidulans
tgatagatggcctatcagcgagcgtgctcctgctctggctctgcaaactattgcttctgaagacccaactcactctttttaaagaaggtttgccgctagcaagaggcgtgcaaatccttatctactgatttgagttattaactacggcggggtttgagtcttcattgcccaggctatttcatatcatgggcgtgacatctattgaagagctcaataccttgctaaatctgcattcgtaaccctccatgcaacaatggatactgcccttcttagaatatcatatggagttcctatttggtgggggtatactgcgagatatgcagtggtgctctcggccctcgtaactctccttggcagtcaaccttcatattcatggtatactagcgccagccacccgtcacggccctgttctcactctgacacgatgcacattgcggagcaaataccatctaattggctcgcatcaacgggcgtcaaccgctcgtccggaagtaactgttcgatgcagctattttccgtttaccctgtccactataagggattggatgattgttcttactgttaccaatggaactcactttcacataaggccgttacctttagtggtcaatttcagtttgtagtcacgggcctcgcggctagttctcatatttagtgcgatagacaggtctgcagagagaaaagccctattccggcaagcagagtttggctctaattgtagaaggcgaagttcttgagataaaaccacctggttacgatatacacagtacaagtgccgcctctttagtagtaaccatagtttgagcggtcgataagtgacttttcgcttttatttctagttccactaccggcataatgctttcagacgggatattatatatttcaccaaaccagcaacgatcttctgatagggatatcccgtctttatgccattgtacagtatccgcaatatattatattctggtaggggaaccaaccacagagctcaagctttccagctcaacgcgcgaaacgctaagatatgcagcagaataaaaaccacatgtaatcactgtccaaatgattattgaattcctcaaccagagagtattaaccctccttaagagctgagttctgagttatataccggctgtcatgatcattttcaagtcattgtgatcacgtgccttgggcctgaaagtgcaggcacctattcccgattttgaaatttcgcccttttattagttgctcctaaaaggttaaaacagttcactaacgaaggcggatcttaatatacccaaatctgcagagatctagactaggccagggccgtaatcaacattaagctaaaacactagcaccccaggattacgtaccccccagtttacgactcgtcgccttacgcaactccacctcggaaataccatcatcttctccaacctcaagcacactatgggcagccaatcgtcgggagatcttacgctgtcgcagcccagaagacatatcatcaaggcatgcgagggctgtcgacagcagaagatcaaatgcaacgggaagtccccgtgcgagcgatgcgcccgcttatcgctcccgtgcacagtacggaccgtggcgcgacagcgacggcagaagatactccagaaacgagcgcagcaagatgatgttgagatcatccagacggcgctgcggcccgttcgtatcactgaccgcgcgacaggacggtcggccgtatacgggccaacatcgacgatcgcgctcctgcacctcctagctgcaaacaaagtaaattatgcgatttcagttgaggtcagtagcaccagctcgtgcatacagacctgtgcatgaatggtttg

SEQ ID NO: 3964 - DNA, 2646 bp, Emericella nidulans
gagcggagagaaagatggcgttaagacaaggaggctagtttttactgcaatattaagacttgcagtacattgagggagagatccagtgctactattctatatgctactattctttataggtgtatgatatgactacttatattgcttttgtcttctttccatcccttttctccctcatcgcacagtatcgtgattagaaggtatgagggctgaaaaccttcttaggaggtgcctagacaccgggtgggcgatcttctcagtgcatttttagcctgggcattggctggaatcctgcctatccgataaattagtgctgggcaggctcggtcagcctcgaggttccaatctggggagtaaatggcgcacttcacaacaccatcacccatgcagtgatgatacttttggtctagtatctgtgaaacgtccaaaaagcaaattaattaacttctgaaacttgagagctcaatattgtcgccggtatcaacaagtctgttgacgaggtgtggacgagtgtgtctctgtaagacgcgagactcgtatggctgggacatggaacgtctattgcgccgtgaagttactttactttctgggcatttttagctggacaatgactacagctaacccgtatctgagctctatcagggtatggccgccaagcaaagtctttcataattcgtaccaagcccatgtagtttatgttgcagctatatatatatccgtccgacgtgtggccgataccgccaaatcgcctagacgcccaatagaccggtttatctctcacatagcatacaaacgcgatgccaaacggccatttctgacttggagcacctcaatgtggccttcgcctggttgtgcacccgtagcatgaagtcatccggtgctagaccagctagccggcggagcggtgagggaaaaaagacgatccctaaatggcactacatggcatataaacgacatataaatggcgatatacgacaaataaatggcacacaggtggagagaagaaagaaaggaaggaacagaaggagaacgagaggggggtttatagcatgtgccggagcagatttcgcgggattaccaatccagagacttcattacaatccgcttaccaagccggtgggcgcatccgagtctactgaacgtgtctggtgttcctggctgtagtccgggtgtcgtatggcgaagtgtagggttgaagtataaccttaaagcaagacgggaaaaaagttaatgattttttttgctcataaatcattataaacaaaagttatcaagcaagtggcatcattggtctagtggtagaattcatcgttgccatcgatgaggcccgtgttcgattcacggatgatgcaaagtgattatgtttttttagaccatacggtagatggtattggacccaagggtagctgtgtggtcccaggccttgtcaaccctcattgccgtatgatcggtttagaagccggaaatacttcaacaaagaccagctgagcttcaagggctagctcagatggacaggcagctgagggtaccaaagcaggtggaatcttcacgcttttcggttcctcatcattgtgcgcacttcagcaagcggtgaggtgaaaattttcagctcggcgtggttcatgattctgccatcgtcgtccagagttccaaacttgttctgaaccacgccgtggctcagaactcaccttgggtcagaggtttctgacccacgatcagcttatctttcgacaaggactctgtaacctactgtacatgatcatatgtctctataataattgacaatgaattttctgtttactccgcatggcaaacagaatgccattaaccacaatatatgctgagtagaacgagtcaaacaaacatattttcggttgttaaggctgtggtccgtaatgataatatgttgtatgctcaatatattttgttttcctaatcctcagtttttattctcccggtctccttcaagaaacagattgttgtaaccgcccccacgttctctgtttgcttcccatccagagggcgtctggagcatctttattgagcatatgcttagcaacggcgccaatgtgcagcacttaacggcctcggccttataaagcggagtttgaaaccctgaggtcctgaatgcagcgaacccctcaggctgcggatattaccacagtgcgcatgtgctctgtaccagatatcgacttcatggatctgattcttcggtatacaccttcgctagaggtctcatgattgttaacacttaggccacctttggttcaggcgagtgatgtactcgaacgcggcagatttgcagccgcagggtagccaggtcctctgtaaggtaaagtgaattcggcatcgacgcatccaggaaagggcgcttagtgatatttgagtcccaaacacgttgcggtatgcagccttgacaaacgttgatctgaagatgacatttcaggagtaggcaacactaaacaaatcatatagcgcaagtggacaaaagaagctcactcaaagattccgacttaatggccaaactctaagccttcgcgcccttcccatccaagacctcaacatgctccagcacttctcttttagcatcgatatccttcccatcgctctcttcctctttgtccttgatagcgtactcaccaacgc

SEQ ID NO: 3965 - DNA, 5910 bp, Emericella nidulans
tcgcgattcttggcgcagaacacggagagcttcgacgaacaccgtgtctcagtgaactctgcgacttcttctttgtgggcagccgaccccggactcagctgggcccaccgccttacccaccggtcgcagcggccgaatatcgaccgctgcagtcaggtgaattctttgtcatcagtcatccttgctcttaaccaccaccttacttacaggcaggttacaggacaatcatcgacgattgttgtggacgctcaatgggcaaaggcagaagggaactatcaactcaaatttagcctactaatgagtggtgccaaatgacaattgattctctatcttgatgacaatagatatctcttgaccagtctttctctttatacaatacgtagaggagtcagatcaggggtcagatgttaggccgtttagttcatgtggcataagccggcataagccagggctcatcgtgcacatatgaaggtcacatgatatttcgtataataatgataatagaaggcgagcccgtcatgaagtcgttcttgacagaggcagaaatgagccgcgagctgggtcgcacagttgcccgggggatgtacaaggctgccgtcaaacacttatagttagacatcagcgaaattctagcgcccagccagctcctagccagcgcatagcacgcatatagcacacgcacttggtgagagtatgaatgggatgagcgatggcatgacggcaggtgttgagagttggaataattgcggtcggaatgaaaatagtttacttgctttttgattcgcctctgccggctcatagcatatattgttgaaagtgctcgacaactgatagctttcagatcagtccttaagctgtcgtgggcactgtacgccctggaactatccaattttattgtctactgtcactgttaactatctgcagtttccgtcctggctgtcctggctaccaacggggcttaggggtttctctctggctctctccgacgccactctcgtggtgggcaaggcaaggtggcggtgacagggtgtgtactgggagaatatatctgcattctgacttaccgggagagatagggattgttctgggcaggtccaggtggtcaaatcatcgttatcaaagcaaccagggttgcatcgctccgccacaaaccaacctgagttcgccgcttacagatgggtgagttcttgcgaatgggtcctgcctgagatctacacaacaccctcccttgcattaaatgctaatcttacatgtaagcaccctggacctggcacgaagtctacccgcagctgtcaggccgctctcccagcctattaagggcagggttgagatcattccgttcgcgcgtcgggttgtagaaactaccagacccagaccgtcggctcgctttggtgtcttttttgtttaaacacctgaatattgcgcgagagggcgacacgatgacgagagtaacagcgaattgcttttttcttgatcgcatcactttcggcgactcgaagttgtggctcgtcgaggttccatcgtacagcatgctgactgcataccaacggccgagtaaagtccaggccaccacactgccttccatcaatgagagataatgaaaccatgatactttgtgcacgagggacgaaggcacgagatacgtataggtacccaccgcctcatctgcggcctgggggtttatctctgctcgagcccagaaagtcctccatatcagccgctaacttatcgatggcgcgtagcaccgtcgcatcagacgacgccagtaatcacagtgctgcgctacgtttctcaggaaatatagcagcaggttccaatgactcgaagtgactgcttatcggggatttacttccaatcaagttcgcgcgccgtccagtatcgccccctcccctccccctgtgtacgacattcaggccaaggcgcgcattcatgatacaccgtatgatatataaagtcctgcctcgtgctcaacgtcctggtcctcctcacattcccaacggaaaaccatggcggaagtagcaaggccgagccctctggggacaagttccagccaggacacctcagataaacaggtgcacccaaccctacaagaaaccgatcatggagcggaaacagacctccgccgcaccctgtccacccggcatctgaccatgatcgcccttggctcgtccattggcatgggcctgtggcttggaagcggtacttccttgcgcaatggcggccctgccgccctcttcatcgggtacatcctcgcggggacgatgatctggtctgtggctcatgctattggcgagatggccgttctgtatccgctgccgtctgccttcgtgcaatggagcagtatatttatcagcaaagagcttggcttcgccgtcggctgggcttactggttcagcgcgttcatcacgattgccaacgagctacaggtacggtcgcgtgtactttaatcagatgagaaactgacggcaaagggctgtgttacggtggtgagtttctggacggacgcagtcccaaccgctgcgtggatcagcatcttctggttggttatcatcttcatcaatgcgtgggccgtcaggttctttggcgaggtagaagtcgtctcctcgaccattaaattctcgtggatctttgtcgttatcatctcactcataggttggcaaccctccatacctgacgttctttgcacattgccaactcaatccaacgccagttgtctctgccggaggggcaccaaaccatgaagcagtcggctttcgctattggaatgcagagccattcaccaacggcttcaagggctttctgagcgtgatgccaacctgcatctttgcgatgtccggctccgagaatagtgcattggtcgcagccgaaacgcagaatcctcgtcggtctgttccccgggccgttggcacaatctggttgcgtctttctttgttctaccttcttggagcggtcgtcgtgaccatcaccgtttccccagaggaccctaacctgttcggcgcctcgggagctaatgcatcgccctttgtcattgcatacacgaatgccggtataccggtcttagcccatatgatgaacgccgtcatcttcatctccgtcgtctccacaggctccatctctgggtttggaggctcgcgtctgttgatggggttatcccatctcggccttgcaccgaaggtaagcagcacttccatcgcaaggatcagccaaatactgaggagcagatctttggccgcgccgacaggaaaggccgtccggttgcaggactggtagtcacgctcctcctcggtggtggattttcctatcttaatgtcagccaaagcggcgcagacgtcttttcatggttgtcgaacctcacctccctcttcaccctgttcggctggggctccatctgcgcatcccatctgcgcatgcggtacgcgtggaaaaaccagggccgatctgaagctgatctgccctggaagacgtggacttatccctatgcctcatggtggggactctcctggtgtatcctgctcatcatcgccgagttttacttgagtgtctggccgcttcatacgaaccccaacgtaacagacttttttgccaactatgtgagcatcattgttgttcttgttgtgtatctcggtgcgaggctctggtaccaaggtccgtggtgggtggatgccgcgagcattgatctggatgcgccgaggaggttttacgccccagacgatgcagagggaaagaaagtgaatgtcttggagaagtcggtggggtggatttttaaataagagcctttctctctctgtctttctattaccaactcgtttaacaggactttttgtccaatggtgtactgtgaggtccaaatgtatattgtgccttaatgtgccagttacaaggacctagccagtacgcaataactttgaccagatgaaaatagaattattaatacaaagtctcagaggacatttcccatcagtagcattccgcctactgactgtagcatcttggaaacaagggcggaagcaattttccacttatcagcacaaactctctgacacgactcctagatagcagcatgcccatgagtctcaaacggcaatccaaagcatagaaccccgacgccgacccaaagcgccgcactagcatagataggtgctgtcgtgaaccccgtctccgacgcaatcaagctcgcgaccagcccgccgaatcgaagtagcgatgccgctgtccctgatgctgtgccgcgatgaggagcaggaaaggactccggcgtgaaggcatacattatggcgtactctgacaactgattagctgaaggaaaggaggccagtggtgtgaggagtggcggctggcgtaccaaaattcgctaacaaccctgtgacacacgaaaacgcgagactcgacattggagtcttgacgccgacgtacgcgaagagaaagacaccagttacgatcgaggaaatgcccatcatccagcgccggccgaggaaggtattcacgaggaccgctgcagataacggaccaacgaccccgacggctgactggatgcagtagttgcggtaggtcaggtcgagcgaggaatcttgcgtgaatctggtggcaagataagaagggagaaagttgaaatacagcgggtatgcgatgcctaacatattgttagtctacgggtgttgttcgaagatattgtgctcggtctggagggaacagttagggggataccaatgatcaaccagacagcccagatcaatgccgtatgctgggaaagctttcgtgtcgcgaagagagcttggtaatgttctcctcgaaactcctgcatgttctctttgaggatatccttcgtcgacaatctttcctctgcgtttggggtgaaacccagccgaacgtcgatagcctgcaacatcgacagcgttagcggctctggctttccgttctgacgggcgacatagttcactgcgtctaccgcagcctggtcatttccttgcgagagcaggtaccggggcgtttcaggcatcttgaagacgaagatgcgaacgaaggtgaaggcaagggaaagcccgccgagggtgatgagggtatatcgccagcccatattgtcggcacgcgaacaggtgtctggcgtcgcatccgttgggcagctgaagttggcgaggaatacccatgcaagcagtgacactacaagctgtccgagattccaccatccactgagcgcggtcaggaggtactggtggctcccggggatgaattcgaggctgcacgattagtgccttgcgtcctctgtcaagtatttgcaacccactcacagaatcatcgagtcgcaaaccacattaccacctgcagccgttcctattactgcccagagagcactaaaggcgatgaagttcgacgtccccgcggcggcacataggaaaatgcccgcgattgctaacgtcgagttgaaggcaggcttgcggccgatcaagtcggaggaaatgccccagaatgaggcaccgatgatcattcccacataatacgccaccgagctgtagctcacctgcttgatgccgctgaactcctgctggattggtggctggacagccgatatcccctgtgaacagaaattatcgacgatccagccaaagccggcgacggtgaacagtttccactggaatctgggttggttagaatcgtattctgatgggcgaggatttaataacgcaccgccccatcccaatgtctgccatgcattgcgaaacgagctctgacttgagacggtaggcatcagtggtagacgagccgtagaactgctccatctcggcatcgtcgacgacctcgattttcccaatgtcatccggcgggacattgtccgtcggacgattctcacgcttgtcgagttcgatttccatgatgatctggctggcgatattcttagacctccagcattttccc

SEQ ID NO: 3966 - DNA, 3367 bp, Emericella nidulans
ccatccccatccacgcacctagagcctacgaatcggggcagatgtgcgggaagacgctgggtggaagggggaccagggcgccagatattccgcctataattgcattagctttccgcgagtacacagatactagggctcggggagaagtataccgtagaaagcagcaaaaaggataaagcgtgccagggtcgttgcactgatccaggccatacagagcacgccgctagcaataccagtgataatccaaggcaccatcgcgccaaagtaatgcgcgacggctgttgtaactacgcgtccaattatagaagatgcttgagagatgatcagaatgtagagccccattgaccgcgaggtatgtagcttggtctccgcatagatcgggatgtagtagaatggggacatgtagccgagatagaggaagaagtttgcgagcgtataggaccaaaaagggaggtctttcagggctgccgtatcgaacagctgccgttttccaactgccggtctccgagcctggctgggtttcgctgtgtccgcagtgaacgagaccatgactcctgcggcgatgaacagtcccagcatcacaaacccgattatcctcactgtccacgcgaaacccgcgcgcggcagcagctgctcaaacatgagcgtataaatcacgccccccgcgggcgcacccgccgtcgcgattcccaatgccaatgcgcgtttccgcacaaaggtccggctaacaatcgtcagactagggatatagagtagtccaaacccgagtccagcgcagattccctgcgacagcaggatctggtaatatttcgtagctagcgagagcatcataatcccaaagacagacaggaaggagccgatgcttatgaggtggacgtagtacccaagatcgaaaagcgggcctgagacaagaccgcccattatgagaagccaggactggatggttcccgtccatgatatcgcggatgttgatgttgaggggaggaagtcgagcacatagaagctctggaaggagccgaaggcgaaggctagccccctagcagatgggtcagaagggagtcaccgcgccagataaaatctaggagactgaccaaatgttgaatagaatgaagagggtgctgagaacctgtagccagccacggagtccgccttctttggctggatgtgatggtgctggtgctggtgctggcggttcattgagagctatagtcgcagtggcagacgccttttctggaccgttctctgtagaggtggaagccattatttatgactaagagctcggtatctgctctgcctcatttgggtcgataaatggaggccagtatcagcccagtgctgtaacaggcaaagcagagcagggtttatatacgattggagatgcgtgccgactcccgagactcgtgtcatttgtaattagtctcgactccaaagaacggtcaaacaagatccagccagtggtttgcagctaatgacgagaaaatcgagcacgccaacctcggcctgaatggctagcccccgcattaggtctcggctcagtgcccgccattagtcaatccatagctagtcttgttagtccagctaggagtggggtacaaggggactgcgctgcccttgaggaaacggtacttctatgggtctatatatcacctgcaggtatccctggttgatcattcagcactccttgcgtagggcacgtaatgtatggcgcgtcaattccaagactgctctacacctccagctgctccttcttcctccccatcccatcgtagaactgccgctccttatagacctggacatcctcgccggcgtagatccggccctgcttctcctccttgatccgcaaccgccttacgcgcatgacatcgtactcgacgttccgcgtcagccaccacgtccacccattcgtcaaccatgccaccccaaccacggcggcgcagatcgcaaatggcgtcttgtatccgttggatgcgaagcgcgactgaaagagctgtggcccaattacaccgccgacttggccaacacaggactggaaggcgagtgtgaatgcagatccggtcatacctttcagggacgaactccgccctatggtttcgtgagttgctggttctgtagaatagccgttgacatgacaggggaaagaagggagacatacaagcccagaaagggataaaatagactgcatagaacattgtcccgaagacgcaggcgatgtatattccgactttgttgtccagaaccgccaacaggatgaagaagagcagcatcggcccaatgatcacggacatgatatacgctggtcgagtcatatacgccctcttcaggaaccatccagagaagatgatggcaagaaccgacgccgcggctggaggaatattgagcagctggtttcgcggcagacctgcgaagccaagacttgtcgtaatggtaggcagctgccagctcaatgcgtatcctgcaaagttgatgaggatctgcgagatcatgaacgaataagtcctctgatccttcagagctgcaatcacctcgcccttgtcgaaactggcgtcactttcctttggagcgttctcggacaggcgtgtttccacatattcctgctctcgctcagtgagccactttttcgtgcgctctgatttaggccagtccggaaggacgaggaagattacaccggagaaggcgatggtgaagaggccttctaggagatataccctgtccagcttattagttcctttttgctagtgtcgaagcgaaaacagacgcaccatcgccaggcactcaagtcctgtaacccattcatgtaggagatgccataagtaatgagcgacccaataatccctgatgtattctggaacccaaacatccacatgatgggcgtcgccatctcgtcgctgcgataccacccgcagagctgcgccgcaataccaggaaacatgccagcttcgcacaaccctagaagaaaacgcagggcgtagagcgcgtgcttgttctgcacagctgcatggcaagcgaggacgatgccccaggtaagcatgatccgcgactgccagagacgcggcgtgacgttctgcagcaggttgctgggaacttcgaacacgatgtagcttatctatttcggcatcagcagaatgcactccacgatataacgggctgcatacaaagtagatcgactggacccagttgtattcgttcgtggtcattttcagctccgacagcacattgcgctcttcaccgacctgcagtaccttgacggctgcggcattggtatagtcgatctgaccagtcagtcttcgtcccaacctgagaatagacgacgtaccgtcttgataacataaataacgccgatcagccagagaaaccgcctgttgacctt

SEQ ID NO: 3967 - DNA, 1703 bp, Emericella nidulans
gaaaccaccgacgatattaaagagctcgggcgaccagggttggtaagaccaacctgacatgttgcggagtttttcgaacgggatctgttttggccgttgcgggactatgtcaattttaagcggtatcaaatatggccgcactattttgcctaatggagccatgcccgtcgtagtcctgactgagatgatccatttttttatgcggggtatatacgcgagtgccctacataacccccatattggatatacacgatcactgaactctatcacgggactttttctgctctttctgtcagaggaaaaggcattttgggtgtagcatatcgttacatctgtctacctaccgagcacccccgaaatcagccttgagggtgcaaatgtcgatctttggatcataatggtccttctgaaagagtcgttaccgaacgtgtacaacaagatcgcagatacagggacaaaaaggagcgctccgctctctgtaaactcaaggctgcccgacattactctcggcataaccaattggctcatgtccgtctttatcggcactttaccactcgaaacaacgttgcgagtctgggacgtgttcttctacgaaggctccaaaaccttctttcgcgtctccatggcgatcttcaaagcctgcgagagggaaatcatggctgtttcggaccccatggaggttttccaggtcgtgcagaccgtgcccaagagacttttagacgccaatgcccttctggacgggagcttcacccgaaaaaaccgtgttggacagggtcgcatcgaagaactaagagcagcgcgacgcgcagccgtccgacaggataaattgcggcggtcgcaagctctgacaaagggcacgctccatgcagcgacggacgaatggccgacgcgatctcggaccccgatcccaggcattgaccgcacctttgctgattcctggcgccagatgaggcaccatgcattccggtgacgcacttacagttcaaaccaacctaatgccgcctacgataatttttaatctagctgcgcgatgtcgaagcagaatttgtggataattataatgtcccagtctttcgtgtatattcattgattccccctgagcagaaaagcgaccatctacggagtactgcagagtggatttgcgctatgtacatagactagtcagtccaatgaattggaatttggaagtgttttagtgccgatcttagtcttgtaaggctgagccgaggggagggtctgaaccgaaattggaaccttggatcagcgttctcccactgtaactgtgcctttcctgattgaaggtggcatcaccatgacgactgctgcctaactctggctcaagtcgaccgcacaaaattttctcctgcccctgtttccatcccattcctgcgctgaactcgatatatactatgagtggacaggctgccagctactacaatcccggtcaaggcctcgagcatggctacggccatgttccccagccagctactggttaccaggctcagtacaattagtgaatgaacaatggcgataatagacctccagagccatagcatcacctgaagcctcagccgacctacattcagtccgtatatggcctccactatgtatttaaggtcgagaggcacaaaaaaaacgacatcaggggtggtctattggagcgttctcacccactactgtctgtttgaaccacaaaatcagcg

SEQ ID NO: 3968 - DNA, 5048 bp, Emericella nidulans
  unsure (1)..(5048): unsure at all n locations
tgttacgtctattactttggaatgaatttcatctggattgttgttcctgccagtaagtaaatctcggcatattgtcttgcggctatttattaatgccttggctagtttatctgtatcaaagcatgaaagcgatttcctatgccatgaagaaagctgagaagatctcgcaatccctcaaatctgagtgatttggtgaaaccgttcgatgctattcggtttatttatcgagatccaacattcctccaggctcaaaaaaaactcaacatcttcaattaattcaaacctcatcacaagacatgactccggaatcataaaataaatcataaaataagaacaaattctggcgccttttgccttcctcgaacgatcacgactaagtctgggtcatttcgggcgtcgtctcctttcccaggatcacttttccctgatgcagagcggcgatcgagaagtataccacgccaaacacgccaccaactacggnngtaagctattattcctcctgttgtgttatctgcgagcttcaggccagtaccgccgttgataatttcaagcagaagaaatatccgcccgatcccaatatggacgtgtgtccatctcccggctttttgggttttcttatattgatgatggtgccaaaagcccaatgaatggctggataaggagaaagacgacaaatgacagttcctaatatcgtgtggctattgttatggagcttgaatgttattagcttaacgggaaggtacggcaatccagcagagggcataccctgtcaagaatctttccaacccgaattccagtggccaggccagcaatcatcaggacgtacgccaataactggcagccaatatgtgcatacaccccgtacttcaactggagcactcgcaaaaggatggcgccaaggggaaagataatcccgaacgcaatccccattgccacaccatgggctttggcaaatgttggtacaaggtgtaaatcttcatagatgattcctggcggtaattgtggtggtctatttcgtggtagttcatcttgtgcactgcaaagtcctgttaaagacactgcgtgtacgcatggattcatattagtcctctggcttcgaggagtccggggctaagagacgtacaccacacccacagcgagatagcccacaaagtcgaactgcgggccatagtgttcaatgcactcagactggccaatattcaatatctgaggatcctggaactgtgtccgtttggtgccgggtttgaaggacgcaaaagacctttttatactttttgacctccatcatcagggtcgatgacagcgaatccttctcagaatggggcagggatcaatgattttgtcaatgtaccgtcatggtgtctttgcattattattgtcaatcaaaaattgacatgcttcaagagaccgagaattgcgagactagaatcttgtcatcgactcagccacagaggtaaggaccaatcacctactcagcagatgacaagacaccgagaaaggcgagattccctttgcctgcctgtcgcgcacagagtaaccgccacgatctcgtatccatgtcttggggcctgagttgggcggatatgatgactcgcgcagaagtcatccctcgactgtcagcgatcccctttgaagaatgtgaagtgactttcacgacgtttcatatgtcaaaacaaagatagtgacaaacattgtcaccgagttttgcggcagttatagtcgctaggcaaatggccgcttctctgggatcgaccagggtgaagcagtctttgagcgagattgcgccaaaaccaccttcttcaacttcgccctcaaacgcctcaacgcctcaggactacaccgttttgaagccaaaatcctgccttgcatgccgcaaaaggaaggttagatgcgacaggcgacgaccctgtaccaactgctcccgatggtcagttgagtgtatcttcccgtctccgattcgcaagtgtccacgggtccgtacgaaacctaagacaggcacctccaacgatcaagcactgcacgaccgtatttacacgctcgaaacgcagatctcaggtttgacccaaactgtcaacgcgcaagccgagagaatacggtctctgaccgctcccgggaactcgctctttccgttaagccacacctgggcgcatgctacaatgtcattgcacccgtcattggctctgggacggaaatactggcaactatttctggaaaaagtcgacccattaatcaaggtggtgcatcgacccagtgtgtcccgaatcctccgaggtggcttaaatgatccgacttcattaggtgaaggcgatggtgctctgctgcaagtgttctatcttgcttgcatctctgcgatggatgctatggacgtacaatctagcttacaaatgtccaaaagcacggcacttaccatataccgtttggcagccgaacaggctctggcacgctcaggcttcatggccaccagtaactggacaataatgcaggctctcgtcctcttcatcgctttagatcggctccaagataaccaaaagtctgcttggaacctagctggtctagcagaacggttggacgtttcattggaagaagataactcactatttggggccgagatgcggcggcgcgtccggtggcacctgtggtatctgaaccgtcgcatacggggtgatcgaggtcaaagtccaagcctgcccagccaacccatgccatccccatcggtcgttgaactgcctctgaactgtcacgactcggagctgcgcacagacatgacggtttcactcaccaatcaacctggctggacggagatgagcttctgtttgctcaggtatgaccttgcgactaccgaacggatagttgaaagcgacgcttcctggctattcaagacaagggctgtcagcgagtgtcagcacagacttcatttcaagtacctaaactactgcgacggctcagagtctattcactggcttgcctctcacattgcctacgtaatgatcacggagatgtggatgaaactctatagtccacaattcgcggcggtagactcgactgagacccttgatcacgatgttcgagaccaactgttcgatgccgctgttgatatccttgacacccagaaacgcttagaggttgagactgccgctcgtaaatgggagtggacgctcggtggttacttccaatatgttccgctgacattcctgttgaatgagctctattggcgtcggaacgactctagagtagatgccgcctgggatgtcgctgagaggtcttttcaacgtttgtccgagcacgcgcggaaatcaacccacggggtcatgctgaccgagctcatgtcgaaagccttgtccgcgagacaggaaaccgcagatatccaaccctcggcagacacctacctcgtttctgagcaggctattgatgacatcttctcagttggtccagaatatacagggaccatcaagacaatgccttccgacatgccccagctggggttaccagctgactgggctgtatttccttttgagaatagctaccattgaatagacccctgcagttgcaactcggggtctttatgcctaggtattgctgctactatactaagatttcttatagtttaatgtacaaccattatctgagtttgtggtaggtattaaaccttttgcattgtatgtttattggagtttcgagaggcctcgccatagcttcacatctttcgctatgactcacatagaatttcatatatcgtcttttaagtagacgaccataaaagaccctcgaatcaacatagactgatactggcggtctggtgagagaagtagaatttacctgcaaatatgtggagtatatgaccctctgggccgctaccattggtaggacccgtccgctggactccatccagacattggtttcattcgaagcgggcgtgatttttgttccttacggccccgtccagcccgactccaaatccattacccagccacttcaatccaaccggtggacttcagcaaaggatggcggttgctgagacgtttctgcgcggtgacgtgtcggccccagcgtcggctatagattattgccaggacaatgacgtctggaggacctcaaggcacttggcagcttcaagttgctgcccgaacaggatcgaagaacatacatagaacaagaccgtaaggtctccggctctcaatctgaagacaggccgaacccgaaatagaactgttcggttcggccattcagttactcatcatgcattccatctggtggatcagcggtcggtcgtaactcttgaggggagcgtcgacgtggatgtctgctcaatcaggcttcagccagcagcataatcactggcccgcggtcaaatcaatccattcaggaatcagctccctagcgccggagcgtgaggcaaaatcattgatcgaagctcgatagacaagatcccgttggctcctttggcgcctgatctgaagctctatgctgatcgctggtttccccggcagccctcgcactagttggcctggacttgttcacagccgaatttgtataccgccagcaagagaccgttaataataatgcgatagagaaatcacgcccacagacagaatcgagagcggtgtttcgcccttgtcctgactggtttgtcctggtgattctttcagctgacggtcgctgggcctgtcattcgaccacattctttcctcaagtctcgcccgcttccgagctctgccttgttcagctccttgcctctgagctgctggccttgttgttcccacgatcgcatttgattacaactgagcttcttgcgttttctctagagtcccaacaggatctctgttttgtcttcggctaggtaagggtatgccgtgaaatagtgagtgtttttccccctagtaaacaaacagcctgcttgcaatgacgtcgcctgttttgctccaactcatcaacgagcagagcatacggcaccaacaaaacaaacgaaaaacaatcgtcccttgatgtcttcacccggtgcgcatgctgttccggataagcactgcaaaatactaacaattgccgttatc

SEQ ID NO: 3969 - DNA, 3449 bp, Emericella nidulans
  unsure (1)..(3449): unsure at all n locations
atcacttctccccaccgcctcgacagtcttgaccattactccaacatactctacgtgatgggggcccggccgcaactagccttcgttgcccaagtcgcgacagccacagataaattccgccctgaaacatgctgcgttgtcgggaactactattccctcaaatccgaacacgaaaaggcagttatgtatttccgacgcgctttgaccctagaccgcaatttcctctccgcctggacgctcatgggccacgaatacattgagatgaagaacacccacgccgcaattgaatcctatcgccgtgccgtcgatgtcaaccgcaaggactaccgcgcctggtacggtctcggtcaggcctacgaagtcttagacatgtccttttatgccctcttctactaccagcgcggccgcggcgtcgcccctacgaccccaagatgtggcaagctgtaggatcctgctatgcaaagatgggccgcatcgagcagagcatcaaggctctcaagcgtgccctcgtcgcaggctcatactacgccgaagatccctcgcaacacggcgggcgcaaaattctcgacccggaaacactctatcagatcgctactctctatgaacgtctcgaggacgaagaagaagcagccgcttatatggaactcacattgcagcaagaaacaggtggacagccagatgaagtatccgacgtatctgatagcgagatcgaagacgaccagtcaaatacagcttcaacttctggagccaatcagcggcgcgcaaggaggagccccaacgatgacgaagaggaggcataccacggcacaggaccaacggctacaacttcaaaagcgcggctatggcttgcccgatggtctttaaggcatggagacttggaacgtgcggatcagctggcaggggaattgtgccaggatggtgtggaggttgaagaggccaaggcgttaatgagggatgtccgggcgagaagggaagcgggtgcatgatctgtttgccccggaaaatctgtaattcttaacttcagctttttgcgacgcatttcctctacattgctctgaacattgtgtcgttttctcggcgcattgacgaatagcgcggcgtttcttgttggccggtgggcatttgtgcttgataccatgattattatgtttgcgactggtatactttgcagtttaggtcatgaaattatggcattgtcatctcctgtagatatgactcttaaggatgggataagacctggaaactttatcgaccattgctacaagaagaccataagctgtaacggaggatctatggatgagattctagccaagtaagagattaaaagtaaactgactcgaagtaatgatgatcgtccttgcggccgttatcaatcttacatagagtgaatgcagtctaattacacgcgccagtagattcaaaggtcggccaatgataatatgaagctaaaggcagcatgcatgattctgagggttccacaccatacggcatgccatattcaaacaagaggttccgttcgatccattatatttcatccgaacaacgcagattatccagactacgagccaacaagaaccaagatctgctttctatcaaacgatatcctaacctcaggtataaacgcagatacgggccctaggctccgtctgagggccacgattggttgggtccgtcgcgtggtagtagtgacaatggagttttcggttaggtgttcagcatccaagggagtgctgggaaactggtcaacaggttctctgaagaggcggcatttgtcgatatcccaggctatacacgcgtagaaatagactcggctgattttatcccaggtcttacggaggcagaatatgtggtttttccagtcgacgaccaggtttaggaagtttgagttgaggaggaagacccggcccgtagggttatgactgcatggaggcgtggtgagcgcattggaaatatgtttgcttagttcgagcaatgtcgggcctagagggtctctggaaatgttggcaaacataattcccaaggtgatgttttcggatgccggaaagaggtttgatttctctggccccagtcggcggctgtcaaaattcaacatacgaaggaactcttcgatggtatgggaaacgttcgatagaccgttgaacgttgtctggacctccgaagcagtctcggggtggatatagataggaattctggcgagaggagatctcgaaggttcttcagagtctgcttttcgctcgctggccgagactttttgaatgtctgtgctagcgtgatcgcttcgtggaggacctactttggttgcaaggtattgtgcgggagatgtgactaccaaagctggattaaccacttttgttactttttgggctctgtcgagccccccataggtatttttggcgcatggttcagacgcatatggcaatgcttttcgttttttagcattttcctgtgacgagagattgctattgtttgccaaaacgttgctttcaggtgagccgttcgatgaactcggtggcgaacaatcgatatatatggggatagcctttgcggaacgaggaggactaacggtagacacgttttgtgactcatctggacaatggcctggcttagatgtacccgacctgacgcggttcgtccattctgcttcttcatcgagcagctcttccgaagaaacggatgtcgccatctcagctagaacctgtaactctcgaaaggatgcagcatcttcgattgaccgatctgaatggatcttcagaatcctggggaaacggattgtataatatcgagcgcctgatggcttcacaaaaccacttcccatcacttcaacgacaaatggcgtcttgaagacaacatctattgttggcaagcccggccgtatttctccaatgatcactccatcgtcagagtctacacttcgggcgctatacttgccaaagctgttgaggttttgcatgtttgcccggctgatgccatgctggtcgatcacatctatgatgcggaacctaggttcgtttttggaccgtaaaacagcctccttgttttcaagacagcccacaaagaagtgtgtccacgtttcctttttcgctagtccaagtatggttgcatcacgggcattgtatgctgcaccgactaacacaagatctactgtgtcgcccaatcctgggatgtaatcctttttgagcttgatccaacggccttcgcaaccaatcccggattccaccaggatgggaaaatatgggtcctcgcacccctttagaatgaagccttcccagcgctcagcaattcccttagaaaaaagcgtctcgagtttggcttgaccatctgagcgggagaagtcaatgatgcgctggtcagctatatcagagacacccgagattactngtattgtattcttgaggagcaatcgcctttctcgatgcggctttcgtagcaagatgtcgtcatcgaggaca

SEQ ID NO: 3970 - DNA, 2310 bp, Emericella nidulans
aaatataaccagcctgcatcatctccagactgaactttattctctggtctcgtatcaaccgatcaccgaaatgccgtggtccttcgtcctcccgcaggcgatcttcgcctcgccactacttgcaactttaacgcccgtcgcgacggctcaacaataggctacctcgtaaaccgtacgtcaattgaacccttacatcgatctcaagtgctcaaaatgaagaagaatagatagaatattagctaactgatatccaatgccgaactacaggctacggcacaaaacccaagtaccatgccctcaagcaaccgccagcctcaccaccctcatggctctttccgccagtctggactctcctctacgggctaactggttacgcctcctaccacttcacggtgaacactctggaaccagacaccaccatcacgcagacgctgtacaccgctcagttattcctcaaccacctctggatgccgctcttctttgcagcgaggaagccaatcctggccgcaggggatattgttcttcttggtgggacagtggctacgctcatgagggagttgtgggggtccgacagagtgagcttttggctctttgcaccgtatgcggcttggctgggatatgcggacgtacctgaattttggaacggggattttgaataattggagggattcctgatggtccataagagaggaagaggagaaatgaataattagttttttgagccattttttggtccagatccagacgccaaagtggtggacgaggcaactatatcctggttgagaagtccactgtttccactatctgacgattgagatgaaacgaagtttttatgactatactataactgtactgaggtttacacgtctcgatccacttatcatggtaatccgaaataaacctgaagctatgcctatcagcacgctgactcaaatggcaacatatctctcatacagggttacatttgaagattgtcgattagtacctccgggctattagtgctaagatacaacaccttgcctcaggagtcgaaatcaatcttattaccttgtggaatcaatgcgtttgaaatacctccaacctcaaattatagtcaagtgccctacctaagcaagctcacactcgatcaaactctctactccccttctcctcgtccaaatcttcacaatcttcagcctaaccgactcgacaagcgcatgtcactgcttttccgtccgctcctgggacgcgaagtctgccatgatgatgataccaaactcttcgcgttggtggacgggatcacgttctcattgatcaagatattgctgtagccacgcatcatggcagacacgaggttggagaggatgcggcggcagtccgcatccgcccaatcgtggaggacggagtgcatgtagtaggatctggcacctattttgtaaatgatgtgtgatagtagtatgggaggaaaggaggagaagagagagaaaagagggagaggagtaaactttgacaggctgctcggtgaagaaatcgtgattcattagctcaatgtcctcttgtatatcttggttccgccatttcgcctgttcagtgacctccggcagatcttggagaacgagtcggccaggaatgctgggccacttgcggcgaaactcgagcagattttggcctacgttgccgccaacatcaacgaggagcacgccgtcagcaccgatgttcaacccttccgtgagagaagtgaccggatagaaatcctcgttcattcagttaggtcggcctgaccggaggctgtactgagggtaacgaactctggcccgaatgtgaagagttttttggggaattcgaaaaaatgcttgctgatgcggaaatccgtccttggaacccgggaaggcaatccattgttgggtctggcgtatcctggtattcttggaaaaacgagcgcccaacttttattaccctccttgttacaaacttgttctttatagcgcaatcaggggatttccttgaatcaggtatattcgtgtagaatacaaccgaaaccgcctcgtttggccttgctaaacctactttataaaacttgcgtcatttcctccccaaaaaatgttctctgttttctctagtaactcccctatggtcaaaattagggggactcttctttttccacctccccggaacaattgcaaattcttttgtctatcctcacaaaacaaaatacactctatctttcatccaacaatctttccctgtccttccaaatccactcttcatttcactattataaacctctattgctcttatcatatcattctctactctccccctttcaattct

SEQ ID NO: 3971 - DNA, 1356 bp, Emericella nidulans
ccgggaagtcaacccctctgtaacactgggcatgaagatagacgaacagaggcgctagagatctccctggggtaccagcatcatcacgtcgaatcagctcccctttcgcccataaactcagaaccttcctgaactcgatctcgagattacccctagccgtcggatggggttcttgggccgaaagtgcccggtagaggtggtaggtggctttcaggtggttcgcatcggcaagcgcgatgacagccaactggttgtgcgacgcccagaagctggatatattacggaggctaggtcataatagccaatcgctggaccccaattacgttctttggaaaccaactccgtttcacggtaacgggagaggtcacctaggcgaacaagtgtcgcatggcatgatcggaggatggatttccgtagagattcagaggtttggatgggaggcgcgcagacaggtctactgtggtgttcagcgactaaaacagcaaattgcgggcaggtgagtgctcacgttcgaagttgaacttccccgcgactttttccaattccgaaatgcccccgaagtgggatgccagttgttgtatgtagccgcggtagaatcgctggctcgatttgatgaactccaggtagtgcttctcaaattttctgcgctccaccggcttctttttcttctcgttgtcgtcacgaaactatttttatacgcccaacattagcgggtaacgagaggaataagatgaagtaactcacgcgggagagtaattttcgaaagcgagtgttgatcttgagatgtgcatcccagaggcgaccttcaacgtcaatggaccgggcggtctcaaagtcctggagaatggcattttgacaagcagtgcggagtctgcgagtagagcgatcagatcatctgcgcgtagcaaatgccaggcagcgaagggaactaactccgatatattatgagatatttcggcaaatgtgggctctttttcagcgaggttgttcaacagcgctttttcaacgttgagcgcagacctgggatagtccagtttcagttgtgttccactttcaaagttgaccgcgagggaagggtactaactgccacgcattttggaaagtgagcgccatgctcactgagcagaggttcggtccgcctgtataaccccactagttcgttcgcccgtcagatggctggctggaagtctgcgggcgacaggatcagtgaacgatccatcagtaatgtctcgaaaggcggcaagcgacaatataaccgggaacttttcgaaataacgtctacgacgcgctgttctgagcgaaaatggaggtaacgatgtcgaggggtggacaagagaagacagcgagcaggacggg

SEQ ID NO: 3972 - DNA, 1969 bp, Emericella nidulans
gtctcgcaggaagggtgctgtggcagtaggcccgccatttccatgaatttggtgcggatattgcgccgggtgtgatgtctgcgtgtcctgatggactggaacttgttgcggctgctggctggtcaccggttgggactggctctgagcttgcatttgcatttgcatggccgcgggcgtgcctagggtgttcgaagtcgagggctggggatttgaggaaaatgtgagggttgcacctgctgggttgttcatggtgttggtgcggggcttgggatgcgaagactgaggcgggggttccttgtgttgaaactgttcgtaggccagaactaggcggagtacagttgtacgctgtaagctaggctgagacgtgagtgcggagaggaggagggagttgtggaggatgatttggacgctgagcgtgaagttcaaatgaggcgtcggaaacagagcagcgaaagaagagaaaagtgagggtgggttgatggttgatcagagactcgatgggctccacgtggggcgcactcgggtataccgcggtatgacgttcggcactctggccagttttcgccgagcccagtggtcaatgtgataatgatgataaggtgaagagttactatggagttcagccttttgtgcaaaccccgaactagacagtactttggatagggtgatttgccgcggcgttgatgcaagattaggggtttggctcgtgagacggtgagattctaagcgctgcactgatcgacgacttctgattttcctccaatccgaggatgcccaagggttcgtgctcggctgcacttcatcgaagagcggttcaagactcggaaccttgcgcaattttggggcttgacgttaccattcaaccgcgttgaacgccggataaattccggtattcggagcccattcgaccggcgctctctaccttaacccagttacccaggtgttcactggcttcttcacctgcggggctcttatacatgcaatcccactctcgcgacctggtactaagcttcctggatcttctcgagccttgagtgaacaaacctccattttctttttatccggaacatggataaggacaagcggttgtcaatctgactccgtgtttccatcggaacggacaaatctcggcgctgactccgggtcggatctggggaaaagccacgtgatatcatgtgcctgcagacggacaccaagcccgatctgtacgtgatgaacgaggggcagccccaccatgaggagaattcagctgatttcgatttgaggttgatacatatcgaattcatttgcatcagtcacttggtatatcaaattgttgtctgccgataaagataatatcagacacaatggcagacgactttgatacaggggatatgttcaaggacccagagggcttctatccgcctgaaaaagaacctacttttgcagagcacaggatgctctcaggccaggtagtccgcgtgcgcctggttggcagccatcctctatatgtagctattcccgaattggctcatggtttttggcactaacatctctatggagggaaatatgctctggaatgccggccgcataagttcagaatatatcgagacgcacgcccccacactcatcgctggaaaggacgtcctcgaaatcggcgctgcggcgggagtgcccagcattgtcagcgcaattatgggcgcccggaccactgtgatgaccgactaccccgatccggatctcgtcgataacatgcgccagaacgccgatgcctcggcgtcgatgatacctaccgacccgccgtcgtcgcttcacgtcacaggttacaaatggggcagtgatgttgagccgctcaaagcgtatttacctgaagagtcgagggccgatgggtttgatgtgctcatcatggcggacgtcgtgtacagccatcgggaacacgggaatttggtaaaaacgatgcaagagacactgaagcgacaaaaggacgctg

SEQ ID NO: 3973 - DNA, 867 bp, Emericella nidulans
tggaaagaaaacagaaggaacttactcataaaccccattgtatttggaagaacatctctctcgtctcctcgccctcacttaaccccatacttgggaaatacgcgacggccctcttgcccacggccagtcccatcccgggctcaacttcatcgagcctcacaaactccggggttgtgccgtacactctttgcatgagcttctggtggatgttccgcgctgcatagtggccctggtgcattgcagcgcctgcgcgcttaacggacaagcacccttccacatctgcggctgtactaagagctgatgtgccgagagcgcccagatctgtggatatagagagctcgctgccgaggctgagtactctgccttctactgggggcgagtgagttaatttttccccccctaattacacatagggtagcgtcttgtgctaactgaattgatagcgatgatgtgttcagttctcgggcgtcaattgatgcgatctttcattcctctcagaaggataccagtggtgcagtagacgtcctactcgtcggcttcgaggatggcacagttcacctacgaatctttgattgctttgaaatcggctccgtacgattcacagctcctgagccatgtgctattctccagcatgcatcgcacccactgagctcaacacatgcgcttgttgcatcctccggaaatgatttgcatcttcttacgcttgatctgcggttcattacgagatccggtcggtatctttcgcttcttgcgcataagacaacgcagcttcaaagcctactccggtacatttgtcaggtacagagacagatcgagatggaatggaaaaatgcgcaggagttgccggccaggtatatgcgcagtgtg

SEQ ID NO: 3974 - DNA, 4573 bp, Emericella nidulans
ggaagaattagcaaagaggtggagattcataaagaagtaatagttgaaaagaagggtaacacagggcggatttatcgggggatacagttcccccaaagacccaaaggataatttaagcggctgcaaaagttacaacatggaaaggggtaccgcaaattcctgggttagtgggccggacccgcttaagccatggaaaaaacatggggcaactccgttcatgacataattcaaaaaatggttggtaaacagagcccttagctcgaaataaaaaagtccatgtggattaaaattaacctgtcccaaatccagggatccgaaagcaaaaggataacccttctttccaactcaaaaccgggtaacatacctcttaagaccaataaaaccgtaaaagcttcttataacaacaacgtctgcttctgtttttgcagctgacgtattagttccaaaggctttccccgaagcctttccggtatcttgattgactcctgtcgctctccaatagccgcatggaagcctgattttcttagttgatttcgagcggcttcgagcccttccttcctagcaatttcctcctcccgcgaggagtagttcttggacaaagggttctcatagtagcttgagtgggatgtgaaaacattgtgcaggccaaactgccgaggaaagacgtacttcatcacatgtacggtctgttgcaaagacttggccgagtgaaaccggctgagaacatctagagcttgtcaacgtagtgctttcaagtcagcttgactaagactcacgatttggcagcccgaaggtgattccaccattcgcgtttagatgcggacgggcatatagcatacgttgacggcagaagatgatcgcgttaggactcaattgttgctggttttctttcggacctttcgtatgtgcacgaggggctgcaccctgccacggcacagcatggcgcttgacaggtgagctgctgccattaaatgcagcaggacaatcttcgggtgaagtatcgataggcttaaggctcgatattgcttgtcctagattgaaagatcagttgtgagcttccagggcaaaacaccgtttgcacattggataacgaaccacttatctgacagtaaacgccctttctcgcgtccacagccataaaaagtccgcagtccagcaggagcttcagcatgatttcatcgccattactccctagcagggcgagaacttccgtccacggtgattgtttgagcatttgaacatttttattgggaaattgtgccgcgacgttggggatactgcatggcagtcttccgcccccctgccgatatccatggctgaggacattttccagtttcccatgagaagggcggttgaagatggacgagatcgcaaaatccacaatctacggcatgaccgatattagttcagcttagaaaccgcggctgggggttactttacctcagactgtggactcacgggcccagaatcagtgccagtctgagtcgtttgctgtgcttgcgtgaatgcgatgaagtcccgtcgtctctcttcactacgagttggcggtagctctttcaatatcccgactagcgtcgtatctagtaaatcagctagatctttctcgttcttaggaacagcggctagaccatctctggctgcactgtggcctcccactgcagcaattcttcggcgacgcgctctggaggatcgaggtatacgctgcaggatatactgccgcaatgtcaccacatgacggtagtacagggagattaccggatggcagatcttgcctgcatcggcggcttggttgcggttggtgcttagagaccgtgctgtattgccggcgggttgttgtggtgatgatttcgcccggcatattgggtcatccttgacgggctccttgacgggcctcttgcgttttttacccatatctttggataacaattcaacggctgggtcctgaatttagcccatttggattatagctcaatttcccaacagtgttactgggttgtagtttacaggggtggtcgctgaacggagacgcgcctagaacacgcgacgcgagcgaagagagctcaaagaagtgtggaatcaggtatgcagcagcaccatgaaccatgcagaataagcgacaagacgtcggataataatcctgttcgcggtgaatgttgcaaaagataaattagacggcaaaaaggattgttgtcggagacgctacctatacgctacctatactccgtagtaccttacctggcgggtagatcaacatccagaccaatgtagtgcaggtgcaactgagtcctatattgctttactaaacggacattgatgtataatatagctcggtccccgtcacttcttaatactatctggccggatgcaaaaaatcttgattggtttaagaggatttgttatgtactggcgtcaccgcaatcaccgcaatcttagcgtagacaaactatacatgcttcacaccaagcaagcaagcaagcatgccgatgaattgcgacagcgagagtgcatcaaagctatggacgagcatcatttcggagtatatctaataccatgctgtgcttgatcgatgcttctcgatcacagtcctaaataaggatgcggtgattccaaaacaagcaacggaaggcccgagggtcggttcatgcagggtattctagacagacaagtccatattacaatcgcgacccggcaatccacagtccatctgttattagctttttgctacagcagctacgactcggagaatttccccttgtacataagtaaggctcctgggcaccacgcagctcagttcgcaacgatgcggacaatattgggtttcatacccctggctagcatgtggctttctgtgcggcggcagacccgccgtccagacaggccgtcgagccaaagatactactatgagtatacctgcacattcaagcccacagccactttatatcactgcggtctcgagtacagtgattcgcgacaaccaggacatccttgacactggtgactggtgggtgcggaattccatgactctgcatgatagctctgtctgagatcagcctcattgaggcggcaaaagtatagctgcgactagacctgaaaatcggcaaactgatacagtgccaagtgacgagtgacaccgaaaaacacgtcgtggtaagcgcacaactcgcatcaggcaagcatcaggcaatctggagactccgtttgtgtacatacagaatctttaccgagttccgttaccggctaacagcctggaacctggaaaacgggatcttggtaaaagggtcaggccaggaacagcaggcgaccgttttctgtcacagacgcaagaaacttcagatccgcgggccgaaggcgtgtcgctggcacaggcgtgtcgctggtcttgactgggcctagagccctctagctcgaacaaagtcggaatagatggtctaaaaccactaacatccgcgagttcccggctgaagaagcttcatgaagaaaaatctctgtagttgttttcgttgaggtcggttgatttgatcataataacaattcccaacccgctgacttgtcgacgactgcactatggacccggccccaggatccctggaataaaaaaaaaatgtgtgggatcgagtctccacacccagcatggcccaggcctgtgatgaactgtgtccgtgacgagtttcgatgacgacggtctgcctgtacccaaggatccctgggttcaaatggatggatctggtctcagaagacaggaacaggtcttttcaaggcgatgcaagaaaacacatacataacaagatcggcgtcgacacattacatggaggatgcgggaggagtcagattgaacggcattgtcagtgatggtatccccaataatcgagtttgtgaacccaagctcgttagagcccgcggccctgtttccgtagattttctgtagacaaggttagaggttaatcaaggcctgatatgcctgatgagtcaggctaaaaggaaggcagcaacaatagaacttcgatcccgatattttcgtctatttttcatcatcaccaatacacattcagtaggttgattgttgatctcagatggatagaaccgaggatcgcatcctgggctcatttccctctaagatctaggcttttgacaagactagggcgtcccagcatctgcgtcaagaatagatggatcgactggccaaaatagtggaaccataactcctcttgagtacatcttttatccaataatagtgacttccagaacgcctttgtcgaatgtcgttgaaattatgtattctcaactatgcgctagtcctagaaacctgcttgagtcgagagtcttgagcctggaaaactgtatcactgtgtctaatctggattcgtcacagggtatcaaacatcggatcggcgatctcgagttcttaatcaaatcctggtgggccagcctcggcgaagggctgcctgatgaggaatggaacaaagaaatccgccggttgagttcagatttcaggccctttgtcttactcgaggctgagaggaactttgtcagtacagtcgcagaccaggaagtagtacacgaaagagagacaagg

SEQ ID NO: 3975 - DNA, 4573 bp, Emericella nidulans
ttatcagaccgtgtgcaggggccccacgtttgttgccggcggtgttagttcactctcctcgtatccccaagcgcgtgatcgtgatgactacgatcgaggatataatgacagtcatgggggttatagtgctagcgatgccaatgccatcgccgctggccctccgctgggagcgacacaagaaccagactatggatcgctggaagaagctgaggcggcattcatgaaaatgctcaaacgccacaatgttcagcctgattggacgtgggagcagacaatgcgtgaaacaatcaaagaccctcagtaccgggctctcaaagacccgagagaccgcaagatagcgttcgagaaatacgcggtcgaggttcgctcgcaggaaaaagatcgggcgaaagaaaggttcgctaagctaagagcagatttcaatactatgttgaaacgccaccctgaaatcaaacattacacgcggtggaagaccatccgtcccatcattgaaggtgaaaccatcttcaggtcgaccaacgatgaaaacgagcggcgacagctctttgaagaatatattctagaactcaagaaggaacacgccgagaaagaggctgctgcgcgcagagctgccatggacgagcttgttggaatccttaagtccatgaacctcgagccctatactaggtggtcggaggcacaagccatcattcaatcaaacgagagagtacaaaacgaggaaaaattcaaggctcttagcaaatcagatattctgactgctttcgagaatcatatcaagtctcttgaacgcgcgttcaacgatgcccgacagcagcaaaaggcagcaaaggccaggaaggaacgacatgcccgtgaacagtttgttgaactactaaatgagttgagatctaaaggggttatcaaggctggcagcaagtggtcaaaaatttaccctatcattcgtgaggacccgcgttaccttgggatccttggaaactcaggctcctctcctctggatcttttctgggatgtggtcgaagaagaagaaaggtcgttacgtggaccccgtaatgatgttttggacgtccttgatgacaaccgatttgacgttacctccaagaccacctttgaagaattcaactcagtcgtgtcttccgatcgccggacagcgaagatcgaccccgaaatcctccaggtcatcttccaacgcatccaggaaaaagcgctccgtcgcaacgaagaggagaaacacgcagcagaccggcaccaaagacgcgcaattgacgctctgcgctcccgcctgaaacgcttggaacctcctcttcgttccaccgatacatgggaccaggtgaagcccacactagagagatacgacgaatacaaggcccttgagagtgatgaactccgtcaaatcgctttcgacaaggtcattcgccgccttaaggagaaagaagaagatgccgagcgagatcgcgagagagacagagatcgcggcagccgccgtgaccaccatcacgatcgtgaccgtgaccgcgactaccgcagctacagaggcgagcgacgcggccctgccagccgccacagccggactccagaacccgacgcctacgaagccgaccggcgcaaagcccaagcagaccgcgagcgctcctaccgcaaggcggcgagcggactttcacctgtccgcgaaagatgggacgaacgagacagagaccgcgaaagagatcgagaccgccgggaccgggaccgcgatcgcgatcgcgaacgaagcacacgctccctcagtcactacgagcgcgagcgccgcgaccgcgaagaagagcgcgaacgctctttaccgaacccgcggcgacccccgcggtagccgcgacgagctcgactatggcggcgattcccggagcgccactggtgcgaccgcaagcaatgagcggcgacgccggcgcgacagcgacacggagagcgttgcaagtcgctcaactaagcggtaccggcgggatagtcgggatcgggacgcgagaaaggatagggagcgcagggagcgcacgcctacatctgctgttcctgggcctgcagcggatgaggcgaaggaggagaaggctgtgcattcaggtagtgaggaaggagagattgaggaggattagaggtgtacggtgaatatgggatcttgtgagccgtttatactcatggccctcaatagggggagaatatgcgtacatcgttgtagaaattaatggatccatgcgctgcttaaattgtaccctacttatgcagttcacacagattacccgactaatttcttagcgggactaccaaactgcgactatccgctcattcttctttctatcagaccataaatctccctcaacttgcacggcaccaggttccgcttgatcgctaatacgcagtggcgcgggcttggtccattgttccaaattccatccttatcatgctgcttagggttacagggtatagaccgatacgacttattgtttcgaacgactgccgtgactgctgaactacttacacaacattgttttgggcaagtccaagtccaagtctatcaatattgatgaatatctacccatctttcactgaataagaacgagagtagactcaaccaaaattggatgagaagggactatatccagaaggataggccacggccaagttaacctggcagtttcttcaatacgtagcgcgtgtcttcagcctgtgatttgataaggtggagcaatcgattcagaatacaccagtgaggggtatattaaaagtgaacactgatgtagtaaaacaaagactagatacttccatagataacctgaggttcggcggagagatgcgcattatcaggactcagatcaaatacgtggttctaggcgagtaggattatcccgtaagctactggctgatgcaatgttgtttacctaatgtaaatcgctttcaaagcatttatcatgtatggcaatacagaagcattatagaagcacaagaaatcaacccggaatcaatggacgcaagagcatggaacacaagattgtaacagaagtcaggttgtattaatgacagtctgtagaaaggttcaacataaatgtcataaggtcagtaaggtcgttcgtggtcgtggcgggtcattcacaattcatttttcatgtaagagtcatgggatcatgagtcatggtcaaaatcatgtaatatcagacagttgcaagaagagaaagaacgcatgaaaggtatttaaaatgcagttagatcatcacgccaggagaccgcccacgcatggagcgtctgtcagaaacggaccaattctcttcaacttcgtcaggatagatcgtccttggcgtttggtggtttaagctctgggtgcgttgtgggcgggaatacgaatcaaaatgggagcgcgagttggagcgggaatggcccttcgacattgacttggagcgttctttacagactttatgcatctcagctcgctcacggcgtttgtggtcgaagtttctccattctgctatggcggagttgatacccagggcggcaaccccgacactggcgatgtcggagagctggttctttcgtcggcggtggcgggcctcctctcttgacatctcaccctctctcacctgctttgcgcgttctttgtgtttttccatgctttcggttagggaatgagctgcgtggatagttgccgcggccgcgaggccggtagcccatagtgtctcccgattaagtttgctgagtttcttgcgatcatcggtactgtcatccgtgtcagaatcaatctgctttgtatcgcgtgattggtcttgtgtgcttgtgctttgggagccagggcgcgagtagtgccccacggtcgtctgatcgtagttcccttcggctctggctcccggctcggggaggtaataagctcgactcacatctctggaatgccttgtccgcggcgggctcggatggcggcgataatattcgtcactactgtagccatcatccgagtaatcatcgtaccgtgaagatcggtggtgacgacggcgccgatcatccttgtcgctccggtcactcttatcgtcgaggcccagagctgccatacctttgttgatatagtcagaaacgctcttgctccgcttgtggcgaggacgagacccgtaactgtcgtagctatctctagagttggagcggtgacgaggcccaagatcgggaatgggacttttggaaccgatcgtaggcctccttccctgcagcagctaggatgcccgcaatggcggcgtccttggccttgcctcggcccttggagcgggaacgggagcgagagcgtctacgagatctcgaacgagagcgtgatccattgacgacacggtttgtagcgaggccagcaagcgtagattcaaggatatggcgtttggagtgtttgtcagggttccggtcaactatgccatcggtgcctccagcagccagcgcagcggtcagaacgcgttttcctttagcaccggaccattcaccgggttccttgcgtgcgcgaaacgcctcaattgccccagcagctagagcggccttaactgcttgggcgatgcgcgcctcgctcttgtcgcggtggtggtggtga

SEQ ID NO: 3976 - DNA, 2856 bp, Emericella nidulans
ctaaccaccaacagagcgttcgacgacacccgcttctcccccattccaaagtccctaatcccctccctctcctgctctctaactctcctaggctcatttgaaccctgcacaagcgctttagactggacattaggcacccacggcatccggatttcattcattcaccgcggccgccgcttcggagctacatatctccccgacgtccccgtcgagcaaggctggacgaaagaagaaaccataaaatccctaatgcacaaggctggctgggatgggtcatcgcatcaagaaagcagctcgcaccggcgatttctgcgcggcagcagcagtaacagtagcaacactcgcagtgggtcttcgaaatcagagccatgggagcaagtctcggattttcggaccgtgaaatatcaaggtctcaaggcttctgccgattatacgcagtggcaggagtggcgggagtgggtactttccttggatgatgggagtgggaagttgttggcttgatcatggcttatcgccgttctgttttgtcatatgttaaccatctcgcgatgtaatggcaagagcatatggcttgttacttttgataattcatacagcttccgatggggtatcacacagttattctctagttattattaaggacattttgagcttaccctatgtctatgatgaggtcgaatatcagaatatcctcacaaaacatacactctaagaagacaatagctaaccaaccaaaagatcaccaaagaaatcttatgtgaatgaatatttacggtagcataataacacaaatcccgaacttagtatattcctatcgcggccattttctgtggccagtaagaacaccttcaacagacagtaaggtggcagcccctggctgcaaggaaactcggagagggcatcaggaggatgtcattaatggataacatgggaaagagggtatcgctatatcataggcagataagtaaataggtgtggcaagtccacgaatccggttcacgcagtggtacttatgttcaggtgctgtcaatataatcgtatcatatcatatacacaaatcaggtgcagctcaagtcaccgttcactccgcggcgcagtccgactccacaacccagcaacagtctccttgactttccgctcctgttctcgaatctgctgctccgtctggccgcgcgcattactgcgactatcaatctccatagcatcttcattctcccgctcacgtggggtagtcctgtcttctacgacttcactcccgttaacgtgctcaggcttgggatcaacactcattataccatccatcatgagaccgccgttctcgcggagcttgttgatggcacggacggtatcgatagccttgtgcagcgtacggcgggcattgaagttcttcttgatgttggggaggagatcctcgccagaaccgaggtcgtctgttgtgtcgtagggcggattgatccaggggtgctggagggcttggtgggcggtcattcgcttcttgggattgactgttaaacagcgcttaatgaagtcacgggcttcttgggagacgccgcgccagtactcaactggggtaaatgagaagtttgcagttgcaatggcctgcacttcttcaaggttggtttcgcggtcgaagggagtgtagccgcagagcatgaaataagtgataacgccgatggcccatatgtcgctgtgccatcattcgagttagttgccgatgcttggctagggcgggtctgaagggtaaaacctacacaggctttccatgaccgcttttatcaaaaatctcgggcgccatgtatcccggcgtaccacacgtcgtggtaaggacatgaagctgctcctcgtccatgatccgagataagccgaagtccgcaatcaacaagtctgcgttgtcctcaggcgttcggaaaagaaggttctccggcttaaggtcccgatgtacgatgccgtggtcgtgtagatatgccaccgcagacaagatcgcgcggacgaggtcagcggcatcggattcatagtaactcccttttcgacagatgcgatcgaaaagctctccgcctagcgcaaggtccgtcacgagatatactgcagaaaaagcgagcagttagcgccttcacagcccatcttatccttcgaccggagcccgtacagttattcatcgtctcaaagtaatccaccagtgtcaagatgttctggtgtccgtgtagacacttgtttcaaaatcgcgatctcattccgaacctatattaccttagccgacgcttgaatttcagcttcgccggccacgacactcgaccgtaggcggcaacagttccctaatgagcgtaccatatgttcccgaccgaccatcagtcgcttattgatcaccttagctgcatagtattgtccggtatcgatatgtacgcattccttcacgaccgagtaggagcccgctcctagggtctttccagtcttgtatcggcaaggttggaccttgggcttctggcccggctggacttgagaagccattacctaaaggataaatggctcgtatcggtcggtcggtatcggtgggtttgtttcaggagagggagtttggtagagtttcgaggcgggttgagaatatcacggggtagaaatcgcactatcctatctttcaggtgggtcagaaggagacgaagcaaagaatacaaaggaacagtaggcgacaatatataaaagctgaatagagaataaattgggcttcgacgataacaagccaacaaacgcgaacactagcagaggctcaaagctgcagtccataggcacagggtctttggtgaaagctcacttcacgaggctgactttctgcggggcctctgcaataaagccggatatgtg

SEQ ID NO: 3977 - DNA, 3293 bp, Emericella nidulans
tcaatcgatacaccatctttactacttcttctttgagtacttctctaataaggtggtcagctcgttgtagctgatacggtcactgacgatgtttagcgacttgtttcccgcaacatcagggctgtcaatagtgaatactacgaatgcggcgaggttatcaatatgtgtgaagtcgacagccgcatcagcatcgcctagaatgtgcagggtatagacggcgcgtccagctgggtccagggacaccaaactggctctctgtcctggttgtaaaatcgccacagccgatgagcgtgtaggtcattctacccgcagaaatgggtgggtgatgaagggctttgcggttgccatcttcctttatgttccatgtctgcgcatattatgtcagtgtctgtcagccctggagggtaatataatagcgcatacagggtgtagaactccacgcccgttctcatctgtgtgaagcaggtgcatgccatatccgactggatagaatcgttttacgccagctttgtccgcagcgtcttggatcttttcttacgccatgagtgcttttccattcaacgcgctcacgacgatctccaccccggccaggattgaaactagctcgtccgtacctgcttccaatatattgatcccagcagtcttgaggcgtttcttctcctcttcacagacatcgatctcttttgccttgttttcggatgaaggttggtcgattgaggcgatctcatgtggtgtcgtagtaagcaaagccaacagaatggcccggcatatctggcccgtggagccgaagagagcaattttcgtcatcgtaccttgatttgtatattgtatgagaattgtgcgtggtaaccttttgaatcagtcataagtgaattcataaatatcaactataaccgtggtatcattcgcacgtcattccgattccaacggtcccacttctcaagagaacaatcgagtcagttcaactaaaacctcgaaaatatgccaaatgacattcgaaagcatattttgctgatacggtgattctgtacagccattatgcgttaaaaagaatgcaccatattcctgatgccgtaggctccacatgctgccgggttcacgctcttcacgctcggctcttcgtcagctgttcgtgccatttccgacctgctgatacgcatcggttcttgtattttgtagaaaaccaccactgtggtccttgtcagaagggttgaatctccccagagcaagaaaaaaaaatcgaccttgttaaatacccttgaggttgcaagagaacataattggcgttgtgaaatggatctcagagattaagaaagttgggatcccatagatccggcatccggtagttgaatgtgtcgaacatattgttgaagtcgagaggcgaaaagtccatagggttgttggttagcagcgagagaggatcaaacgacatatcaggtgtagaagagccaaactcgggggtttgtgtagaagatgggccgatatcagaccagtcactttcgggttggtgcatgaactcctcgtagggaaggcctgaaataacgtgatgaaataccttcactgatcggtgcgcagcttgctcgacacttttcaaagggtcatccccattcagccgtgcttttgtagaagccagggccatggccaggaatgcataggctttgcatccattcccttttggagttaacctactgccaaagttttcccgagtacgttcaaggacacgcactaaaacttcctgctgagaacgtactatgtcgttaagagaccctccatgtgtcgatggcgctgaatttgaagccgattctgtactctggagagataattccacgcagagagtaatggcagcatgaaaacattcatcgcggaacatgccgccgccaatctgtcccagacagggtgttcgagacgattggaagctggggagtggcgactcgaactgagtaagcatctccaaggatgactccaggcagacctttcgtgagtaggagtatttgggcgacaaagatatactaagcgaaaaaggtcggtgcaagatgagcagcgacctttggaaaagaaatagcataaatgatctcgcaaaagatggggtcccgtcagaaacaggtgtaggaaatggaaccagggcttcgttcatgaaccgtatgagattttcgccaaggcgcaatgcctcatcatatgccattgtaaatcgtaagctattcacagccttggcaatgcgcacccgcaaagggaatgactgagcaagcatagtttgaaagctgcattgagtcaagactgtcctttccttcgctacgggagcctccaccaaatcctcagtgagatctgaatcatccaaattcgaaggcagatcgcagtcatactggtcggtatcgatggacggtgggatccctacgtcaatagaggcttgcagttccagttccaggatggttgcccatagccgacggcgcatttctgcccagaagggtgtcattttcccaaaccttgcgggatcccggtgcatccccattattgtggccgtatgaataagagaacccgaggtgagccatacgacatcgccatcaaccgcaagcgcttgacgtgcaatcatcaggaggcactgtatctgcagaatatcaaatttcgccgtggcgcgcataaagagagatccaatccatctttgaactccgaaaatccaaccgacagcaacatcgtgaagtgtgtctttgccgttgaccgtagttgaagaactaataaaacagctggccgtagccattaaggccaggagcttggcgacgaaaacggtgtcggcggcctcaggtgccgtccaataagcctcgtattctttgaggaagctcggaatgtggagaatcctatacgtagtttcaaacgtggatagatagagatgcaatagttcatctgcgatacttcgtggcggcagcatctccttgagtgaagaaggcgtcccatctttcacttggtctcggcgctctatctcttgggattttagtttatcccttatcttcctcagttgctgaaaatctgagccttcagccttgagatgcttcttccggccttggaggaaagctataacgtcattgagctaatattgttagctggcggtagcaataagacccctccagttagccacttacaaaagtgagcgtcaactctgtgctggagcgtccgcgataacgcgtccggccgtttctgcctcggaagcatgctctgccgcacaggttcattacttggtccgagatgggatctgcaagcgtccgcagccccagctccggcatacagtcatagcctgagctttc

SEQ ID NO: 3978 - DNA, 3677 bp, Emericella nidulans
gaaaccctcactaaagggatcactcccggagacacgaaaggatttgaaaatttccacgcttggagtctcaccccccgctctagactcagatcgcgaaggaatctccgaacgcgtggctgatgaagaagtggtgttcaaacggtctgagcgggactgagattggggattgtcgtcatagtggtcgtggggattgcgggcagagcctggctgtgtgtaggcacgagacgctagggtctgcggtgcgccgtagtgattactgggagatgtcggcgacggtaaattgggtgatagttgtgactttccattcatagtgctgaggtgtgaggatgcggcgacagcagcggctgatgggtcaaggttggtgccatcattgtacgcccggttctcgtggatagaaggaggaatgtgggttggagagttgtttttgggagtagtgcctccatgaactcgtttagacaggtttcgggacaagatagagccggatcggtcgaggatggtaatgccagactgttggcctgtgagggttgaccctgagagtctatcgtcataatagccgtccgacgaagacacggctgtcgggggaggcagcggttgggatttgtcctttgccattttgaagacgggcaggagctcctccctcagtcgtcggtagtcctccaacacacgccgtagctctgtttccacagtcatgattttctcgtcccggagtctgatggattgaatcaggcgagctatatcttcctgcgttgcgctttcgttcatgctttgatcggcagctttgcgacattagctaaagtcatagctaacggtagaacaaaacttacaaaggggaatgtagtggtcggcatcgagcggaatatcctgctttactttcatctcgtagacactcttgagtatggtcaaccggtgccccacactggcaatgccatttctttcagctcatcgtgtctcaacgcgataacgcctctccaacaataccgttctctgcacacgcgaagttagtggcgccctattctacgcaggatcctgcggcctaactaacctataaacgcctgacagtattggcgcaggcccaagaaggcaacaaagctcgcgcattcctcggcagtccattcggtgattatggtgtccgggatcttggaattatcttcattatgggcaaaggtcgaagtaggctctgctgacgggaactctgactccgatgcagagccttctgaatccgttgctagatgcggggaggtaatgacgctgcgttcgtactcatcatcggcgtctgaatccgcgtggtagaaggtatggagggacatgacgagagcgagctgacgacgcccacgaaaacgagagaggtgtagtagacgtcgctcggttggaaccggtgcaatatagagagcggcggcgagtgaatatgaagaacttcaagatcgtaagagtgtcgtaatcgtgtcattcactgtcgaacccgaaagctaaagagtgtgcgagaatcggccaagcgggtgtgccacatgggatggctggcggctagaacaagaagatcggcgactcgagagggcgagggcgccagaacaaagagggagctagcagagaatccgccaataacccagaatcaagaaaaacgtagatgcctgagaaaacaagcaggagaaaattgtgattgatcgttagcgctagcagcgaccacggtgatgagtgcgaaggcggggaagctcaggcacagatgtcttgattgggagcggactggacaaaaggcgggaaaacgcccgtccagagcataggcacaaggagtgagtggagtgagggagagatatagcgatggatagtctggtttaatggctggtcccagagtgatggcgaatcgaggaagtaataagctgatctgcttggagtgaagaccgcgctccaggatcaggatagccgcacgtgatgcaagtctagacgctccagctggaggacaacaaaaaggtgctctattttgatgcactctgcaaaggatagcttgtcctttatcttcaaatccaaggataacaatatggagcgtcggatcctaccgatgactccttaaccagcgaaactcaggcttcagcacttatccttgcattcaaccgcacccagccaagccagccttctagggccattgccttgtccgagagtgcgtccggagcattgggtggatcattcaatctatgaaattgataatcgatatgcaaattcttcgacagaatcctcacgaagaagagaataggggatgttcctggcgactaacagtcgttaccgcctctggatggtcaactcgaggacgactattgcgcacgcattgctactagtttcgggcgtcgactctctacaaaaacaatatcggatgatggatggatggaccctcttctccggatcaataatattcgcgattgacccaagatgacctgggtcaagtctgtcaaaaaccaatagtgccggaccctttacttttttggccatttaggggttcgaatcctccgccgtcgcccgttgcactggatagctccggctccaacaagtcaacgttatattgtacgcggcataagccacaatattctgtctctccgagctttgccattcctttttagcaggacatgggagtcgaggtcgacaatctgcgtcacgcacatctgattcccccttgaccgactaccttgatggctgccctgcacaccaatacgtatcagactatcagctagcctgcccatcacttaatggcaagacaatcgaacgttatgcgggtctggggccacgctcatcatgggtatactacactgtttctccagaagtcccagttcacaacctcggtctccttgtatacaaagtacagcaggcgccgcatcgtccgaagccaatgcgcccctgcacacgtatatcccccgtctccgcatgcataactacccactcctgttctgtgggccatgcggcaagacaactcgcttgggatctagcgttgtttctatcatggatcctggccttgaagatcggttagcaagagccgagtcttaactccaagcgccgaaggctgctataaatatcacaactggccttatgccttgcgctcgggtccacatttttaagagggcgcttagaaggttgaccgatcgctgcagccttatcaacgttctactacttccagacgagagattgtgaaatgtaatgtgcgtcaattgtacgaagatcgagtaacatgttctgagttactgtgatataccataaaacagaccaaatagctaccctggcagtcatggcgctctgccgtcagaactatatatttgcggacactctggtcgagcttcgtgaacacgatccattgaactatgcttatacaacttcctgttcatccaacataaagtaattagtaaatgttctggatgggcaagcattgtcctatagtaccatctctgagccatcgtcgctcggttcaaagggttgagtagtatctttcttccgaattacacccggatcggagttgcatcgcttctgtttctttcagcctctgtcccagcctcagccttttcaattcttaccactttttatgaacccaatcagttaaagagacagcggacagttggataattcagcattgccacttggatcgcaaccttgccgctcggttcggctaaatcaagtccttcgttggcgcattcattttcttcggc

SEQ ID NO: 3979 - DNA, 4858 bp, Emericella nidulans
catctgtccacccaggacactccagcatatcttccacgagcctttttcggaaccgcagtgtagacccgaagcttccacggtcattactattattcaattcttcccttcctcctgatccacgctgctccacattcctactttacgcactctggaactagtcgtaacaaagcgtagatagcgtcaacgtcaataagagctacttacctccaaggatgcgcgagacgacgagagcgacgacaataccatatgactctgtaaacgaaaaatccagcacattttcaaacactactaacgagttgcgttcgcttgcagaccatcttggcagttccggatcatcactgacttcgcatcactttcatggcaaagacatccttttcactccagtcattacttgacgaagttgtatttgggtgcgctgtgaagggcatttgatgttcaagaatacccgtggttccttagctgtttctgcgacaggtttagattcaatgagggttgatgagcctggggttgttagtggtagtgttggtgctgtgactttttgctgttgtgctgctaatttgcttttcagccagttacttctgagactatcatgctgtataaggaaggaaatggaggcagctcagcctccagctgacatattccgtggatcatggttatttttaaaacgcaatgcaaatccgaaagcttaccttcttctggattaataatgtctctattaaccggcaaactttccaaactgatgatttgcctaatcttacaacccatgccgtataaagtgtagctaacggatagtgactgtcaacgaggcctgggagagtaagagacgactaacctgaatttacggctattcccaacaccctctttcttaatgaaccatcacacacgctgtgctcataatctcactgtatgctcaatagagaatataggtagaatcgatgaatggaagaacggtctatgtacacatcctgtcagtaaatctgggatatcctggatatctggctagagtggtaggcgccagactgtgtcggttttcgagaactgtagtgtggactgcttaatacttcttcgtcgttgctattgcgtttgttatgatagactgggaacgccgtttatggcggtgttggtggttgttgtggtcactgtggctgttgagttggctatcattcagtctttccgtagagatattcgcgggttgtgcttctcgtcggctttagagtaggacgatggatctgttagtatgggttcctagagttagaactattctaagggcatgcggagttgcattgactataacaatataggcgagtaggccaggctgaggcagtagcttaataacagcagacaacaaagggttgcataaagatcgcagcctcgagcgaactcgccagttgaacttacctaacttgtacataaagaaatgcaaagaaatcaactttctatatatgagagtaagaaattgtctatagttacgagcaaccaggctcaatttgagggagcaatgggttcaactgtgcggtctctcatgatggatgagtcacagtgttcttatttctaaccatgattattcatcatggtcattccgagctgcagctcgctgaatagttgcttaagagtgggtgtttcctggttaaacggcaaagccgaaagcttgtttccccttcctcccccccctcggcgaagacccctaccctttgtcaaggagtagctattctgataatttgactcaaagaccataatgggatatcaagcttgcgatatccagattagcccaaagccaaatgcgttgctctgtcttaacgactttgccgctgcgggaaacatacatcgactaaattcaaggcaagtacttttgttgtgcttgtgtagaccacacaccctcaagatactagctctatccttggtaatatattaactaaaggggaacttgacgaatggctgggtaacgatgaccggcatctcgcagccagccacattggtagaggacgacacagaacagaagctagcaggaataccagcaacctcactatcacccaagcaagagttctcaactgttcataaaatgggatgttctctccatggtattaggcatactaaagcgtatagaacgaagaacctgcaagggagtttacagaatttaaggcgtagaagcgttattctggcatgcgcttgagggagaaatatgcggtgagttaaataatttagctcaataatattcttcctcttgctgtgaattctgttaatatgagtttctttgctttttcgattttccttttctttttataaaagatgggagaaagaggatcttggtcttgacgagcctggggaggagagaaatataggattacaatcaagacatttaattaggtgattatttttgagatccggaacccgcgctgggttggatgatcagcgcagaccggtattgcactgtcattgatatccaaagctcatgaagccaggcccttatcagttatagggcaattttggcgcttagggctgtttcccggttcttcttagttcatgagcacagattcgtcagggatataaatcttcggtctcgatgccttttacgatattacttgccgagggccagaaataatgcgttgttgtgcatgcaaacctgcaggttaggctctgaggagtttggtagatattcgagaaacaacctcacatatgtacaagacgggaaacagcctctcaacgctatcaaaagcacctgcacagcatctaacagacattcaaggtcgcgtcaccagtaatatcccaggtgatattctcgccgcacggattctcaactacgttcgccccattgacctcgaggctgatgctcacatcgcgcgtattctcaaactcatccctggccgcgatcctcacatcgcctcctccattgacgctgccgcccagaatactaacgccatagcagttctcaatgaggatcgcgttgttctctgtgtcactgatgtccacattgccaatctcaacacctccactctcagagacacagaagatgcctcttcctccaccgcgcgcaatcacgttctcaacatagacattggtgtcgtagctcccatcgctcaggcgaccatttgcattggccatcctgaacgtcgcgtagccggtgcctgcagcgacgttgtctccgtcaaccgtcccgatacgcgcgttcgtggtggtctgcaggagaagcccgcactccccgacgtcccgggcaatgacctggttgatggtgagaccatcaatgttccaagtttcgacagcgtggcttcccgcgccagtgatgttgatcacatccatcgagacatcagaattcgccgcctcatcgcgctcgaaccggatccccagccctccgctcaaattcatcgtgatctgaccgagagacagaccagagacgccgtagaagtgaagcccaaaatacgggctcccagtcagcgtcaagtatgggatctgcacgttctccgtgttcaatgaccggatatttcctcggccgctgttcgctgcacgtcgatcgtcccgcatccttcgaagatgcgtccactgggaatggagacgacattggtgccgatagagccggatgcaagaatggacagacgctggcccgagcttatcccgtcgagagcgctagtgatcgcggtatagaaatcggacccagagtagacctcgctgccctcaacagtggccgtgtaggcaccctcggagccgtcaacgatggcgtcgggggtgcccgagccgcactgggcggagacagttgcagcgaaagctaggactgccgcagtaatgaagttggacttggtcatcctgattgaggcctaggaatgaggcttatcgaacgcactctccagctactgagaagaaaggcccttttatacatgagggtcttcaccggcccagtatgtatcaacttcatacgccaagcgggcctgaaaccccctccgtgcagatcaccagtcctgccaaaataatacctccaatgatacgagcgcgtccagttctgccgagctatgcctgacgccaagctcggggaattgctgtttctgaagagggactccgcttgcgtcccccttggctgctcagggtgtctcctggcgtttctaacatggatgaggtattccggcaggcaagtcagggactccacatacacgttcctcaagaatgtatgctcaggaatttgatatccaacgctccgtacatccggtgtccgtataaggcacaattccaagtgaacgggcccggagactagaagtccctccgcttcggtgaaaatacgtggccaagactttgcatccaggagggtacctctcccattctcggtcttctctatcccgatggtaggacgacgcctctggagcagctgtagaggatatgagaccaataagctgcccagtctattcctctctacagtcacttggtacctaaattggaacttgattctctagctcaatctgcactacgttccgctgcatgaatcactttggacggaacaaagacctttgccttggttgctcttatgaagtctttgtatattctaactaaggctgggcggtttcatctctaccttggaaacggcccaatctggttggtgaataaagcgaccgtaataacagagtctctttggctatatctatttcaaacgaacttcacgcgtaaatcaaaagactgtaggtgcttttgaaggaatgtgcatcatgcgatcaagcccaagaaagctcataggacggtgagtcctatgtaggtgaaaaggactcattaaagaagattctgtagcggtaactctgcaagaagcctgcactgtggcggcactcgtagagtgtagaccaaaaaatggtctccaaataataacgggaatcggtcagaggtgtac

SEQ ID NO: 3980 - DNA, 4845 bp, Emericella nidulans
ccaaagccgcaatagtcgatctgcacggtagcttcctgaagcccagtgtttcctacaacatcgatagtgaacgttgcgcacggtccggctgggatggagtaatcactagggttcaatccctctctgcgccattgcagggccggccttgtgagcttcaaggccaactcgtacacttcaattggcagcaagtccttattactcagcgctgtctgtatttgcttagtcgttgagtcctgaaaagtgaacaagatgaaatccaggtcgcaagatgatgtattacgcaatgtaatggtgaaagatgacctctccccctcgagaatcataactgcagattgggacaacgacaatgactcgaccacgagcgatggctgcggccgaataaccttcacctcacaggagaacgtttcaggtcctttctttgtgcttggttttccatccttggagaatgtcgagctccaggataaaggacgatcaacagaaggctttttagcagctaacccggtgcgtttgaacttggcttctatatcgggctttcagaaatctttaaatataggaaagcttcgctctctgcagtatcgaactttaacagagcaaccagttacctttaatgtgccctctttttgtgcgataccgtacactgtgacatcttgaagacacaatggtggaagcagtatatactgcggcacagcatccaggggtacaccctcgctctcaaggcgtatccgttcaatctcgacttcaaattcataagggttctgaagagtgacttggaaagctgcatgctctccagcaaccatgagaagctccgaagctttattcgctgatttcgtgaacgggttgtataagaagggatcctttttggacttctcactcgtcgcagtgacagcatcgagctctgacttagatcgacgaacaggcctcttaggatcagataaagataacaactcaaccccccgaaccaagaagtcgtcccaatattcggcttcaaggcctgctacaccaagccggttggcagcaccaacagttcgcttgatattgttcagtaggcggatctgctcatcaggctgcaggcaaggtgcggtgtaggaagatttagagagcatgagatccccgcgaatcgtctggaggagctcgacagtaaaccgcaggacaccaccaaaatctgggagcgcttcacatgagttgatgcacatcttgagaacatcaattttaagattcaaatcaccgtagcgatccagcacaatgtgccggaaggcccgttcggtgattgctgtgattgagtccgggctctgggaattattgccgccaaccgacgttcgcttccccagttcaatttgagatgaagactgcacgccgtatatctctcctatcgtagcgagaagcgaacgcatgctacggttcatattccccgggccaacatcaagggcatttatgtcgaaagcagtatcactgagagatgataagcccgctgcaggatgaatgcccacttctgcagccccaattttgcgggctgttactagagctggaaccaggatagaaagtagctccctcagaacaaatgcctttttccgtggcaggtcaagcgcgttcaagacagagacaacgcctatgaggataggtatggcatctgtcgcaggcaaatccgagccagcagaaaacggcaacgcacggaacaggaagtttgcaatttcgttcttccgaagaattgtcagaccaagaggacgctccggccgaacgagaggctctagcggctcattcattacaatatgcttcaaagcgttgtcatccaaggccccgtcgcggatgcgtgtggctactaataaccttgaaagacggataaccgtctcggagaagacgagctggggaagaggctcatctgtgatattggctgcgcgggtatataaattcaaaatattgtttgccaggtccggtagaaggtttgaaagattttggagagagatgattcgattcccggctgattgactcgaggttggatcgaaaacgattgctgccgatgccttagaagatttgtccgcaacaggataacagattggaggaacctatggacaggaagttcttagcacttaaacaatctccagtagaaaagtataacaaacctgaaagtccatgccagcccaggcgaacatcagtaaacagaggagaattgactcgagggctttggcatgccacacataatcgctacttgctctagcgttagatgcggcctcaactagttccttcagtgcatccggccaccggccagattgaagaaaaagtgtccctatcaccacacccgagcgaccctttattcgattttttgttcgatctgttgcgctcaagccgctcactgacaagcgatccctactgtgttctttggatgatggcagtgatcctggtttccctagggtggtgctggaccgactagccagctgtatggaacgagtgatctcgtcgaatgttgtcggcgtctcatgatcttcaggtgccggcgaactttgggtcgagccttgagcagtctccgaagtgccgtttgtgcttgcaagcgcaggcattgtcttcctatgaaacagcttgtctgtcggacgccggcgcaaatctggcccgcgatgtggcccccaagatgaggctttcggggaatcaatggttggtatactttgaattgtcttcgcaaattcgtccatttcagaaaggacgagagacgtgatatcgcacaggacagtcttcatcgtagtagctttggaaacctgcgggggcggaatccatagtatgttatccgggccattagagaccttgctgaccccttcgtagtcaaatatgaggagctgatgtaccagtgcccttggattcttttctcttaatagatcgagttcctgttcaagttgttcgagtcctttcggcttcgatggcttgtctgtactcgattcgggacccgtctgggttgtatcgccggtgagctccgtcccgtcggcaattgcaagaaccaccagtggctctctaaatatttcaaatggatacagttctaggtgcgatatagggggcatggagaacgaaaggtcatataggataatgcccgtcgggaacgctagcggagagaacatgtctaatattaggagaattgcaaatcagcgaaacggtcccttgcaacatcatttctacaggcaatccaaaagacattcttccgtcttcgagtaactcacttcgattgggccgcgcatcggggctgatatcccccaaacggacgacattttcggcttgcagtctcgcggcaaagctgaggaaacgagaacgcttgatcctgcccacaggaagtatcaaagctctgaggcgcgctggcgaatgggggagagggggtcaacgcccatcgtgacaccgaatggagacgatacagagccagtcgcgcgggacgtatggggactgctgccaggcgggtgtatacgagtcctaggaattagaagtcataccaactgacaggatgagggacactaagtcattagctgaaagaccgcactagatgccagcggtgccttggtcacattgaccatcggtccacggcagatatgaaaagtaattccgagctagttacaggagtagatgttgcaaaacagcaccagctgtgaccccagagtacacacgtgatcgttcgcggactcagctcccgtgctgggtctgagtatagcctcaggccgaaaaggccacttggagctccgtccctccggcttggaatatgtatctgtcctgattgctcgcggagagttttgttcctcttctatacttcaagggacgggttgcactcaaatcaaactcatatcaagtccccggctttttactttcctttctctcgatttcttacgttgttaacgacttgtttgatctgtgtcaggcctgcgcggcacatctccgacaatggccgcgatctttggcaatgggggacagggtggacagttccctttagagcaatggttttatgaaatgcctcccgtcacacgtttctggactgccgctacagtggtaacctcagtcttgatccattgtcgaattttgactccgctgcaattgttctattctttccgcgcagtgtacgtgaagtcgcaagtaagtaaatacgccactgcggtttacagaggtgcaggtggctaacaacggggcagtattggcgtctagtaaccacgttcctatactttggaccgcttaacctagacctcctattccatgtcttctttcttcagcggtattcaagacttcttgaggaatcatctggccgatcccccgcccatttcgcctggctactcttttacgctatggtgtcgctcctaattatatccccctttctctccttgccctttctgggaacttcgttgtcctcgagtctggtctatatctggagccgtcggaatccagaaacaaggctcagcttcctcggcgtgttagtgttcacagcgccgtatttgccgtgggttctgatggcgttcagtcttgttgtgcacggggtcattcccaaggatgagatctgtggggtggtagtgggccatatttggtacttcttcaatgacgtttatccgtctctccatggtggccaccgtccgcttgaccctccggcttggtgggtgcggctgttcgatactcgggcaagaatagagactcgaggtacggatactgctaatgttaatcaagaattcgcagccgcaacggcgccagaggtccgatgatttcttacgattgccgggattattgttctctggaaacaatctacctagtgaatgaacgtcttaaatgattccgcacgcgaagagtcaaaagaagtcgcgcatgttgaaactgtctttgaactattctcttatctactag

SEQ ID NO: 3981 - DNA, 1380 bp, Emericella nidulans
ttgtcgcttaccattcgctcagtcctgcagtcaagccctaagagagatattccatcaccaagggacatgaacaaatggcggctgcgttggttgatgtatggtcccggctcagcccccaagatccaactgggctcattggcctcggtctcttccggcacactatgatgctggaataacatatagtacttgaacgcgagattgccaagaccggaaatcacagtcgagctcatgaactcgtctgagtacgagccaaacccttcaagaatctcatggtcattccagatgttcaccattggtatttgggagttagcgagggagaatagaccctgagaaaaccaccttgagtaattttccagatatccgttctctagttcgttcttaaactcagggttgagaggagtttcgtatctttcgctggcatctttaatctttagccattcctggaaatggagtgagtccgcagtgactctgtcgttgaatatctggtctccaccaccaatcattacatggaatggacgagtctggtgctcattaaggacgtctcgccacaggggatctggaccgcaaaatttgttggagtctaccccaagggtgaaaccattgccggaatggtacatcacgttcattgcctggccctgggctggaacccaaaatccaatagcagggccttggttcagacgatatgctattcgttgttgctttttgcccagttcaacggcggggttaaatatccagaacgggacatccctgccagggtcggcatagagacgaaaacctgggatctctttgtatatcccgaccgtttctccgtctaatgaatgaaccctgtttgcaggtatcggctgcttgaacccatagtcaatagcacttggagacatctcataaattccgtcgtcattctcgactgaagagaggacgagttgctcctctgtatggtcaacaggcttgacatagagagggcgaccatgccttcggagtgcaccagacctggtgggggatcgatggactcaggtgctaactgaacggccgggctgtttatctgaacaggcggaggtggaagaagaaccatcggctgagaaaatagccggagcggagggacaggctcggacgaggaaaagggggcttttcgggacgaacaagaaaggacctcatcagggcactgtggagacaggaccgtggggaccgagtattggaacgccgattattcctggatatggaagcagaggggcacaattcaaaaagattaggggggggaaagcgctggggggtacatgatggggaaagggagcagaatgaaaggctgagagggaagcggccgtaaacgaaaattttgggttgaggacgggggctgggggagcccttggaagggcttgggttgcc

SEQ ID NO: 3982 - DNA, 1172 bp, Emericella nidulans
gtacaatcgttccgcggaaactacccatccaagccaatatacccctggccgactggagctcacgaagcccagtctcataaccccccaaatatcccacccaggcaaagccattcttcttgtttacccttgtaagaacgaagccgattccgcgccaaatcgtctgagctcccagaccctgtgcatcatccggtaattgatcctaatagggagaccttcttggcgaattgaagatgtgtgtcttgatggattctccaattgaccatagctcctgggcggattactgcttcgcccacggcgtccttgttggaaacgttgacattctaggagccgtaaggatccttgcgagactgaaagtgcactttagctcgatagtcggatatctgaggccagggaactgaggaaacgctttgtagatgttgacttcgtcgatggctccatttttgagactggttgtatttgcgggaaggccgcagtgaagtgctgtcaagcttgatgctgactattccaacgtacagagctgagatggacttttgggctccttctgaaagaaagtctagaaatgaaggtcaggcccttcatcccgacgacaacagactcacagggttcagggtgtttgtgagaagacctggagcgagattaggagctgcattatgccgtctgcattacggcctgtttctgtacagatctgtattgtctgtaattttcagctgatcctagactgcgagggcgaggttaccagcgtgcagacggtccattctgccgtcttccatcgatatcgagaatgaaagctctaaggtacagacgacaaagcggtatatcattatgcaagatatccagaagacatgccggataattggcaattgtgagcccaagccagatccaccagtccggactgcctttggagagacatcgccggctgcccaaaggtgtttccttttgagcgagtgggaagatagtcacgagaccacgccttcaacgacgaacaacttcaccctgggtttcttctaagcattacagttgtcctcatcggcgaagtgcttgtcgtgcttgtcggtaaccggtcgagaccgcgctcctgtcaatgatcgcggtcgtcctatatggacgatgaagttgggtctaattaactacaggaatcgtcccatggccaacgaagatgtctgggatgagac

SEQ ID NO: 3983 - DNA, 1502 bp, Emericella nidulans
cggcatcatatcaggaggggtttaatatgcacagggggcgtctattccccctattctggctcggtgggcggtcaccgacttggatacgggcgactgagggccagtctcagtgcctcaggcctctggtactgtggcatgactgctgggcgctttatagggggtgggtctatataaaattaccccagcgggtcatagatctttacgccgtaagccgccccatcctcgataacatatccctatgaatcggaccgatctgttttcagaaacaaccgttagcgagcccacttcaaattcaaaatcggcatctaagacctttcaccgactcgacgacagttgatctataccctatctacccgacggcggatacccaagtggttcagccgcggcccagcctcccgatttcacattttaagaccgcatcacttaaaaatttaattcagaattttgggatcagagaatgaatggcactctgactgtcaatgttagcgatagcatgccggagactacactgcaaaaaagcgaagtggacgcaagagaggttgaagccgttgggatggatgcagagccgtcgagtatactgctgatcgagccgcagtcgcctggccaaacgagcgcagagtcggatggttctcttacacctcaacgcacggcagtgattgtaagtatactactctatgtaaagaaaaaataaaagaaaaatttcaaaaaatggggaagtgttttttggctaatcaaactatgaccagaatcgctcgcccaaagggcagccaatatcgccaacaagtaaattcaacaacctcatcctcaagcttgccgcatcaacgccgcctgccaaggaagctaaagagaaattgctcctcgcagtcgagaagctgatctccgacggagcgagtctcgactgcacggacagcagtaggcgcacacccttgcaccgtgcgtgcgccagcggcacgagggacatgatcgcgctgcttctccgccatggcccagaactgaaaggcgcgcgcgatcgacgtgggaacacgccgctgcatgtcgtctgctccgagagaagagggtcggcatttgaccttcggactgcggtgagtttcttcattgatgcaggggttgatgtgaattgcgtgaatgaggagggcgtgacggccctgcatctcatcgccgagcgaggagaggaagaatggattagcacggtggagctactgctgcagaatggggcgcagattggcttgggcgatgggatgggaaagacggcgctgcacaaggctaccgtcgccgggtgcgcagagctggtagaggcattgttgcagaatggagcggcagttgacgcggtggatgatctgggccactcggcgctgcatatgtgcgtggtcagtgagagtctcgaggcgatggaggtgctgctgaggtacggggcggatgtgaatttgaggaatgtacggggccatgcagtgctgcatctggtctcccgtctcggatcggcccggctgtgggcatgctcatga

SEQ ID NO: 3984 - DNA, 1933 bp, Emericella nidulans
agagtgtgtgctatcccaagcactctcttcttcatggcgagcaactaagtggagtttagtacacggtaaaagatccgcttgctgacgacgccttccaaccttcgttcttggaacactgcacactggatgacagggatgatagcgccagaggcagatcatctcagctcagaaccaggatcctcagcgatccattcgacactctccccgcagagctcacgtctatggtcctctcttacctcagcggcccgtcgctcttcgccctcctccaggcctcaatggccgtccgctcgcagacacagtcgcagagtttctggcagcgcaaaatccgcgcggacatgccttggctatgggagttgtttagtcaagatacacaaggcattgatttgcgtaaggcgtacgtgtactttatgaagaagaccaggccgcgatatgggttggatgagcctgactggctggcccttgcaaatcggaggaggatatggggtgcttgtgaggtcctggcggagatgtataagacgcagaaaaaacaggcccaagggcatatatgatagaagtagcattgagatactggctaaaccgtgaaggccttaatagtttgactttcgcgataaggtcagctgtggttcggtggaggtctcaggtcaggaaattggaagctggaagagatggggtttatatacaacatttcagtgatcgaatgcttttgaaagatagaagtgcaactagaccattcttctttgaatgtgcttcatgctaatatctcggaagtcaaaatttcctcaaatggctgtataacatgaagatatctgctcccaatcaccttaaccggacttctatcatcaaagctccttgtatcaatataccagtaatctgcggagatgtcagcgtatactggtagtcaggagctctgcaaactcgtcctggcggcctgagaaggctcaggtttttggttcacctcccagaagttctaggacgaagattcgaaagtctaggtgtcagaaatcgtatggtgacgatatgaacaggctgattctcagcaagatactcggcaatgaccctgcggtattgccattagtctgtaatggctaatagctcacggggaagaagagggtaacgttgtcttaggatagactggaaatctttttaatgtccgtacacccaatgctaaatagattgatgaacattatctttgaattgtagccctctgttgcactgagccaagttgtatgtgctcctccctccatacctcctggttctgctcagcgctcttgggacgtttaacgtctaaccattatcgagtgtccgtgaaccaaggcgttgcccttgaccagaaattgcatactccgatagcctgtagataacaagacaacgatagtatgactcctcaagacgtagcaaccttgaccggccatatcaaaagccgatccaaatcagcgacacgtaaagtagagacagatctctgaatcctcaagatctcctccttgaaagcgtctaagtaccagcggtttaccagtgcgttaacgacataaaaatgagccaagatggtcagagagagtccccaggccaaacccgctgctccgtcaatctccagtaagccaataaaggcttctggtatcaggctgggccaacttagcactgcggcctcttccaagttgtactggatctcgacatcatctggaaatcccagctcgttggccgtacattggaacacagacattacgcgtgaatagatattctgtaggacatctatggctcttgatggcccatccactgacccctccatgtgttaggactgagatgggggctagggaagcttgctgccgggtcaactgatagggagtgaaagttctagatcgtgaccgttgaaagccctcgctgattctgcatggaagggagcatgtgaattagcaagtgaataaaggaccttttcaga

SEQ ID NO: 3985 - DNA, 3137 bp, Emericella nidulans
agatatatttgagtgaatgtatgtttgaaagtgttaatataacttaattgattttaaagagaatgggtggtaataaataattttgttttaattttctttatcttgtatatagttgtggagtgggggtgtagatttcaaatggtgcctttaaaaaaaattaataaaaaaaaaaatgatatatgagagatggagtaatgataagatgaggaagagagaaatggatagaatgattaatataaataataagaaaggagtggttgtgtgttatattaataaatgagagatatggagagtttgtaggatgtataagtatgtgagatataatttgagttatgataatggaagagtaaagagagttatagaaaggataaggaagtatagtgttaagagtaataattgtatataaagttagagtagatgataaaatagaggtttattgagaattgagtataagatagaatgtgtatgtagttattgatggtgtgaaaagagaagagatgatgttgttatataggatgaaggagagtatttatttgagttaacataggttatatttatataagttaagattagaatatatattattaataggataattagtcagattaaatttatattagataggtaatgtgttaaaagtattgaattggtataattgtattctgtgagtaatgttaagattaagtttggtgttggagattgaaagtatgaaatattgtggttggtttgtggtgagaaatttaggataaatgactcttaaatgtaaggatgattatggggatcagccagacattccgcgtatagcttgggtcggagaagaccgacaggatacaggcgagattctgacttgcgccgcccgtgatgcagatacgactgcctgtgacagggtcggctggacggtagaatgaagtcagccattgagcgacgtgctcgcgcagtggcccgtacccctcgtcggggccgtacatcagggccggcgtgcggatggcggggtcggccatcaccgtggcgaatgcgtccgcgagcgcgcccgtagggaggagcgacggattgggccatcccgtgaagagatcaactgtgtcgtaatccatgctgacagagtacggggctgaacgcggtgtaaatactcggggttggctgagattgggggtgtacggtaagaaactctatactgatattctctgtcgggagatatattttggcatctctctatcttatctacggcgccgcaaactgccatcaccgtttaggctaaggttgactcttatccttgagctgatcatgcgataaggcacgtagttagatctgattaatttagagtcgcatacatatcacataacatatgtagtctacaaggtagtctatcaataagccaccctcttcaatcaacgtcctgcgccaacgtccttgaacgtcctccattcgtttagtcatccccagactggacggtcacgtaacctcggaatttcctcactgaggaacatcgtaactccgacatcggctcgagtggacagctcccatcatcctacatgtcagaagctcggttccaaaggtcgacctgggggcccgagttgggaaccttggaagaacctgggtaagcttggtaagtttgatttggtaagcggtaattaacgttccgaagaataggcgagcgatacagcactccgcctcgattaatggcagtgcctggaaaatgggaccttacgtacattatgcatacgtagcgtcgatatacgtcttcctatacgtagctatttccgctgccagcctggcagatgcaaagtcgccacttcatcctttcgcagtgaaagacagagagaaagagagaaatcatgacgtgatagggagtgctggcatttggccagcccctgatgctccaccagtttggggagctcaagtcgcactggggcgaggctacgagcgaggctgcgagcgtggctatgaactgtgaatgataataatactaatgatcacaccatcacctcccgcaaaactattaatatgggatgcccgcctcgtttgcaataatgtccaccgcctgcccctgcatcttcgggtattcggattgcgaatcaagacccgtggagttgcaagtgagcctactaaagttgaagcgtccaagatggattggttgacccaattccgtgggccgtcaatttagaatctataaatatcgcactttgcattgattgtatacgtataccattctaggcacaaacgagggggtctggaacatcggatctggggaccggacggtcagtggtcacaatgtgcattgagagaaagaagaaaaatagtgaaagcactgtgtacatagtgtaggcatgaaaggagtgcagcctattcatattcttggtagaatttgcaagtcggcaggatccaagaaatactccgtacttaaaatacgttggagctgccgaaaacagtatagattggttcgtggagggagaaccgcgcattgattggttctaggttgctgccccaaacatcaatatttatgatccagtttctttccttcttctcccccattcctcgctctttactttgtcgtctctaccattacttgtacagctcccttctcctgtttgtgaccttttttgtcgtcatctgaaaccagtatcgcccttcgtttctcgtggattctgccgaccgcctggctgctcggctgccggctcgatctatcgctccttcctttcattcctccccgctccctcctgcagatccattccacaaccctcgccgggtatcgtggacagcttcagacgtccagtaggaagagaaggaactgcctgggcccccagaaccggccgtggtcagacgttttcagctgcttttgcgttattgtcagccttcggcccttcgtacatggttggtggctgtcattctttcccacctcactcactcacgctcagccttgctcacctgctcactccctccttcctttacttacctattcctccccgcggctctctcggtcgcgagccttctcccctctttttaatatcaattttttgttactgcatcccatcgatctcacccagctggcgtttcctgggactaattttaatatttactgcgacgctagctccgcaacgatgctgtccgctcctgttagtcgttccaacgaatacctccct

SEQ ID NO: 3986 - DNA, 2447 bp, Emericella nidulans
tctacaaactagactacgagagctgctgacgcttatctcccgcaaagagcttagtcctgtcaaattggagattgaagggcgcctacgcaagcgcaggcttgagttggaaatcatgggaccggccagagatgattccaatgctcagagacagtgtctgggaaaattggctgctcgttttcaaccataactcaatctgcattgaacggatattatgcgggagacaatatgtttaatcaagcagagccaaacttgaaactgatcacgaaagtggttaagctgaacgaagttttctccgatactttttggaagagaggtcacaagcaacatttcggggctacctgggatgatgatggtgaggcttcatacgggtccagcactgacagttttccttccaaagttcctctaagtgagtatccggaactgaataatattattcgaaccgaagactatttttgtcccaagcctctcaaggggcccatcatgagcctgattgaggaggttttcgagtctattcgggggccggaacttggaactgtaagtgcacttctaactagactggtttccagaggggttctcaccagttgtccagtttagcagcgccatccttgctacgatatttaaggatcagtcagagaaaaggagccacttgttttctcccatacgagcaaggcccttgccttggtgcacgattacatctaccagcttctcaccaaactttatccagagcagcaggtccgagatcaactgcgggaaggattgcttgtccacagactgtgtaatacctatcatcaggcaatagatcacgcccggtttttgtcggccatcgagcgcggaggctgaccatctaccttcaaccactacttcaacgcaaaatctccaggagaaacgtaatgagcgcatgtgcaagtctcttgaagcgctagcagtctcatctacggacaaagaagcttatatacctgtcaaatcgctccgtcagtgttctactattgacaaggataacaggcagcaggtgtgcgaggatatcccttgacactctgataagctactatgaggtggctcgcaagcgattcgttgatatagtctgtcagcaagtgaaacaatacttcctcctagaaacagatgacggtccgctccggattttcagttcagatttagtgatgagtctgggtactgaggagctggagatagtcgctggcgaagatgcagaatcagaacgacgacgcgatatcttgaagcgggagatggagaatttggaggcggctctggggattctgcgctcctaaggtgaggatatgggtttaatggctttaattcagggcttgacctgacatcgatctcctgaacattggaatccggttaaaccttttggctcggcttattttcttcattttgcggttttcccctgtctccccacattttttcttctttattgatactgtaccatcccttgtaaaagatttatgtttcccttgaaattggtttttcccagggggttttccaatgttgtcacgcaaatgcgaagggtttagttacagtttctggatacaagtcatgttattggagtacaaatagtatcttctgttcatcgcggagtttccaacaagctggatgctgtgatctgctattaacgacagccatcgcatttgcccaggtagtatgctggtttaaatctctctaatgacccgagtactgagtacgaaccctggcaataatgaggccgagagtcatggcacccatccgctacaaatcactggggccgcatcagtcatctgaagactgtggtctatatacgcactgagctgtaggtaatagatgagttaaagttgattagctatatgaaaatagaggaagaggaattttagaagaaaccctgtgggagaggaaagcaaaggtattttaggttagagccgcccaactctccagagcagagacgcccccgtaatgctagtatccacctcgatagtacctctactgtgaaaggcgtggactacatctctgtcttccgggctggaaagttgtcggggccaggggacatgctgagttgcttgcggaacaggggcactatcactaacgtgccatagccaagcattggatatagcgctggaatgatatacatttcgattatgttcggctgttttagttcgagcaaacctagaataggcttgaggtaatgagcacccggcaattagagctagacccgagacagaatgatcccttaccagccgatacacgaagacccccaactggaagcggtaaggtatatctgtccgatatgcagtgacctgctcatggtccttagagtagagataaccaagatgctttattccaagcgctgttgccgaatagataatcatttccctaacaacatgttgctttgaccgaagtggtaaacatatctcagagaatccagaccaacataaggtatgcatgcattatacgtgaaacaa

SEQ ID NO: 3987 - DNA, 3009 bp, Emericella nidulans
agtcgcccgctcctccacaacccggcgccatggtcctccatcgcggcccgtggcaaagcctacagatgccgccgtcttgaccgatgttctggcctcttctggtatcgatgtgagagaagaggaggcgtttctcactagcagttactctgggccgggtgtccaggcgcaacagcaaccacgagctcagcagccgctccctcaacaacaacaaccgcaagctcctccactaaacacatcatttgcctcacaggcatcgaccaccggaacggcgtcggcttctgcaagcttcagtgaaccatcccaatacaagccccccggtacccaagagtccttctatacagagccctcatcccaacctcccgcccctttcgtcgattccaacgagcccactcgagaagacactgaagcggctagacgtgcacagtaccatttgcaggagcccttcctgttgacgaaggttctggagcagaggcttcagagacgtggtttcgaccttggagttcgcatacccgcagaaggcttgtttcacccagttcccggccgtccacaacctattgaggtcactggacctgatggttcgtctgtcgtacgcactggccagaccatcctgaaccaagagggcgctcctctcgtggatatactaaatctaatgtccattgcctgcgaggagagactacggaccgttattgattatgcctcgacgctcgcaagaagcagacgagctcattcccatggaacggtccccgccgattggaaggatttagccttgactggcggcgaaaacaccaatggcgatacgggtggtccgcaaacaccatctctcaaaagtaagcctccttcccttcatttttattgaaactagggtggggaaactgggctaacagtaatctaggaccccatccagataccgaatccacggcaaaatcgcttgcagatagatatcggttattggtggataaagatgcctcttacgaggaagctcgagcggcgaaacgcgcaaagcgcagcgcgagcgcgattctgggagaaggcgggactcccaggccagactcaatggatgtacccgggtctggtgcttcaactcctatcggcgaaagagctcctagtatcggtaaaggagggctcactaagaaagaagccagaaagttagcggacgcgaaacaaaacgaagcgcagcaacaccagcaatcggtcgaaacagcacgtatggctactcagactatgatgtctggaggcatgttcggtaagaagaagtcatattcttggcttcaacgtggcccaactaccgggagcggcttttctactccaacgcgcattaacccacctacaccaagcgccagcgcagagaagacagcacgttccggagagtctgcagctatccctaccaaacggttaggagcttggcgggaggataaagagaagggtgctggaatacaggtccgagacatcctttttatgctggagtccgatggaagagcagctagacatatccaaaaggcatattcgaaggacttgaaggaagacaaagccgactgatgcttgctacaccttatccttaccactattactattgaacaatcttgtcatagcttccactgcgacttaatctttacgttccgcatgagcactgcgcaggaccggggttttttggcgttgcggtacattatttgggggttcccatctatgagtctaatataatttttgacctgcgtcctccaccaaacaatctcaatgatgccggggtcgtcacttaggcttacttgggttctttcacgttctatcgtggttacccagtcgcatgaaccccagcaaagatctaaatctcacccgcactgccgaccatgcatgatattggatatgttacgtgttgtaaatgatcgaaaccttgacattaccacattccgtgaacaatagcaaaccaactgtcaaactctccttttcacgtagtctacaattgtgcatgcatcgataatcgatgtactggatctacgaccttcccaaagaggactaagactctgacgtaatctcggggacgcgaaagacgccctctgggtgcctctggggagtcgcgagggcgactgacattctgcaggacaattatcatcgcctccaaggccattattgcgtatttgactcgtgttttgagcgcacagagatgatcaacattacccaactgaaccgttgaacactaggctgtcattaattgccacaaactgccgcgttaggacaaaacgaacgcggcagatgatgtcagggcacggcaaacgccccaagtggcggagggaggggccttcaagcgagacggaaagcaccactgaagtgtatggctaagaattcgagatcgtttaagaattatgaaatagactcgctggtctcgaaagctaggttggaagatgtcgaagctgtggttgaggtcactgcgcactttttccctaaattccggccgaaagaagtttaagtgattttctatttgctgcgcgtctgcggcgcgtcctccgcctacctgatcttcctccttccttacaatatactagctgacatacatacgctgcattatgaactttgacgcatctaatgatcgcccgcttaagaaacgacgcttcttcgttgacgaccctctcgataccgctgtgaccccggccgaaaagtcaccagctctcgacgcgtcctcatctgcctctacgcatacggacccaaattatagcgccaacggctcccctgcacaaattcagacacaacaggagtataacttttcaaatggtgggcacgcaacgcagccagcgacagctgccggaacccgtacacatcaggcacaatcaccggcccatgatactctcagcgattttgataccgaggctttcgtcagcattgtaggggagcaagtctcaccggagacactgtcgcagattcgaaagctgtccgatggaagccttgaaaaagctataaatgtctactttgatggatcgtggaagaatgcagggagccctggctcaagtcagacgacgttat

SEQ ID NO: 3988 - DNA, 7323 bp, Emericella nidulans
cctccacccgccatacacaaactctccggtcataaaagctactcgacacaacccgaatttctggaccaggccctcctttccaggtgtctgacgcataattcatgctctcatgctccgtaaactctgccaaaatttcaatgacagctttcccttctccaggaaccgtaaccttcacgatcctcgtcccaccatgcatacagctagctaaaaccaggaacgtccattcctccttactggtggaactgtgtgcactaagcaactgcaacctccaaaccccaccccttaatcccatctctgcaaggacctcgccccttccacctcgacaagcatggtacacacgcagatgctcgtcatagctacccgtgagtaacaatggctcaccatttgcggctgcatgtgaaagcggaatggggagcggcaggatagatgttacgcctgcggtgtggtggagggctttgtcatcagatgagacgagggttgctggtaagggcgattcctcctcttcgtccttatcgtcatgcgctgtctggttgattaaaactgggatatctgcgaagcggcgagtgtgtaacgcgccaaagtcatttccagtgaagagataaggtgtagacaccttttctgcctctgaagaggtcaagtacgaagctgccgcgacaaaccacacctcgatcagcttcttcgcttcgaaagacccaagcttggtgaccggttcatccccattcgcagtcaagccgaaaactcccgtccgcccatcactaaacgtcacggcgaacccgtcggggttcgcaccggcccctttcgggttcagccaattctccggcaaccaagctaagaacagtgctgggattgaggggttctcgtgaacgctcttcgtccaaagaagcgtgaaacctgtctcagtttctggtgagacagtgaagagggaaacggaggcgtcgcttgttgcaatggcgaaggtgttttcctgcctggggtgaaagtggagatcgaagacggcagcattgatgcgatggcatgatttttgggtcctgtatgttgtgagcacagttggtcatttttgatcatcaagattaagaataagcgacgagggaatgaagggcagtaaatacagtgcatcagtctccggatccaggtgccagagttgcagggatcccgactttgattgctggattgtttctgatccatctgtgtctgtagtctttgtttcagagaggaggtaggtgccgactacgaagttattgggagatgctggacagaattggaggcagctaggaggctggtccagatggattgttgtggtggaggagggatgctgaagcattttatctgtggcaacgatattggaggcgtgtgtttgattttatgtttgggggaatatggagaaactgtttatagggtttattgttggagttgaagagttgcaagacatataaatttgatacaggtcgagatttacttttgcgcggtcttggcagttggcggcgatctatatcgcaaagctaggtatgtcctgtattaagtagattatacctaagacaaccatatttttcgggatcctgacccgaatctacttggaagcactagaccacacctgcgtcacgaactccgacaggtcctccttgaatttctcaggtaattccaatgccgcgaaatgcccaccctaggtactggatcagtgatcttgcgaacaaacaaaaatcgttcaggcagtctacctcagagtgctgtttgaagtacaccagattcccagtcttcgcaacccaggattctggaacaggaattagctccttagggaagtaggagaacccgaatggcttgtggatataaagctcatttaaaaagggtgaagggccgggcgggatggggtttgtctggatgttctcagtcaacacgtcagtataaaattaaaattacaccaataaattagcggcgtagataatgcgggcttacttggcggtaggggtatatagccctgggaaaggactccgtgaaccagtaaagggtaaccagttctagtattttgtgtttggaaaagggagtgtctggccagtcgagatatttctctccgatcctgcacactattagatattctgtagagtaaataatactagtagattggggaggattaccatgcaagcaatgccagaggactggaggcaagaacatgaccgattgtggctggtttggtgccatgttcttctgcgtatgccttgccgtacgtaagaaaccaattcgagcgctcgaaaccgcgtttctcaagctcgttgtgatattcgtctgagatcccctctggacgcttaaccaaagggcagaagttgactcgggccagggtcagtcatgaaaaacaaaacggccgagaaccggacttacggtgaaccgctagtagagtcagcattcacaccttcagcgcggtatagatcatccttacctttacaactgttgtagcctacagctaatatccgagcaacggtgcttccaatgtcgcctccttgagatacatatccgccggaaaaaccgagacctctcatcagtttatcgacaatgcgggctgaatcggcattcttaaagtctctatcaagtggcgggccggatgaaaaggtgtatccaggtagtgaaggcacgatcagatgatacggcagagtactgggagagtactcgtccttgaaaagttgaagcagcggaagaaactcgaaatagctccctgtcttgggagtgagattatgcctctgggtgatactcaaaatgtcttaccaggccatccatgaagcagtacaataggaaccgcatctgctttttccgagaacagggctgcgaaatgaatagtcaaaccctcgatctcagttgtgtactgcgggaagatgttggcatgctcttcaactgctcgcctgcgatagttagggccaagcaattacggacaaggaggctcatataccagtcgaaattgttcagccactcctccttcatggtagacaaccacttatgggtgacaccataccggccgtcttcctggaggttttcatacgtctggggggcagtcctggagagcctgagcaatgtcttcaagtcggagagttgctcatccggaatcgcgacgcgaaacgaagatggcgtgatggtcgcggtggaagggagcttagtgaagggagcagtcatcttgatatgttgcttggtgaagcaggaactggagatgagacggggtatctgatactatatagattgcggaccgtggatgcggggttgatgggcggaccgagatctgcactgtcatgaaatgttttgtcagctcgtagacctatatcagaatgactcacaattaccttgtgcgtgacggcgtgctccgtattattaatgcataggcagctcatcggatgacgtttttttcagtggtgagataatgcgggggctcctacactaggtatccggagactctgcctttgtcgtactgacaaaccttgaagaattgccattacctgtagggcccttgatagatgctcatatgttttgaagcagagtgatgtttcatgaatgtgacttgtacgttggctaattagtgtttttagactatacactgtttctttagcttcttcccagcatcagcctctctgaactgtcattagaagaactaggactcaccaggacactacccatgtcatccagcttttttcttcattgcaaagcacgtagccggagaataagagacggtttcgcgctttagcttgccggcccagtggtccacgggtagctgaagatggtgggagattcggggctccagcgccccaagtttagggcccgcggctttaaacttagacgggaagattatctcctgaccagtcccactccgtagctgtacctgtctaccagatgtttacattcgatacctcgggttgtaagttgtttaccttactatatgtggcattaactcactataaacttgggtactaggcttccatgactagttaagggccgccgccgcttggtttcgctgcacgactctaacaacacagatacggactcttgtacacagtgcgggcacggtacacccagcgttttttcgaatcaagttgttttttcgaatcaagctctgaatactccttgatcctggactcccaaacagcaggatagaccgtggactcgaagggtaaattttgtggtttcaggttcagtcaactaaagacatttgcggcatatccgccagaaacgactcaaatcacggccactcgcctataaagaccatcgcttctctataagcaagatgcccaaatccatgactctcagtcctgaggatatattctccgatgaatctagcttctatggtacgctatccagtcgcaataaattgttgatctttcgtgctgacagtgcccgaggctctgaggaagaaacaacacagatggaaagagtggcagccacatataatccagagacttactggataagaatccacccgcacctcctaaccacaatccaggctcgaaatcaagaagtaaacagacagccctccagatcggccgaagaaaagaacaagatggcttattcaccaatggatatcgacactgacactagctacctccctcgcaatgaaccgggcccaaatgaatccagcaccgactttctcaaacgcgtaactccctcaactacaagagaggaagacgtcggcccctggatttatgtgcatacagaccagcttgcacgccacaaagaagaccaagcagcatttatcaccaagggtctcgaagccctagatgagtttgtggaccaagaaagaaagttgcgcgaagaaaacgaccaaaagaaggggagcgccattgccctatcccgaaaagtgaaacccttacagcgcgagttagaaagacacgtcttcgaaattgcacgcgaaacaaactgcatcacgggcaagtggatgatgttcattacgcccgaccagattgattcatactggcaagctgttgctgacgccacaatgaaagggcttctgggaatttgcgccaaggttgctacgttatcgggttcggatgagcgaaacaaggctcggcttatggcggtttacacaagggactatgacgatattgcggatgtgaagcgcgtgttgagaaagcttgtggaattgaagcttgtgaaaagaggggaacgaccgatttattacaaaagggatgcgctgacgtatttgaatatcaaatcggggaatcgctatggaatgaaggtgacggcgttatcgagtgtggatgtattgggtgggaaggtctgacttgctgaagttcaatttgtgcatgaatataatgggtatctatagatatgactgatgagatgacaactcatgctcgctggtggctgatacgcatttggccctgctcggcttcatctggttgactgtgaagccatgctgggcgagccgtagatgctcacaagccgataggaaaccatagtgtcctggtgatgcggccgcagtcaaagccctgaatgagcttaccagggcaaggcctgcctggatatgttgttacgacgatttttgacagtgagaggatcaactccaaatcagctcctcaatcggcttcgtcctccttttgcatggccttctcacaggccgtacggacttcagccacacccttaactccttcccacttttccagcaaccttctcacctcctcccaatccttctcagcctcttccctcttcccatcttcaacaagcttcgccaacctccctggcgcttcaagcacccatctcacagtttctttctcccttctctctctctcacgcaccggattactctccctcatgcgctcccttagtacctccccctcccggataagactccccgcggtctctgccacaaatgaaatcgctggcccaagcgtcttcgtcatagttaatggtgcccccctctcgtccatactttgtctcatcttccctatcgtctcgacagcccgaatgagcttcgaatagttgtcataaaccagcgccttgcgtccccatctagtgtacggatatcaccaacgagtgtattctccgcttttaagatagtggccagggatgacgtagcaagaagattgttcacgtatcgctgcggatcaaaatctggactgtcaagctctgtgcctgctaccacggtcgacgggttcgagatgtcgccggcatcggtgtgtcgggggacgctccgcgagcggcggccattggggccgagccccgctgcgtcggagggcttgaggttataatagtctcggagggcggcgcgattgcggcgcggatgtagggatggtgagacggcgcgggctgttgagggggttgatgttgcactgagactgccggcgatggaggtgtttagggcgtcgagggatgggcgtcgcgaggaggcgggtgttggggagtatgcgcgggacgaagcaatggacgggcgtggggaggagatggtagacatcatgtattatacgaaaggatctggagggactgagacaatcagtagaaaaaggtagacggaatgtcgatttgtgaagacgacagctccgacgcggcggcttaatctccccggatttgctccaccacagctttgggtaggtacttttctctttcacacctacaggttaccacatctactcaataacctccagtaccattaacacaaccatgacgactcttcaagaccaactagcagcccaattacaatccaaatctctccccgtctcttccacttggttgtccaccttcctttcaactggcacccaccaacggacgcctcttccagcgctcacaaagactgcccttttccgcctgctgaacaccgacttccgcgaatcactcacgcctcgatcttcgacatctaccttacccgctgacatattcgacctcagtgtgcaagagcgccgtctgagcggcccgattccgctgcaagtcctcgacgtcgaagatattggcacgaggcgtctggaatcaagtcgaggccattgagcgtgtggagcgaggagaggcagtccgtgggcgggagattgtgcgaacagtggatatcggcgatgagcaggatgagaatgggggtagtagaaggagtggtaacgctggtctgaatggaaatgcgaacgagagtaatggcccgcacagattaattcttcaggatgcaaagggaactaggactgtggggattgagatggcccggattgatgggatcgggattgggcagttgcctatcggcgggaagttgctcctggaaaatgctactgtagctcgaggcgtgattttgttgacgccggagagtgttacgcttctcgggggaaagatcgaatccatggatcctagtattctatagtgtcacctaaatcgtatgtgtatataata

SEQ ID NO: 3989 - DNA, 3292 bp, Emericella nidulans
tttcgtgttaattttatgctacaccagcgctactcctaccatggccagtgcgtggttggctgggacacccctggaagcgatccccacccgcagttgccaaatttggagagaggatgcggagaccgccattcagcatcgccgccaaggccaccagggagaccgctagctgtttactgtgaccaccacctacgggcgctaccaagtcttggaacttgaacacagtctgacctttagcctgccaacttcatcaccctctggcctttgctgtgtcgctctttcacgccggcatttctccgtcaacattactatttgttaactgttctgctgttgttctaattctctctattggctcggtcctcgtctttccgggctattccttgccgcccttgatactggcgtccccttttgcttcaaaatcccaccaccggcattccaacggcttccgcgcgaccttcgacttttcgtccttttgcgtagcagagcagcgattcaaattcggtttttattcttcctagcgaccgttggatagcgggttgggttgaacttatctgaaacgcggaggcgcttatttaacgataattgtccttaactccaacggcctcgaacttcatcatcctgtgcaacgagaaaggatcggcttcttttcgtcgaccgtggcctaatcttgttttctcgacgacgaactggacatctgcagtaggatgccctctgcataatcgagcctcaaggcagttgctagacgactgctgaccaaatggctatccttcgtacaccatggtcgatagcccgaccgtacttgttccttcttataatcatagcgacgctttcttctcctgcaacagccgatttatgcagtttctgggataccggatgcgttgacccgctggctcagaccgccatctcttttaaatttcctcctctcttccttgaaccgatcaacttctactacgctttcgatgccgatgctcggggaaaaggccaggagccgatgaccaaggccggcttctggattggatatgaagcctacgtcaacaattctgccattgatatcaaccgcacgtctgagattgcggtgcgcgtgggaaacctgactggcacaccgtcgggcgacaacaatggatgtgatggcgtgtgggggcctgattgctccatgaatctcaaaagttacttgcagcagacgatctttactcttgtcacaagtggaaagtcttatgaagaccctcttcgaacggtgatcggttcgttccgtgacaatccgccgcctgtggccaactgcccgccgccgttatttgatgttcagcggtttcctgttgagggtaagtattgaaatgtcgactatcaatcttataataacatggaataatagaattcgcggtcgagaatgaggatgacaagacggcggtcattaagaagaccggaaatagcgacaatacctggtctacattcctgatagataatatgacggccgctcagcaagccgaacaagttgctgttggaatcatcagccgcaccccgatgtatgggacgacacagccgcggagccaggatgatattcagcttgaaatcgtttgtgctcaagcaccatcttcgggaacctcttcgagcgacgactgattacagagactaacgatgcgatacaccctacacatactgcacatattccgcgaacaaaaccaagtttggtctgtcgggcaactgcccaaacgtatttagccatgcacatggctctcacgcgccgctcgaattcgacgacgccaaccgatgccgcttcagagcagcatcagcagcattacgatgctcccgctcgctcaagacctaccaggatcctgctaggagcagggtaaccgaagtcagctgcaaagtcacccggacttcaaactgacacgacctgccaaagaggctatcgctagtcgaagccccattcgtatatacttgcatactaatgatatgagtcactcccttaaggagtaggaatcaaccatttcagagcttctctccgtctcttcgagtctctttcctgtattgcttcggacctgcagtccccgtatgctcgacctccaaccttgactttcctttgaggtttctttgtccaacttccctgtccctctaccatccactttgtcattagctcgccatcaatatgatctcgggctaaccgccatcgcctgtaccgacggatcgttgatcaggataggaccagttttgtaccaacgcggagagaggatcgacgtcgagtatcggtgcaattattttcggtaccgaatgtctggcatcggcttcctctcatagaggaactagattgatttggttggtattgatctaatttctgggtacgtgtcgccggattttatggattgtgaggaaaagtagattaccatggttccaagtagcacttcctaccggttcctggtcgaccgtgtaaggaggagcttgggacctttttgttccgttccgatgtgtttaccccatgtcttgttcctcttcatcctcaaccgtaggtagtgaaggtagtatggattatataaggtcacatgttagccttcatcgtctcgatacagaataatatctatcctgttctatgccaatgtttattgtgcaactccaagtctccaactgccttccccaatatcaggccaataagaaactctctattagaactcgagacctcgctccaccaatgaattagctgcacattcgcacgccctgattgatcatcagccgacgatctggtacgctccaacaacacccacccaagccggcaactgcttgcttgtcattgcttgactaccaccttcaccgtcccacagtcccacggccgcaagtatagaatcgatctagtcttttccttcgaagtacaccccgcatctcgctgcaacataaccgagactcgtgcatttgcagatcagtctcattggcgagggacctatctcgctatgtcttcagccgtgtttgacggtccccatgacagctcgatcagcgtcagaacatccggttcaggcacggaactgtaccagcgcgatgcattacaggttcaacatgctgcacgtggttggggtagggtaggccaggcaagggggtcatgggggtccatggctttgtccagtcgagcgggccgacagcaggctcgtggaccaggtataaaggtgacccctccacggacgatcagcaaagacagaagcaaaagcaacagtcgcaatgcatccaagcgcactcctcggcctcctctccttcgccgcagcggcactggccgtcccagcgggccaggcaccgcatacagcgcgcgctcttctcc

SEQ ID NO: 3990 - DNA, 1760 bp, Emericella nidulans
tttcattgaggcacccatcgatgcaactccagtatctacattaataatgatcattagacgaccgcggacggaatttaaatagaatcaagcatataaaagcagtcatcacgtcacttagtacttcctcttcagcggtagagattctaaccgccgacaactcttgagctccatcgctttcgcctccttaatcttctctacgtctgggaagaaccagccctgcgcatcctggatcatgcgatcccgggcgagaatttcgccctcacactcataacggagcttcttgacataatcaacttccacctgcttgtccagtttgcgaaactctcgggaactgaagtcgctcacgtctttcgggttaaggaagtagtctattttgatctctggagttgttcgttgctgcgtatgagggggaatagggtcgaatcgatatgatggcccagatggggcagggccactagagaagagcgacgaaagtagaggaagcaggaataggaggatcagaggcaggagctgccgaaatacagatgcggcagatggcgtgggctcgggctgtgcatcggcgcgaggccgtcttcgaggttgagtccctccaaattgatgaaccctaaagcccggcccacctcccatgttgaaaacgaactgcggaccacctgcgacctagtcagcaaactttccttagagatcatgcagcatgaactataccgaacggtccaaatccaccaccaagcccaccgttgaaaaaccggttgaacagctcctcaggagatatctccgcttcaaaccctccacctgcccgagggaagccgcccccagaaaatccgccaccaaacggtgaagcacctgcagggccgctgctcggctggaacctactatccggatccccgccaaacttatcataccttgccctcttctccgaatccgacagaacctggaaggcgcgcgagaccactaatcaagcaaacacattatcagacaagttatccttcagcaatggatagcctgcctttcaactcactcttaaatgcctcgtccgccccttcatacccgttcttatcaggatgtgtgaccaaactcagttttctatacgccttcttgatctcgctgtcggttgctgtcttttctgccgccaagatctcgtagaatgccgttgcgctgcattttcgtatccggattacagccgccttttgctcaggtgtgtacttgcggtcctggttgccttggttgtggtctcgggattttcctgagcctcctgagtcagtcccagacgacgtggccgacggcatattgaacgagccttctcagaggcttgaaggacaagcgtgacataccgcttccgtccgcatggagaattaacgcgcgctgtccttgataacggtgtgtagaaagctgaacatgtcagaactagtgatgttcctactgcaaaaactgggtctggacacgattgggataacgaaactaaaatgaaccgaccaggagtttgtcaggaggagaaagccgcagttggaccagatttggcgattgattaacctggtgagactgtatacgtttcgctctgcgctagggtcattgagcggccatagccggcggtgaattccaccacagcctttgtaggccttgtctacgttccatacagtggatcatccagtcttcaatcaagtagccgattaatttttttcaacagcactatgaccatggctggaccagaatcacaaatggaaaagacgaaacagactttcacgcagaagttcacagcatgacga

SEQ ID NO: 3991 - DNA, 3199 bp, Emericella nidulans
ttgcccgcaattaactctactaaagggatcggggcccacattgatgttatatacatcgatggtgtgctcgtcgatcatacaaatccaaccgaccctcatggaggttagacctggacagaggccttgtaagttggtgtcgaaacgagctacgagcggcaatccgggccttactgctggcacttttcatcatcgatcacctcctcagcgttctaggtggaggtctcccgtcggcgattttatcgccaccactgatgggttgaagcagagcaattctacgatttgaggacattgagcgcgtaactgtgcgtttcgagaaatatatgactagtatccagcttagccttgaagctgagaaatggtgtggtctgacttagctgcccagcagctcattgtgatcgaatgcaatcagcggttgggctggatcccaaatcggagcgattaacggcttttccaatctggacttggccacccggaacgaggggcaccggtaatatccacaaatatgctcttctcgagtaagagagctggactgccttttcgcacggttgtaatggacccagttattccgacgattctcttcggcacgagggtcagacatggtcagcctatttcctgcattggcatgaaagtttgctgttgggccatcctgtgatgcttgtgagacgatctggcacctgacttatgcacattgagttgctcttgcactatggtagcttgtgtagtgggcagtaaacacagcagacatacctatcccgcacgcgacaactttcctcaggaaatgtctcgtcttatgcagtatccttgcactagaggaatactgtacattgtacttcaggcttcagattaatcatgcttcctcaattagtagcgggaatctgtgccaatcctcaccaagctttcgcccttcgccagctatagctatcggaactcgcatagaatcctccacacattttctcctgcggataccgtcatacgaatcatgccattttttgttcacgtttctatgcacatatacgtcatgacaactataaatgtagaccaggcgagtaatagtgctaacagacggccagtgggacagacagtggatcctttgagaacagcctcttatatagtatgcaccacagtgaggccttttgaaaccctagcttggccaaccacaatcgcatcgccagggtttgtgtactgaccacaatgtcaaattccgcgacagcatcgatagcccaccggttaaccagtgcatcgaacacaccaagactataagcgtcaatctcgagctcggcaacacaagcctctccagcctttatctctgagttttcaaaaatgcgcagagctgtttgactggccgcgagagtcgtggtttggatgcaggtgaagcgaaagcaaggacagtttgtcgggtcggatccataggtgcaaaagagttcgccgtccggctgtctcttgccggactccgaggccaattctttcccatcaacaaacagttttgaaggccctatacctgcaagagacagcgtgtgtctgccagatgtctgtggcgtaagagtggtgcggactcggaagctgtagttcgtcacccgctttcgggcgggatgtcaccgtacgagatgtagtagagatcgtcgctgcagcttgttagctcatgcaaatgaacttttaataaggtgccttacatatggcgtgaagcaacaggcggttgagtggtatcatgcccgtcaaaccaatcgactacacctcctccaacaccagtgtccggatcgcgggcatatatccgaagatgccgtcgggaggtacaatttaccttggaccccacatgatggacaatctgttcctcgaggaccaaactcagccttgagagactcaagaacagaagcccagtatggcgccttgatgtaagcgctccctccgccgtcagctactgtccgctttgcgttcggaccaacgatagccagcttttttggtgggtttagtggtcggagcggtaatgcctggttctcatttttgagaagcacaaggccggatctagcagcatgtcggagcttcttgcatgctctggcttgttcaaacagacctcagccacatcggatgcgtcctcgaatcgctctgctctctgtagaagatgtaagaggcgccgtgctgatccctcagcctgttcaactgaaacctcaccattttttatggcctctttgacagcctcttcggtccgtttcagaggaggacccggcatctcaaggtccatacctgccttgagcgaggggcctacggtgtttgtggccccccagtcgctgattaccagaccattccaattccattcacggcgaagaatatcagacagtatctcgctggatgcattcaaagtgacatgcctcctctgcaagaagctcgcccatcccctggagaatttcaatgtcccatgttgctgctaaactaacacctaacggtaaacgcagctggcacccattcaccaaagatctcaccccgagctccagatggaccatcaataaccttcaaagttagtaccaggctacgtcgtaatatcagaatggacagttgctccacgaaccttgatgttgggtattgcaagacggcttattcctccgacgaacccaacgtatccgcagattatccgggcgagatgattacagagcacgctctgagctcgaagcagaaaaaacgcacatgagagcccggttatacggctcactcgtcgttccttggaagctcaacttcctcgacccctccattgcctttaccagtttttgttgcggtcttgtatacgccatattttactcatttttcgagctctttccgctcgtctatgggtcgacttacaatatgactctgggcaaaataggcctctttttcatatcagtcatcattgctgtttgcctcgccgggataacttgcgctctggtcgcgtcgatcctcgtgccttcgggcttgttcatatttgcctggactgcgcgaccagatatccactggatcgagccaacgataggaacgatgttggtctcccggaaacgtggtgattatcatccagcgtatcgttgtctatatcacgatggcgtatcctcagtacacggcgtcgctgtttagcgggaatgggttcgtcaggtgctcggtgcattcgcgggagttttgtgccgcagccattgtactataatcttggcgtcgaatgggaaatgaaactcatggattgctg

SEQ ID NO: 3992 - DNA, 2226 bp, Emericella nidulans
ttccgaggaattctaaaatgcgataccagttagttagtttccgctatagtcgcatcaaaattgagatagagaaacacagggagcgcactcttccttaaaaccagcaccgactccggcgcccttggtctgaactgacacggtggcatcagtgaacccccagcttgctgcggcggcagcggctgggagggcgaccgagcttagcagcgagagctggaaaagagtctgccaccaaagcattgtgaaggcctccgtgtttttattgcaatagaacgagagatgttgagagcgaagttggcaagaggcagccaagcgctaagataagcgccgggcggcattggggcttgcgagtccagtgaccgccgccttgagccctaattgcctgcccttctctccttcgggctgtctcccatcctcaacgccttttgtttgacttcgacaaccaccctgctaccctccgtccctctatcgcgacgtccgcgccctcgatcgtcctggaaccccgttctccgtcgtctgatgatgcccgccagagaaatttgctagctagaggaggacttttgcgcccgttaaattatctgacgttgcgcctccttcgccaacggctcgcccgaccacgccctgcgatccggccacttacgcttcgaaaactctctctggcagcttcgatcgtcgaaagtggactatatcaattgttggagatcataaaagtcatttgtaagtcgggtggttgcgtgtttgcaagctgtgcaagccaggagttgaggttccctagatccgaaagactccgccagctgtggtggtgtgcatcaactgacctgcatagttgccttggtagattctgagtcgaccgaaagatcctctgtgcaccgcaggaaatctttagactagttcttttacagcagcaacactgccggctaccctctaagctgagccctagtccgagacatttttgggactggaaaggagggggactatttgtgtacgcattcacaggcaacagctggaatacgcattatcttgctgcaaacagtggacgcaagtaaggcctccaacttatccattcactatcaaacaagatgcattgtcgcagtcgcatgtcgcatgccgcatttatcactggagctaacacaccccagtggttggtagggcttctgttactcgtgaactcggctcgcccgccgccctgcctgatctgacatcggtatttggtccctttacctttttccccatcctcccatctctttcattcatcctaactcttttagcgctcgcggcggagttcatctagggcttctcagagaacagccccagcccctgcccctgaactcaccacctcgaacctgactcagtcctcgtactctcttcccccaactcccctcacttcgtctttcgacgagatcctgccttctgcaaagcgtcggcgcactcagcgcgctatcaactctgaagacaagacccttcctgcaggtggaacagagactcccactcatagagccttttctgagccgtttcaggcaccaaattcgcacagttctgcgagagcaacccgtgctggcaacctgatacagcccaatactcagggctcacagttacataccgcttctctcccagaaactgacccagagactccgtcgaggtccaagtcaaaaacccccgcttcagaaaaacctcgatctgaacgaaccatcacccccaagcctcaaacccggcaacagacgacgactgtcaaacttgaatcagataaagatactgtcaaagactcgccgatgggcgctgccatgtctcattctcgcaaggccagaaaaccgttgcccactcgaaacgatgggtctgcggaccaggagaacgccgctactcccaccgagtcttccacatcccgtgcggcgagccctcagtcttctcgccgggatcgaaaatcgaagctcgctactaatacggctgcaaagatcaagtcgtcgccagctgcaaagactcaatccactcctacatccgccgccaaggataaaccggtactcaacggaacagccagggcagcgacacccgcaaaaaggccagaagctgcgactccgggcacgtccacgaggccccgccgccgcgatcgcaaatcaaccaaagccaacggccaaactccagactcgaagcgggagaccgcaacttcagcctccacagagactcgggacgaagacgttcaatgtactcagtctcaatcacctaacaagcggagca

SEQ ID NO: 3993 - DNA, 3428 bp, Emericella nidulans
cgcagacgctcctacaaccgcatgatggaccgatcgtccaagatttctcactcgacgaaacgtttgcccttcctgagtccgaactggttaccccaaaggtggcttatgacccgatgatccagctttactatgagaacttccacccctcacatccattcatggtgcccaggagggcactgggcacctcgctgggcttcttaatacctccacaactcctctcagtcatgcgctatattggtgctcattattatccagacccagccctcaagcaggcatttcgtcaagcagcgttcgacgcaccctccaatcaatccatagaggccggattcaaagttcaggcgttgctactgctagctatcaccgaccactgctactgtcacgagcaaagcgcccatcgattgatacaaacggcagtcaaccttgcgctggagactggaatgaaccgccgacgattcgccagcgagcattcgtacggccattccgtactggaggagagctggcgaaggacttactgggagctttatgttgttgacggacttttagcagcgatgcgcgagcagagttcgttccgattataccaccagccggcgaatgtgcaattaccctgcgacgagaagatgtacaagagtgacgaggtaaggttgaaccagccaggaacaaaaggccggaaaattgatacagactatataggtgttaccatcagggcagaccctggaaaatctccagaataactggtcattagggcaggacttttcagcattcgcatatcgtatcagtgccatgcagaagctaggggccgttcttgggctcaaccgatcactcgaagacggtgtagggtcccatatcgagaccattgatgctcacctcgtttcttcacttatggttctcccgcccctccacggcgaaagctacgacagctcctatcacgacgagatgattttcaagcccaaatgatcctatactggccaggaaaggttccctcgtaagaggtgaccaccagaactaacggtagtcagagcactgatctacctccatcatccgcgctccggcatgcgtttcgcctccttccacgctaacccccctaccacctgtacgcggctgcagctaccagcaacattaaccacacaatcatactgtgattctgaacttcgcccatctcaaaccctcgacctccactcccataagctcctccgcgccgcagacctcctctccggtctcgcaactctcccgagccccatccaccgtcgaacgcccttcttcacctgtgcgctggccatgtgcattattgtgcacaccgcagcactgcttcttgttggtgctgagaaacaggaggctatcaaggcgaggatccagcttagtataggtggattgaatgtgctaggacggacttggccactgtcgaaatctgtgaggcagcagatggtcgatatgtatcaggaggttgtagggaaatgacaatgtatagcaagccggacactggcagtattcacctcgattattgcccgtctgccaaaactagaaatgagactctcccagacggaccatccgtacccgaggctgtacctgcattgccttgaaaagaggtcataccgtagcttcaccaacagaattgcagccatacggcaaaaaaaagttcaagccggttcttctcacccattcccctcttctcgcagggcatctttgccctattaaaggaggctgccgaaggtggctgacatttggcgacctgggtccttcgtcacccttggttccaagaccttttttatagatctttataaatattctagtcttgagattcccagtgtcggctctttcgtcttgtctcatcaaattttacgtgagtttagtatttggaggcagggattggctactccatatcatttaaagggcgatttgggaaaatgtcgctcatggattttatttgactgagatttccccgactgcctagaacccggacccgcttgtctgcggagaagcttgagatctcttgggactcgatgctctcgagaatcactgtagtctactcattgcttggtgtcgatgctctgtcgcaaccagttcctccacccttggtcgttcaagatcgatctcacacgagcctcgagccactcggtgttgccccaaaacccccaggatgcctggaaccgacaccagtcaaccagggcagtttcccaatgccgtttaaacgtggaccattcatagaatcctagttctttactttccagcagactcgtgcggtatgcatctagcagttgcctctcaccgtcactcatcaccagctgctcaggtaaattatcatcggcaacaagcatgtgtaacggcaccgagcatgtaaaaagtttggcaaggtcacagactcccagccccagcccgacgtactggaagtcaaaaaaggccacgccttctccatcacttgtcgtgaagagattctcggacttcacatcgccatgaatgtatgactctagcggcctaccacaaggagtcaaaaacaatgcaacaatctcagctacggagagtgaggagccttcaaagggcgtgcacagggcctctgaccactccgagtcagaatcttggacgagcgaagcgtactcttttcgccgcgtcgcaaggtacgtgtacccaccgttaagccaaagcccactcccaacattcttctctccgttctgtcttctcttggcttcttcaagcggtggcaaaacatatccgtcaagactacccggcagcagctcccacgagcggcggtggaagccagccagccagttcagcgccccatgcacctgtacaccgctcagcacgcccctcttctccccagcaactggatacttctgacgcagatcaaccatgatagtggctaatgaacctttcaattcctcctcacccgtctggccctccatgtcccgcgtcgaggcaagacatttggcaacggcaacctcgtcaccgagcaatggcaccacttgagtatagaaatactgctctaccttgtagctgagcatcttgcgcagatgcccttcatctgcattgctagagcctttccgagggggagagatgagcttcaggataagatgataggtagaccccgccgttcctgatcctcctccgcaaagattgtccaggtgcttggctgctttgtcgcttgtggctcgggcagtgatggcgcagatatgtccataccctgcccaaagagtctgtagcgtggtacatgagacaaggtcgagcgagcaccacgacagcatgatgctggcaacgcggcggggatctgaaggtgtcattttactcagttgtaatcgtaacgagaggctgtatctgtttcacgtcaaaatcaaccttgtaacgtatagtttacgtcacctgcttgggtggtgtctaggcggaagaaaaagaaaaaagaattaggaaggacaacggtcctctgccgaaggtttctgcgc

SEQ ID NO: 3994 - DNA, 2571 bp, Emericella nidulans
aatgagaaaaaataaaaggattgtaaagtgggtaaggaacaaaaatgtaaagaaaaagggaaggatagaaataaaaaagatgaatggaagatacttaacgtgtaggagtacagaagttgtataagaaacaggaaaaagagttatagtagcagaaaggaacttatccctccaacaccaatggtggaacacgaattggggggcggaataagagacaactacacttattattattgggggacggaggtaaacaagttatcgaaggacaaaagatggtttatgccgcctacaaagaacccccgcagcaggggggaatccaccccccgaatcttggaggtggttttattcaagagaatgaggttaaaaaggaagtttggtgttctgtaaactcatagaggcagtgggacacgcatctacaagaaccttcacaaatggaatatatgttggccttaagtttaacccggtctcgagcgggtactgctctggagctggaacgggaacagattcgtcccaggaaacccttgcttgccttgggcccggccaagactgccacttcttggatctttaatggtgggtatgaaatttcgtctcctttggagcgcaggtcccgtttctgcagcaccagcagcagcaacttcattgagactgggttccaggactcattccgtttcacatgagcggtcgcagcggagagccatagcgccttctggtttagctccccttctgctctactacttggagcctatcccgggatcagcccatcacccgccgtccacgatgcgttggttggtacagggatgaatgatagtgacatccaggccttgggaatgccgggtttgaagctaggggctgcccgggataacgacgaggagcgccgaaggcatattatcgaggtagttcagaaattgcgggagcgagtggctggccgaggcgttagcaggaagggtattgagcgactaagtcatctcgagcgctttgagtcgatctggcaggacgataatttgaacattgccggcaattttgtcgacctcgaaatcgatttctaccgcggacaaaacgtggttagagatgttagcttgaaatacgccaccccagataccgccgacggggaacgtcgcgaagaggctacagctattctgaagcgcgatctggtacaaacgccagaggacggcgcgcggggcgactggaagagcctcgacaactttcacaagaacctacagtggctggcacggcatgataaacttagcgaagaggtgaattgcttcgaggccatcgaagggctctacgaaagtttgaaacgactatggaatgaggaaagctcgcaacgtaaatttgggggtgattatgagcatatctgcagcggcggaattgggcggccaagccttcataggggtagtcgagtcggcctttggttagactactgggtgccgcgcgcccgggtcatggacgcgaagcagcggaaatcagcggatgcgatggatattgaccaatctgaaaattccgctaatggtgaactcagcggcggaaatggcgaatggagaatcgcggtcgagtgtgaagagggttatccgtcacttcgcgtgtcgaaagactggctcgggtccgaggtctttactacggcccatgatgatgcagaagcgtcagcatcagacagcgcgaccctcgaggtcagggtaatcaactgggccgaaccaccgccggctctgaatggcaaccaaagctcatcaggaaatatggatcttgactccaacatgctgggatcatcttccccgaaccgacgattcgttgctaggttggagccagctctagacatcccgtttctggtagccaccgaagtctaccggcacctcggtatccaaatgccgcaagatttcaggctttcgacgtacgatggactgctggcccccgggtggtctctgggctcagaagattcccacattgatcgaaagagaagcaagatatctgtacaatcgttcgatgaagagggcaaaccgtgcatcaagcggcatagttacagttttcaaacctttgaacctaccagtgggaagacgctcaggaaccttccattctcccacccacggcagcttgcagacgtgcttccggtatggcgataattcccttagcacctttacttactgactcgtgcttcgcttagactctccgtcagtatgccttactggcgaacatgatccagggtacattcccttcccatgacagggtaaaaccggagcgtgaaaagcctaagtcgattgtccagccacaggacgaaaaatacaagacaacgcgcaacggggatataaccatattgaccaacgagaaccccaatgagaaaaagctcaatatgttacttggtctcgcagatgatctgaaactcgaagatgaggtccaagaatctggcagcgatgagctcaaagtagatgtgacgctgcggacccagctaggacaggctccattaatcatgctgctcttcacggtgaatcgcgctagttcgtcgatacatggtcctgagcattctgttagtaaggtctcgatcgctttcgaaatcggactgagcgcgcgtgtctcggtggtgga

SEQ ID NO: 3995 - DNA, 1724 bp, Emericella nidulans
gggccaatccccttaaaacccagactggggttttggcccagcggttccccctaacttctaaaaaccaaagccgtaaggtaccttccaaacaagtcggtcaaggttttcttcgatcaagagggcctttccccaagttaaaactgcccgtattcacaaatccgcgaaaaaccaggggtacaccgttctatgcctctaaaaggctggggacagctctcccaccaagtacgttgctcatcgaattatgttccagaattcccagctccgcctgccaaacttggatgaattcgcagatggccagaattgagaccgccacacctacacgacattatcgcgagaacgcagaaatccatgggtgatgacacgccgaacttcacgttttctatacccactcggaagattcgagtaaaaagcagaggcgctggcatagccagtgaagaccatggcggattgagtcgaaaagtgtcaacaagtagtaacttttcccgccctttcagccgaacttcaagcttgcgcacagtagtgaaggctcgctcaccctcgtctaacatgcccacaccatctgtaccacctttgcttgcagatgacgtcttccaggattctggaggccaagaccgctttctgaaatctgctcgtacaggccaaagcaatgttggagtgtcacccatgctgtccagatcgagcaatcagccccgcatggtcgagtcacccactccaaaaggatctgctaccgaagtctctccgaagatgaataacgctaggtctgcacaatacttgaccaagtggtcacccgggacctatgatgcaaaacagttccatcgacgatcagcacgcttcatgcgcgagaaccggagagccactaacgagaatgcgagactggagcagggtgtgtacgaccaagcgagtggccttcagtctccgatgtcgagtaagcggatggtagagatattcttgaacagccggcgccgtcagatgggcatcgactctgacgagggaacctccgaaccggcttttctatagccttcctgtcggtttggttgtctgattttatcgaaaacgcatttctattctcgttttcttctaggtcattcttttggagcaaatcttgtattatcgctctaattagtactgttaagccctgcatcaaccgtggacatgtatcttcagaagccaccattagcagtacaatcagttaggatatctccgcgacagaatatactatgcgaaccttgttcccgcacacttaggaatactcccaagtttatacacggcatactagtctcaaacaggacgaacgatcatgacgacttcgtcatccatgaacgcattaccaattactccacatagtttgccggaaaactgcccttgacaccacgaagctcaccctcccaccaatcatccgtactatccgtcctcttcaggacacggatgcgatcgccctgttgaaacaccagatcaccttcgccctgtccaccgaaatcatagagcgctgttacgaacatgttcgaggacgcactgcgcggctttggaggaggaggcgggggttttttcttacccgccaaagcggacaatgatggtttgctcgctagaggtattggtggtgagaggctatctggctttgaagcggagtgggacgcggtcattggatgtagcgaggcatgcgcttcagtaaagacgaccggatgatggttactcaggaaccccgcttgagaagacacgcgttcgag

SEQ ID NO: 3996 - DNA, 5861 bp, Emericella nidulans
cggtaaagccagcccaagcgatgctgacatgggcgaaacattgcattttggtggtaagcatgaagttgtggagaaccgccgaagtagtatgtcatataatcgttggatcgagcttcgtcgatgaacaaggttctgttgggcaagctgttgggcatggatgtaccatcttcctcactcaatgagtcatccgaggcaccggacgggtggcgctgcttcgaggactgtgatgtctcggttggttgagaaattgaatagagaggggcaaagttgggaagagaattgacggggcgggcaggctgcgagtgagctctaagggagccgttgggagaaccattggcaaccgatgaccgacgtgggttacggcggagatcaggcattgcagcggcggcggacggcgacggcgggtttgtattgcttcctggtcctcctggcacggcaactggaaggtacgtggagttgtaatagacattttgtcgagacggcacgctgataggctgatgattcactgcgccagatctcgagccggacctcgagcgtgagctatcatcgcctgacgtttcctgcgcgggtactgggaattgaatgaagggctggcggataaggacgggtggaggccgtccagtgatcagcgcctgattctgcaattgtaatcgtagttcttgttcctgtgcctgaagtatttgaatttgctgatacaggtggtcgtggagcaggtattgtgcatgctgcgcctgaagcgacagttcagacgcgctcattccgttgttggcttggcggaagtgattcttgttggcggcgtttgaacttcgacgaccgccagagtgtccgcctcgactgtattgattcgaatgtcgcccacctcggccgccaccacgaccaccccgagaaggtggcggagccgtggtgacaaccggccgtggctgaggagccggcctttcccatgagcgctcggcctccgggggatactcgtactgctcacagcagagctcaaagttaccgtctgagagggccttaaatgctctgcgcagctccatatggacccccctgaatgaagtatcatcggccgtattacccagatttcgtattgtgttgaaaggctcttccacgcaaagacggttattttgcagtaggtgccagccctttccctctttggatattaatcttccctcgcgcaccgagatgacgtacttctcaaaatccagttcgtggccgtagtagcgaaagaattggaagaacagctctcctaatgactgcttgttctgctttccgtatcccaccaatgagtccagatcgtcgtcgaacgagcacaccaaaccatcggcggtcagcctctttcttatggggtcgagcttggaagctgggtaaaattggaggctctcgagtctgtaagaattgatgatcaagcaaatccagtataggaacctaacgtgccaccgagaccttgaaaataattaacgagaaagcacattaaccccgtgcgcgtagaaacataccagcgtcgttaagtatcctgcgttttgtccaatgcttgatgatcattgccaacggccgtactcgttcatcgatctccacatatgtccgtaccattcgtgtattttccagcgccatcgtattgttgacgttcatgtcgcatgctaggcgtagttctggatcccagattttcacaatgggaacttttgcatgagagatgcagacaactcgctccatcccatctgatcagagataatatgtcagcttcgcttgccaggaaggtcatggaaatgagatcttactctttgcaagcacatccgctaataaacacacatgctctagctccttgcaggttgtagttatacaaatgtcgactgtctcgggtcagtaagaaacttaaaatagcccaaagaaatacacaccatccgagtcgctagaacacagtttattgccggacgatccaaaaacatgaaccttgatgtcgcaaccgggccactgccggttgaaaagatcctccagcttacggacaagtctccggcgtcggctctcgctctccgccgaaggcaataaccgttcgtaaacttcgagcatatccgcagtaagtttcctttcctcctccggccggagccgttgtttgagcccttccttttcttccggtagcacatcggcacctattgaatatggcattcttctgcggaaaaaagacatggcggtctcgtacttgcagcccgtaaactgttttcgggcggatggcgggatatgcgtcgactccgaatgggtcgaccgtggcgacgtgcttccatgacggggcgaaggcgatctggaatggaacgaaattttccgcgcgtgttggtaaggcgtggagggaagggagttggattgttgtgaggtcaacgcgggtcgattgggtgtctccgaagactcctcgttgctcgatctccacggcatagtcgagagttttgccgacgctatcggtgactgttcacctggtctggacgataggcggtcattcccatcggtaactgtgaccatatagcaatacccaacgttgtccgacaacgttggtctccaaaagagaagttcgcaaaggaacgccttctcgagtccaaatccacccaaaaacgccggactcgaccgaactccggttttcacgtcaccacaaaggctcgccacaagaacagtatatgcctcttatgttcctatacagtattcaccgttctgtaacccaacagcaacagtatatcgcaggaagaatgtgcaaggagaagaaaagcggctgtcgaaaaggacgttcgtagcggaggtatcggccggcgatgtttcagcaaaattgtctgtgctgcgttaccacctctgcttcagactcagacgtgacaaagcagcgctgcaagacgagaattagcgactggtaaaaggactcttgatcaaggtatggaatcgcgtctcgaacgcgaaatgataatcgagtcggtggttgttggagatggcaacggaggcggtttaaggggagtgagtgcgatagactctagcgggaagggcaaatctcagaaccgcacaactccaaccagaggggggctcgcaatggagaacaggaacacgcacaaaaaatgtccctagattaaaaggaccagcctggcaattcgagggattgttgtggacgtacaaggattctcaggaaaagacgttgcgttattgtagggcaagttgctctcaggttagtgaacgggggaggggacacagcgcgcggaggggatcaatcagggcgatcggctgagcgagccaggggaatctcccacgcccagctttcccgacagctccacgagtcaagtaccctaggtatactactacacagatttggccagcgtccaccacagaaaaattagtaaaattcaatgcgatgaaacagcaggcaatgatagagggtcgcgggttgggctgggctcgtagataaaataataagaggcgattgtcctggacccaaccctcatggcagggtaggccttaatcatcagttcttagatgtcatttggtatcgtttcttattgttctctgaggcacgctgcgaaaatatagcagagcccggcggcgtttgttcactctggctttggctgtactgcatctttatcctgatatctccaaccgcgtattatccttatacccggccataagaacgaactaaagtaaggcaactcgcactgtcaaagtgctttgtcccaaacagtaaactatccataactacccataaaccagaggccatttccaaagatttattatttctgggtgtctcaggtttcattacggctctatttataacggatactgaaccaggtcagcggtccatgaatagattaaggccttccaccatctacggccaccatctacgggacggactgtcaggcgcagtggacgcactgagaacaacaaaaacccacgtagctctagggccaccagacccagacgccgaaaggggtgtgctgtcaaccaatccagctgccggccgctgtatccgaacaaagcggagcttgacttgcgaacgacgaaacgcggggcgaaaggggaaaccaagactcaggatctcaaggaaagaaaggtcctcacagacggagcaaagattggccgtgaccgaacggggtaagaacgacctcagcccttcattctaggtgggaggaaagaacgccagtaaagaaagcgcgatgaggtgaggcacttaaggtcgggaaagtgcccctggccgccttgaggtaggaaggatgtgatggattcacggatcgtcgacagttgttcattatctaggtaattagcagagtcaatttacaagactcaaggccaccgggtccttgattgggcaaagctcccgatcgtttagaattagggattactcagaaagagcaatggcgctctagcctctcgtgtcatctaactcttgggtaatgaatatattcgcggagccctcccgccgaaatgttccttaggcccaacgtctgtcgcatcatatcgcgttctcaggcaagtctgctatagatatatagtagtcagtcctctgtcacggcgacttagcaaacattatcgccatttcgacccagtaggatggtaccgcatgacaatccctttctatgaatgcggagaaggcgcacacctttttcaatagcctgctctttgggtgactttccgccatttaagccgcctcgttgcgggccatctgaccctgttctattagacgcacgcttcaagaacgagagtatcagaacagccatatgacagagcagcggttctccaaatcgtccgtcggaaggctcgaccgatttaacagtgttgttttgggcctgccgccttgattagctacttcagtttcagcgattcagcgatcttaactcggggttggaagaaaatcctaatctcatgcagaagtaagagattctggcatctatagctctgataccacagtaccgagagtcggcagatccttatgggattgagctgaataggtcaagaatagcaggcatgcctctatttgtggactgcctgccaccacagcgacaaatagcccaaacatagctcaccctgcgagataccgtgagtggtccccagttcattggacgacttattaaaaacgaatcaacattaatccgaatattgctgcagccaccaaccaccaccgacatatgacccgagccactcgcggtacaatgacgacaaaatacagtctgtgatccaatgagaggtgtggcacgtatcctactactgtaggggtctgagtgctgttcacagtccatgctcaattgtcgatgccccactcttacctggtctctaagagtagagaactcttgaatatggaatatgtcgatatctatccatatatccatccatcccagatagaatcaggtgaatcgggtgaatcgggtgaatcgggtgaatagtgtctatatctacgcaatcggtcaatgactaggcagtcatgaactgatactcggcggaagcaagaaacgctccagcctgacggcggggtggtgcttagagaccgttcctcgacgtgcccatccacctgcagactgcagagttctgcggctgacaaatgaccccccacttgaacatggattcattcttgtacttgtgataccagtgtaactcgtgataaaaggtgatttcatcttatgctcacttgccacttcactacgcattattgtcgtgcgtgcaggtactataggggtactacgttagacaaactaacgtatttgagcttattcaatcctcacgagccaagggtgttctatcgaccgtatcccggtatcagagacggtacgtaatcctaaagaaacatatcggtcagcgcgggtcgaccctacgagtacctgaacttcacagctgtcaagggataggcagcatcccatgat

SEQ ID NO: 3997 - DNA, 6204 bp, Emericella nidulans
agacggagcagctcacgagagaggcttatggaccatagcgctgtccttgcatacagaggcatactgacatagaatatgtgtgtgtacaggactggggcatcgaaagtgttcatatttgaccataccatccgtcgtcaggccaacgacagccgcgcgggcactgttcagctccgcggccccgtacaaagagtgcacatcgaccagtcgtacatcgcgtccaagaaccgcgtgacataccatcttcctgatgaagcggagcgccttctcaaaggccgctaccagatcataaacgtctggcggcccataaggacaatcctcaaggacccgttagcagttgcagacgcccacaccgtgcccgattcagacctcgtcccgatcaagctgatctacccggaccgtgaaggtgagacgtacggtgttcgtcctaaccgggataccaagtggtattatcggtacggacagacgccggatctagttacattgatcaagtgctttgattccaagacggatgggcgggctagacgcgtgccgcacagcgcattcgttaacccagagactgtgaacgagttgcctagggagagtatcgaggtgcgggcgctggtatttcatgagaatgatactgagtaagcttctatacatgtcttgaacagtcaaggccttggaacaagttacgtatagtatattgttttacgttgttctacttgctatctacatacagattgatatacaaccttgtaatgaatgtgcttatgggagataaaaagctaggcccaaattcagaccacaagccacaaacaagccgcgtatttttcacttcaatttaacttggcatgaacgagtcagtcgtttagcaggcctaaaacatctccaaatgtacaggaagagagagactaaaatgccgtgcgagcacgtcaccctaagccgggaatgcaacatcgccaaccaccaggagccgtgagcaccgagtggagagacaaacctccaacgtgaagattttgacttttaatctgaaccggaggtctggcagctatcggtagaataccgactgtcatatctctctgctgtctgccacgtggggatatttaacgtctccgagctgcctgcatcgagatcgagggccttgtctagtctggggttgttctcacccaccaacgacagtcttttgcaaactacggcattaccatataatcagccaaacgtgggttcggtcagaatgggagaaaaagacatcatgaccgacgaagaggtcgcaacctccgactctatcaccacgcctaggaaatacccaggtaaatgcctctcctgcttaacccttatattatagagttaacaaacgcgtccagtgaaatggtaccgctcgacctacttcaacgccctgatactgggcttgtgcaacttcttcgcaccgggaatctggggtgcaatgaactccctcggcggcggaggtgcctcaaagccctacctcgtcaacaccgccaatgcactcactttctgccttatggtgctctcctgcttcttcggcagtgtgatcgtgaaattcatcggcatcaaatggaccctcatcgttgggacgatggggtatgcgccgtacgctgcggggatctatacccaggtgcggtacgatagtgactggctgacgctatttggagccgcgctttgcggaatttctgccgggcttttctggatggccgagtccgctatcgcgctctcttatccggaaccccagaaccagggccggtttctgggtttctggctttccttccgggttggtgggcagatcgttggcggggctatcaatctcggtgtcaatgtccatcgcaacacggcagggagtgtgagctatgtagtgtactatatattcatcgcgctgcaggccttcggtccctttgtgggtttgctcttgacgagcccagggaaagttgaacggacagacggtgtcccagtaaaactgcggatcgccaacaatgtctggttcgagatcaaagcgatgaccaagctgctactgagcaagaagtttgtccttatcatcccgctcatctggcaggcgacattcggtgaggccgtcatgtttacatacaactcgctttggttctcggtgagggcaagagcactgggaagtttcgtgtctggaatcatggcgatcgtatcggggaacctgctcggtgcatttctggatagcaagatctcgctgaagttgagaagccgtgtgggattcatcattgtgcttggtcttcagggggcatggtggctttggggtacgattgttgtcacagatttccacaaaacgaaccccgtcttcgattggagcgactctgggttcgggaggggattccctctctacctcttctgggttgtgggatttcaattgaactatatgtttctgtaaggactccttttcgttctcagtgatagctatggtcaccgtgatgtggagctaagaggcaataggtactttatcgtcggcaacttggcaaaggatgaagaagaggtcgtccgtattgccagtctgttacgtggtatggagtctgcctcgcaggctgtttcggttagtctccccctcagcgtttcttaggctgtatctgattgtagtttcctaatactgtgcagtacggactaagcagtatctccattatggcgtccgttggaagtatctatctcaacttcggcctgtgggcactcgctctgtttcccgcttggcttatcattagggagataggggtgtcattgggcgacaagaaggtggagagggagacgaggacagcgagggaagtcagcggtgcaggcgcgcactgaggcgtcgagtgcagtgtcgacggttgttgaggaaataaataggtttcagttcatgtgcgagatagagtgttctgctagcgtactaagcgcactataattgaatattaataaatggccagggtgagcatgttgggcttacgctaagggcaacctatatagtcagtagtggtttgactgatatggtatcgggggttgatagacagcttagacagcactatcgtctacggcatcaccagtccgtgtcatttattacgatagatcgaatattcacttggctcttaacaagctggatggacggtattaatacttcgccacaaaaatcaaccaagcagtttcagaaaacataaggttgtatttaacgccaacgggaatgtgctggctgccaaaaatacaggcaaacttatcatcttcgccagtcaaggaacattcatgattgactatacggagcttcttatccctacactgaaggccttagctggccgtgatgactgcatggttatcggagcactcggtatccggggagctaagttggagggcgtggaaataacaatcaatgcgaagatcgtcgacttcctgctctacgatgcagttctcaaatacgcggatgtgtttgtgtccaatgctggatacggtgggctcatgcacagcgtcatgaacggcgttctaatggtgttggctgggaccggacgtgagttctctgcttcactttcccacgcacgacaattcattacgcgcgcttgcatattccagcaagtccaatcaacacaattactctgatggtatattagaagacaaagccgaagtagcgatgcgcggcgagtgggctgggatcgccgtgaacctgcggacaaaaacgcctactgtcgaggctctccagaaagctgtcggtagagtcctgtcggagacagacttcaaagtgcgttgtactcagattcaacgtgaaaatgagcagttgaactgtctggttcagctggagaagcttattgacgggaaagcataggctattcacgtttttaccgaatggttctacaaacttacattgtatctggctctatgaaacctctacaataatactccatctgggtacaacaataggatttattatagcgtcagaatataacatctctgcgggtgaacatctgtcttacacctgcatggacagggccattatagccgccttgaatctcggggaaaaggtagaaccactttaagtaatagcctaatcaccgttcgacgccgtaactatgtacgtatacatatgtgatcagcatcaataccgcaaggcgtttatgatgcgagccaaccccttatcgagctggttctgcgactgagaaaaggtaatacgggaccatcctttctgttcactgccaaagtcatcgccaaccccaagatgtaccttgaaccgggacaacttgtctagcagttccctgttctttattgcctttgccttttcgctgccgtcgaacgaactcgcaggctgcagtttcagatatggtgttaacaggtcacaccatacaaagaagccggcgttcgatcccctggcatagggtatcccgtgcctatccataaaagcaacaacatactcataggtagcagcgagcgctttgttgttttccgcaatgaactgatttacgaacctttcatcctccagaatgttcgttgtaaaacagtccgccaggccggaaaccgagctgtactgggcgacaccccggatagactcgagcatgtcgctgtttccctgcgagataacagctcctaatcgcatgccgtttgctccgaagtccttgctgacaccccataagacatgtaccagactcggatcgatcaggccgtcatggtctatagagaggacggatgtgaatttgttcattgagaccgccccatcctggccctcccgccaaactgacaacgcgtatatctcgtcgctaatcaggtggacgccgaatcgttgacagagcttcatgatctcgataaggaatgactgagagtagcatcggcctagcgggttgtgtgggttgcagatcatgatggctcggatcgcacagccctgcttgctggagtttatcagggcctcttcgtatatcgataccgcagatatgccgagagggtccaccccttcgaagcttacttggacaagccttgccgctggccgaagacagatgtctcggctgaacccacggaaataggggcgtcccaccaggataccgtcgcccgggtcgcagagggcccaggagcagtgctcgatggctgatgccaccccgttcgtggcaaggatatgcgacggtctgagtagtttcgaggggtggagataccgggacagaatatcagcgatggctgctttcagccggggagaacctgtgatggtgtcgttcagggcaagatgctgcccagacatttcgaaactgctgttcgcgcggaacagcagctgttgctgcatcagagtgttgtcggcaacgcccagggtcacgtagccatgggggttgctctgcgggtgccagatatcattcaggacatcccagagagcattgctcgtgcatttcagagacgacctcgctctccgagatagtgtagatgccgatggaccaagcatagtttcttgtctctctataaaagtatgggaagtcatggtggcccatttggaacaccaggaacgggtattgccctgtcttataaaagaagacacttaacctaccactcgggcttgacagtgcgctcagggtctatatcaggtagtcaaatccgagagcaatggacgatcctctcttgagatgactttttcatgggcagagtgggcctgggcctgtttttgtctgcgctttccgacaacacactcgggcatttgccctttggcggagaaaaaaatggttaaaagtggtgactagcagtaaaataagctggaaaggcattaaatttcgatagtgagaataaccagtaccacgtactactcggtaaactcgttgcttcattctgacatcttctggtgcatatggcctaccgcctgggatggcatctggctggtatcaacggcttatgcgcccataattggtggggttcgtctatagaccctgtaacggcaatggggatgccagctggtatgtcagagcaacagtgaatcaagggcccgagatatctgttagaaccataagtccagatcttttgagtcttggatgggcatgcaatagatagattgccgttcactataagagcctaaatactattggctctttcttttcctggtcccagctccacagggaccacatcaaataacttcctaattgggaaaatggcaatgagtcacatgggcacatgtcaatctaagcggtaaaatagaacgagtagatgatgtctcgctggtaatctctgttcaggtggtcgaggaacgcaagtcgcattaaatcccctaggcgtaag

SEQ ID NO: 3998 - DNA, 3014 bp, Emericella nidulans
gctggattgaacagcgtcattgttctctagtcttccactatgaagcagcagaggatcacgcagcggcttgccgtctggcttccgaatgcgcggaccacattaacgacgcatgcgctaatcaaggcgtgcacgctattctggtcgacggggtgttggtagtgcaagcaaccagcacgaacaaggcttcagcagcggaattggcctggcggtcttgtcttaagcaggaaaatgacgccggtcgccccgacttcctgctcgctattggcgacagtcgtgacgacgagccggttttccggtgggcgaacaagttagagagcgcacacgcggtcagctacgccatgacagtcacgctgggctcgagaagtaccgaagcgcgggctactttgactcagggagttgctggtatgttcctatttcatcgggtttgcgacttaatcatatgctaactgagtctaggagttttgacatctctagagagactggcgaaaacatcggctaatcaaggtgttgtgttgtagaccacttagaacacattgtgattgcctacaaatatcgataatagcatctttatgtatattcattagagccatgaactcgtgttggtaaaataagcaagtgaggtggtaaccgagtgaagcagagttcggcagcagacgagccgaggtagattagtctgttaagatcatgatttaatgaagcatctcctttccattactattcccacaccatccatttgtgacataacgataattccctgattccagatggattcaggaaccgcccatggcgcccagtttgaagaggccatccgcgtaacacccctcggccataaccgctactccgcatttctccagaaatctttctgtatcggcacaggtaccctcccccgcaccaataccccttactcgtgttttttgtcgccgcagcagttgataataattgatagtacctcatggcggctacacgagcgcggttctctaccgcctcgccctcgtgcactttgcgacggcccatcccaacctgtataagggcgagccggcaacccccatttcaatgcacttgaccttcctaagacgtacggctgaaggacccgcaaaactgcgtgtgcacgacatgaaacttgggaagagaactagttctctgcatgttgagcttctacagcctaaagatcaggcacaaagtggcacagaaatcgacgaaagggaaatggaagttaaagtcgccgggtacatcacagtcagccccgcgagctcagaggtcggagtatcagcaaaaacaaattgggaacttcacccgaaacccgtgagcggaagccgaagtgacggcggcgtcgacttcgaccggctatccaagacaggccgggacgaagcctgggccaggcaagacccgccatttgctcagttccgcaaggccacgacgcaggttgagctatacggtattgatccggcgctgaagaagcgcaagaacgggattgtggatcaatgggcgaggctgaagctggaggggcaactaacaagatggagcaatgaagccgttgtgttcctcacggacatgttccccatggcgctggatgggtttgacacgatggctgatggaagagagtcgggctctgcgactgggggagctgggccgacagccaagtactggttcccgaccgtgtcgctgagtattgatttcaagaagagactgccgccggcgggcgaggaatggctgtatagccgggtcgtcacgaaggaggtgcgagacgggaggacggatttggacgtcacgattttggacgcaaagggagagattgtggcgctgagcactcaaatcgggctggtcgtgagtgccagtcggaacattgggaagcgagcccggttgtagatagtctatgaactctattctatacaggtacagcatacatatatacaaaaggtaagtatatatcataagacactcttggccaaagtcagcaaccaaaatgccatcgcatccaccattatctgtccgttctgaacaacttgcgccttcacccacaacttccttccctgctttgcaagcacctggactctgacctcgatctcgccgggcaccgaaactggcctcttatatcgaatatccaattgcgatgtaaacatcttagagcggatccggccgccaggcacacctctagtagcagaagcggtacccacagcagtgggatcatattgctcccccgcctccggcgcataaagtgtaacacctaagctcatagcttcgtcaatcaccgtagccagaacgcccccgtgcgcggtggccgggtggccgcaaaccccgggagtagcaagttcaagccgcatgatcagatcagcgccgggaacggggatcaaatccgggggagtggtgggcgacggccatgagggaggctgggaggggagatttggttgcagatgctcgagtttgaatgtgtgcacggttgggatggtggttgcagatgaaagggtttcagaaaagaagccgtcttcgccggtggctggtttggggaggcgggagtatgttgagatcggagtatattggggtggcggaacgtgattggtgggcattttttctttttccctttattatttttttttttttggtcttctcttatctatcccagttctgcaatttctctgagattattgaggtcttttaagtgtttgactacgagcagctaaatgtactggttggagcggcggaatgggtggagattgaaagtgacctcggctacgacattctatgaagaaccgttcttatcttgtctgtgatagtactggtaataaataataatgcagaggactccgcagaccggccgaataattggggaattaagtagctgaaaccagatggaccttagtacttaaagccggctagcttgttaactctagtcgctgccggattccgttcctgccttggatacgctcaccagattccagactatttatttgacgccctggcccttggtcgccttcattccggattttccttcggtcggacaattaattccaaattac

SEQ ID NO: 3999 - DNA, 5531 bp, Emericella nidulans
aagagttttttggaacacaaaaaggagccggtatagaaaaaaaaaaaagaagaacacccataagaatatatagtggagaagttttccaaggggggggacagaagggccggaaaaatttggggtccccgtgtccctgggtaaagggtaatccaaaactgtttaattccctgtgccaagaggtccaattcgggggagccaccctaaaaccggaaaaagggcgcctcggggaaagaggacggattttttgtcaagaaaagagctaatcctcccaaccggtggggctcctcccctttttagtggaatttttccaatatttctcccgccgttgaaggactgtcaaaaaggtgataataactctgcggtaagttttaccttcaaaaaattgggcgggcctcggaaattcaaagccgtaggagatatgattcctgtgcagcggcggaaaaaaaatgtccagctcaggtagtcgaaaagcgtctgctggggtgccaaggtttccaccagagacttcggcacccaagtggatgtcaagatctttgtgaagtgtagactccacaggaaatccggtgtgcaagaagtgcttgtaaaacgccttctttgagtcctgtgtgaaaatccgcgcaataccgtacgaatcgaattgaggccgacccgcacgacccagcatctgcaagacgtctgtcaaatccatgtccttataaccctccgtcttcgcgtcgaagaactgtgttcccttaacgacgacgagatgtgcaggatggttgacgccccaagcgagagtgctggtggctacaagaatttgaatcttgctgttggcaaagagctcttccgctagctgcctatcggattccaccaaaccagcatgatggagaccaatgccaaaggaaagagcctccctcaaagcatcatccttaacccgttcaaggtttaactgcagatcatcctccgacatacggacaaaacgacgagggttatcctccattccacaaaagtttatcaagtctttggcagtcagtcgagtctgcctacgagaagcaacaaacacaatcacaggcttctcgggagagtggttcttgatggccaagaaagtaggtcggttcattgactgcataagagggcagaaaccacgctgctcggggaacccatcgatatagatctctaaaggcaccggccgaacggagtgacggaaattgtacaagccttctttcactcccagccagtttgcaaggtcggaggcattcgcacaggccgtcgacatgcccattaatcggaccgaaccctttgactgtgaagcgatatagttcattcgagagacaatgatttccaggatgggcccacggtcaccgccaagcagatgaatctcgtcaatgatgaccagactcaccttgcggacgtaatctctggtttgccagctacgagaaataccgtcccacttttctggtgttgtgataatgatgtctgcatctcggatcgtccgtgtgtcaggcgtgttgtcaccggtcaactcaactagtttgaggcccataggcgctgtaagccgtcttccccagtccattacacgctcgcgaacaagcgctttcataggcgcaatatacacgacctttgagcctggacgctctctaaaagcccaccacatggctagctccgccgcgactgtcttcccactacctgtcggcgatcctaaaagtacatttgccgcggtgtgatatagaacatgaaagagctgagtctgcatcgggttgaaatactgaaagcgctgcccgtacagctcttcaaggatcggattcttcaaagcagatataggaagaggctgcaattcgaggagatccgtgtacacactctcagtgtccggacggatcagatgctggaacgatatcggggtaacagtctccgctcccaaccaacggtcagatatagctcgaacataaatttgattcggtaacgggtctgagagaggaatggtaaagttcagctcgtggtcatcatagagcttctttcgactcaagataaagtactcgtgatggtagatctcggacgtctccgaattttcaacccagatccagtatgattcggaggcaccatggtgtcgatcattccaggtgaattctggatacagcattaggcgcacacgtaagacgtcacgatttagcggtgcaatctcagcctcgacactgagagtggggaagttatcaagcagtttcgccaatgtcttgcccattttgtggttatggacaagttggccaagctctgcagtttccatatccctcatcgattcaactgatgaagccggaagcttctcttccaagtttcttagaatcggctgcggcaaatcaaactgccagaacgggtgatcgaacggccacatttgcttttcgatagacttgcacatcgagagaaggacctggcattgatagccccaacgtgcgggtcaatgcaatcatgaacaaagcacggcatatacgtgctgcattttgcgctacatatccagtgtctgagaccaaggcaaagtcttcaattttggctcgggaaatgtaggactggagcagaatgttggtctttgcctgtgcagaatcatttcctccttccacttcagtctggaccgcttcctcgcgaagtctagtgagttctttcgactcattttcacgagactggatattgtcgaattcaccactcatactgatcatccgcaagacgtctgcctcccctgatcgaggccgcatgagctcgttgaaaatctcaatactcgtctgaagcacatagtattgacttgcaatcctcccaacgtctttagctcgaagttcctcggttttctcgttgtagattatcatttggcttttttgcagaacaagcgcagcctggatgataagctggcgacgtcttaaaactagcccagggtcgtctatcaattcagtgtagtcaatgccataatttcgaggttcgcgcttcatgcgcacgaagaggtaggaatatcccagccactgcactccttctgaaatcgacgtgactgttccgagagcaatctcggcattcaaattatcgaccaatcgacttgaaaagcgggattcaattggctgctgcgaagttaccgcagacaggtagtggttcaatttgtcatgtgttgtacaaatgaagccgatacctgtatcttggaattgaggacgaccagcacgaccgaagatctgcaagacatccagaatgccgagatcgacgaatttaccctcttgtgggttgtataattgagttcccttgatgaccaccgccgcggctggcaggttacaccccaggcaagcgtactgtacagcagagaaccttaataagcccctcagaaaacatacgctccataaggtttcggtcacttcggctcatcccggcatgatgtgtgccaaatccactggcgaacaaatcacgcagctcgcgagcacgagcatgtttcatatctcgtagcgcattagaatagttttcatgttcatggcagctgaagagagcctcgcatccgtcctgaactgccatttgcttgagcatccgcgcagttagcacagtgtctttgcgcgagtgcacgaataccatgacctggtgtcctctctcgagcatgtcccggactttctcaaaagtcacagtatcgatattatcgcgggattgcttagagcctggcttccccttaacgccaatgaagtgttgctcgaggggcactggtcggaaagaggaatcgaagaagaacagcccggccatcttattgaccttcaagaaatcggcgacgtcgacgtagtttggcagggttgctgacagaccgacaatgcgaatgagcgactgggtactttccacctgtcgttgggttcgagccaccaatgactcaatgaccgcaccacgttcgtcgtgtagcatatgaacttcatcaatgatcaacaagcggaccttttgcacgagttccgtgtctccagtgctttttcgagtcactacgtcccatttctcaggggtggtgactatgatttgagtctccacaatctcccgtttcgtcaactgcatgtcaccagtcagttcacgaactttgattcccagccatgcaaggcgttttccaagtttctcggtaacctcggcagcgagggctttcatgggagccacatagacgattttgaaatcatccactaggaccgaaaactcggtagcacccggctgctcagcgggattggggaccgtgttcttcccaacggcattcagaattgtcagcatagcggcatctgtcttacccgctccagtaggcgcgcagataagcatgttctcactagttttgtaggcgacatcgtacagcagactctgcattctgttcaaagtcttgtagcctttgaaggtaccctgacaaagaccatccatggaagatatcggaaccagtttctgttgctggccgatggttccaactttggaagcagggacttcgacctccgtatatttcggctcgtcaatttgtctactacccagtggtagaccatagctttttccattcagggcgagtatgtttctcgagtcgtgcgtcttgaatacatgcgggtattttggcccctccctagtctgcgccggcagaagagctgcatttttgtgctcgaagtcctgcctccgaagagcctgctctctctcggcccgtgtctgcaattgtccagatgccaatccatccgtctgcgcttgagttttccccggtccagcatctagacttctcagtatctccttccggtgtgcgatcagctcaatcacgaaatccaggtcgtcgaaccccacaatctcagcgagggacatctgcagctcgtcgtcgccactgtcggtagctagcgcggctatgatttgttgcgctacctcgttcaattccaccccaggttgctgggaagcgagaagctggcatctctgctgtagccacgtttgatcgtattgttcggagactggaggggaaaggagatcatcgatttcgtaaatgccctcgcttgtggactcctcatcaaaactgattagatcccagacatcgtccactgtcccggcggaagaggagttctcgtcgaggtcgaggtcaagatcgctgccgtacgtcagctgggcgttggcggggtttttggtaaggttcagatctgcgatggcctgccgcatggcagctagttgggccagccactgcgactcgatggattctgtcccgttcatcatttttcaaagtacagtgtataatccgaatcgatccaatttccctttgaaaagagatgtaaaggtggtaggaggcggggaggtgaggggattgaagagaattgaagggaagggcagttagatcctcggcagtggtgcagtgaatgacctaagtatagatgcctggggcgctccatggacagctaagatatacaatgattcaactcgcggtttcttcctcaatatagcctacggagccatatgcttattcaataaaattacaatatgcaagcttctaccactgcaccctgctatttttgtatataatgtccttgttttccagaactaatatttcgacacaaccttgcgaaaagctt

SEQ ID NO: 4000 - DNA, 3619 bp, Emericella nidulans
ggaaacactgctctacatacttgatgtgcgcgccaccgtctaatggcgctattttcacattgtggccttcagaggccatgagtggaacatcatagctagcggatcccagaccaactcaagcaaaacctccttgtcagtcaaataaggtctgctgccagactcaaggaaccgctctgacacacatgtacacgaccggctactcgtgagatcctaacgtaaccaaatttgaggttctgtctcagccgccctcggtgactgacgacctgacgacagcggcaaccactgatccgcatgctggatttgatattgttgcaaaagcactcggctgcaactacggcgactatgctgatgctgaactcgaatgtatgcgacaagtgagctggatgcagatagaggagttcattaaccgctatactggcacgcccgagctcgatttctcaaactatattcgtaagtgcctactagaagcgtattttacattcatgttcccaagtactgcgctaatgcgagataatagccgatgaaaaatatatcttcactaacgaaacagcacgctatcttgccggctaagtggctacggtcccagagatccgctccaacacggcgagcgagatgcccactacgaacagaacgactacagccgagacacagagacagtggctttgcaaaggcgttgaggaagcaatgcttcgaaataaatatggtctagatacctatcggtacctgtgggccgggaactttagcaatatcagccccgagccatggcttggagcgttccattggtctgatctgcttatgatcttcgggacgtatgagaaggacgtaggagatgttccaaaattggaggtcgatacctcagctgccatccaggatttctttttggcgttcttgaaagatcccggcagcctgcagaggcggggatggccactgtatgagcctgatgccgccaatggcggcttcattatggagtttggcaagaagactgcggcgaggaatattacaggtgcgtatcttgatgctgggtgctataacagttctgtgcctatgagactttctgggtaagagtgcgaggaacacatcgactgggttgaggtcgtataaccggctcaataggtcctttggattgtatccctcatctccattaacaatacaacaaagatcgttcactcgcagtgctcatattatatgcacaataagcccgtaagctggatattcctgtaagtctgaagagatcatcagtcaatacatggatatcgtctgacacagttccccagtgccgctctacaaggtaccgaaagccgagtcaataaggctttatttgacggcgggcacctattgtttgtggtgttgagtcagcctatagtcctaagagctcaacctacgtaatctcagttcaagcaccaagtcaactactaaggtaagagggtgctctatgcaggaattccatgaattctcgtctgaggctataaaacgaaaactgttacccaacgagtgtggcgcaaatatgcatacgtgatattgcgcgctgaacattacatagagtagagtttttgtaatcatgataacctgcaagggcctactcgagaaataatcacctggaatcgaatggccacgttccccaaaagactgcacagagttaatgcctcacgacgaaaatacatatgcagatgctcactttgaaactctactggtgagcaaagatgattttctgtctactcacggtcatatgaggacacgatttaagccggtattcacttagcggcagcagggcacaggtatagtcatgcctcattgggtaagcatatgaaaagtgacgggttaaaggacggttttgggtccccatttccaggcttacgaagctctctcttgttgtcccagcaaagagatatgttagaggctatgaggaatccaagtgctgcgttgatcgtctcttgtcctggcaggtagagagtcaggagatttcgcacttccacgctaaagcagagaattaagatatggttcaggcagtgcttttaccaagtagtccagatcacgagctattaacactagattatagattcaattatatatatcgtatgccgcgcgacggccaaagcagcctacataaacccccataaatttccccatcccttctcctgcacttcatcgtctttcgatgtagccaagtcatggatctcatctagctcttcaagcttcctcctaaccaaggcaaaattagacaggtcttccagtcgccattgaacacttccccaattgttataatacttgattcctagccagagcgggatgaagcagagaatctggagatattagcggaacatgctcaacatgctagagttccacgactaacataccgataaataggcagacaggaagcgcggtgtgaccagttgtgccacagtgctgcgccgtccgcaacggccaggatgaacacacacccgaataatgcaagatacatcgtaaccggctggccgtgcgagcgccatggatacagatcttcactgccttggcttggaaatcggcggaggcgggcgaactgaggggatgcattgagttcatctctgtgacggtacaaactgacgaggtttagcgagcctagcaattagacgccgagtacctaggtacgcaccaattgtagaaacggatgaaggcccaacattcgcacgcccagactataatgcagctgacagagcccatctgcgacaaaacttcgagcagctgagaccggttagtgggtgactctcgagtatatagcagtggaccgggccctagacgagatacttacgctggatatcgtggtatctgccgagttatgcggcgataagtacagaaacggcacccacatgaaaaccagagagaggagcatcgcacgaacaggaacctggtagttattcgtttttccgaagaacgcaaaaaagcgccacccatcgccttgtatccttcgcgtcaagccgaacagtgtccgagacgcaacgtagaggttggtgttcgccgagaacacagcagtgacgaagatgatggccgtgatcatgtctgccagcccgggaatcccagacatcactgcactgattacgaaaccagagtccgtcttgaatttgccccctttgtcgctgggcgatcctagccaagacagtcgcgggaggttctcgtcgttccattccacattcagactcatgaggaatccagcaatgaagtatattatccataccaggaaactggtccacgtggcgacgaagcggaccgaaatatagggccaacggcccttaagcacatctgccgccgtgtctcgagagtgacgtttatctgggcgtgcttcgagagcggttgctgccgtgatatcgacgccaacataggcgaaagcagcgatcgaaaaggcgtaactgttcccgttaatctgcagcacttcctggacaagttcaggagctactcacaataaagcagacgcccagttgttaacagcctcttcgtcgattgggaacattgggcggtgcttatagtcttcatcgttagtaaagctcgctcttgacggaccagggatgcttactaaaagtaccaatatgccctccctctccagctatacctggttaatctgaaaatatcaactggtgtagaagtgaca

SEQ ID NO: 4001 - DNA, 2485 bp, Emericella nidulans
  unsure (1)..(2485): unsure at all n locations
gccttgctcgagaatcccggtgtattgtgcgtgtttgacggtgcgacggactgattctctttctctctttcttgccattgttcaggctgcgaaactcttctgtttccgcctgagaggggtccagccgtattcctatactgacaaacgtgaaatagttcaagtagactgccgtcccagcctcgacattcacactgtcaggcaagaagcgtaatttcgtctcccaggtacaatattgcgcggtttgcttgcgtaggaagagtgttgggcaggagggtgttgatagggtgtagggggcaccaagtagacggaggcctccactggtcctggcattttggcctggctgtgtcgagcacgcgagaagggcgtaatctttcttcagtggcgtgttctttctgtaccagccgagttggagggtaccagaggtgaaatcgtctctccattccacggacgacgtgtagtggtacagatgcggcgtatctatggcgagggttattctacgcttggagttgaccaccggccagttgttctcccatgttacgggggagagaaatgtttctctgcctgcatgccacaggttagttctacctctcacaagtgtagactgaagggtaaagtcaaaaaaagagaaaagtgcataccaaaaacactcccctcccaccgnttttcgttctccctccacaccggcgcgggcgcccaggaacacagcccaccaatttccgtggtattctctacataaacggcatggcctgtattctgcacctcatcatccggtgagatcccgctgccaaaaagcggattcacctcgctgacaggtccagcctcccacgggccaaagggactactctcagaccgacacacccactcgctgtgtccggattctgtgcccccttctgcggtgaaaaggtagtagtatttccctcttttgaaaatatgcgagccctcagagactccagaagacgaggagcggatcagtttcggtgcgctggttacatcccctgtttgcaggtcgatcgtgctgatgtggattgcgaagtccttgagggggcaaccattcgtgatggtgcgctggtgcttgcggtatgtactgctcaggtagactgtaccgtcgtcatcgaagaagagctgcatactactgatcagccccgttccaatatctcgccatacatagtggtgaataggagaattacatcctgatggaatcccctcgcgtctagccaaacgctctcgctccagctttgccccgtaggatcccagatcccctcccagtcggtcttgacatagaacccgcgaggccagactctgtcatcgtcctgtggcctataccgactgaagctcgccgcgaccacgtagaacgttttcgtggcctcgtggtaccggatcgtcgtcgcccatactccaccacccggctcaggtgtctggatctgcagctgtgagggacgagtaatcgcgtgggtgatcaagttccacttgatcaggtcttttgaatggtatatgggcgccgaaggcgtgtattcaaaagtcgaggttacaaggaaatagtcgtctccgacgcggactatagagggatcggggtttgagcccggtaagatagggtttgtgtagggcattctgctgctttttttttagtcaagttgatctagtatgagagcggggagacgatctatagggttcgtgggctggtgaggtctggattgatatagatgttggacagcactatgattggtggaatattgtgacagctcgaggattaagcaggatcaagactctgtagctcattgtaatcagcctgaatgtggttaatatacttcctgtatagttcctggctagttcccagctagttcctggttggtcaatctggtagagtataacagagtataagggttggagagataatggttaatagaatcccgaaatatatattttcacgaggtcacatccaatctcccacctccaactacagcaatatatatgacccccatatatcctttataagtcggaccctatatcggtagaatagatgagacatgctccactttcttccgtcatctcgtaaaggacaaatgccaccacatattatcacacaatcatttgccagcccgtttacactaccaagggcctgtccagatgcacccacggaaatattcgctttctctttcgggtccacgtgcttccaaatgaggccacaacctcgatcaaatgcatgtgattgaggccgagataagcagcacttagcactatcgggcctggaaatggcactatcgggtctagaaataagactgagattgcaatagtgaaacctcaatccgactgcgagccacgtgaaagcagaatggatgatcagcactgatcgtaagatacagggcagcgtcggtcatcactgccgtcggcaagggatgcacccgacgcctagatcacctgatgngtgtgatgggctaagcctagctgcgaggcgtttctagaactgacattgcctggatcaactgct

SEQ ID NO: 4002 - DNA, 2365 bp, Emericella nidulans
cgtccgcatgaagattatagcaatcgccatagaccccgtcctcgagtttcacctgcatcacagtaaacccccctggtgtccagcagtcggaacccgctcgcatcggagcaggtatcccatttgaccctttcgaaattcaatccagtcgtagttggagagcgtattcaggcctgacccgaacgggacgccgcccgaggtggaagtgcgatatggatgagtgtcggtcgagtaaagtgcggcatggtagttgaagtcctgtcactcgttaatatacatatcttgtcataacacaggaattgcactaatcgacctcttgcacgtggatgatgtcgtagctgtactctgcgaagcgctcgccaatgagctcggtattttcagtcttgtcgccagggacgtcattgctattgaagatctcggggaggccagcgacgttgaaggagaggatattaaaagagcccgtagtggcggcgagagtggagggtacgagcgaaaggagggtgatggtggacttcattttgtctggctctgcttctacaggatgtggttctggactggggataatatgacatatttatattatacatattgcaggtgcctggaggcgatactctttcggtcgactcgtccgctactaagaatcgctagtgagtgtgaagaatccgttgattaattaatctacgcagcgtcacgtttaaccctgacgatcatcgataggccgtttatcaaattatattgactgttatagtagcgaggaaccagtgacaagagcgaaaagcggcacatgacatacattactacacactcaaaccgcggctacagtacaatggttacaataacagcaacaacatatagcagatatgtaaacattagcgacaagagggtactgaaagagcgattacagcgccgtgatcgaaatcctctttgctcccgcattccccgacaacagcgctgacccgctcgactgccgtaggtggttctcatggttctctacctcctccacatccaaactgaaacgcctcggccgctgccacatgcccaccgactcgtccgacgacgcggtcgctgcctgcaaccgctcaactgggaggccgaacttggtcgcaatctgctgcactctctcgtgcgcggtcgctgcatcgatcgctgcactctgtccttccttcgcgaggcgcatctgcgcatgctgcaggagctcgagatgctgcgtcacggcttcaacggcgccgttcttcccatgttcatcgctgttgaggagctctgacagcgcggtctcgtgtaatgttgcagcggcgagatagtttccagatgcggtgtacaggcccgacagcagcttgttcatttctagagtgaccgggtcacagttgccccagacttggcgcaggttatagcagatgtctttgccgagctggatcgctgcgttgacatggccgcggcagaagcgggtttcgaccaggcgccggccgatccagacgactgcagagagagaccaggtcttctggatcatccgcgaggtccagagctccgtgagaatggactggatggttagcttatatgagactgatgtagtctacagggaccttacctcgaggtcttcgaacatctcgtgctcgcctagtacggtaatgagatcgttgagctcggtaaacggcaactcggtgaattccagcggtatctcctttgcattcttcatgatcccctgaaggagcatctctgactcgacggccattctttttgcgatcgcttcatcggtgcacttgttggtctggtatccgctgaggtacaggcaaagcttgatagcagtgaatatggtctccattgctcgcaggctgtcggttagatgggcaaaggagtggaacacgccagtcacagtggctgcatcttcaaacctgcctgtgttgcacaggtcacgcacaagacctgtaacctgggtgacaatatcaaaggtgtagttctcgttaaggctctcgcggcgacacatgtcgtagaatacatgcacaatctctttctggcgagcaggccgtgccaccgacaaggtattgcaaaagtattggtacaactgcacttcagtgttcttcgcggcttgggtttgctttcgctggttttgcagacgaagcagcttgtcgccaactgccaatgttggcatgaggtcatggctcgcaaggctctgctggaagttgttgtatatttgtccttcgtgggtcaactcgttcaaaatctctcgtgccgactgccgcttgccaaagacttcctcgaacgccgccacaaaaacagcaggccggtgttcatccaaagcctgacgatgcgcagccggtgtctcttgaacgacctgttggcgtaggctattgatcaacgcattgccttcatc

SEQ ID NO: 4003 - DNA, 1376 bp, Emericella nidulans
ttgcaagcgacgttcccttccctgcactaaaagatgtcagggtagtccggctcggtgggcgcgaggtcatcatgacgctaaacgagcatgcagatgacccgcaacatgactgcgagatccgattcattgacggtgagtacggtcgcctgttgcaatccatcaaggcacggacatgtggcggattctcccatatcgtgccgtcagagcggcgaaacgagctcgcctttgcgctggtcacatacggtgtaaagaacaggccatatgtagcgctaattcacaggtacgggttcgatgccaaccagaaattatttgtctcccagggtcttgatctgttcgatctcgaaagactccggggagcctacgagttctatcccgtcattgaccctttcaggaactttatcgtcggggtccaaaaggacacgcggtttgctgttgtcctgcccgttgtacggctcaaactcccgtggacatggcatgatcccaagaccggcagttcgtataaggtgacactcggtgctggaacggggagggtcattagcatccctcatatgaacatgtataaaatccccaaagggtatgaaccggacggtcctgtgaagatccaagggtcgtgccttctcattgggatgccgccagaccaggttaacaacgatagaccagcgtttcgattctttgagtttggattccgcaagcactataatcggactgtctcgctggatgatacgttgtttgaacaagatcatagctattgataggcgtttagcgtttacgggggatgagggctattcgctgatgtgttagttccttgatttgcgtccgagcttttttctggacctacattggaacatgatgattactatccagatacttcacagagtactaatgctgggctagcggattgttatgatcctaagattataacacacctgaccaatccgcgagactggcaagtgagctgcaggcaaatcgtcaacttccatctcaagtctccaacgcacccatggtacgagactgaggctcaaaattcttaacggtgtccgcctttgtatgatgcattagggcaaaagatgaggttggtagactcaaaggtagggcgatctgtgcccaaggtgggggtaatcattgtctatgactggtgtctgagatggacgacgcaaagagcgtgttctataatctcactagccttgtaaatagttttgtatgtgcatttctccaatctatgaccatgggtttcaccctatagggctatactccgcaagcggcgcaaatatatatgtttggttactttacctcccccactatctaagcacgaaggacagtttcaagtggctcgaaacactaaggaacctttactcttagtgacgatagaccatatc

SEQ ID NO: 4004 - DNA, 5812 bp, Emericella nidulans
  unsure (1)..(5812): unsure at all n locations
ccacttggccgttaatcgcaacgttcgcggactcaatgccatagtttaatcgtcatcagcctacctgtagcttttattacatgaaaagacaccaaaggcattgaccacctacctgaatatccatcaacacaacatcccactgcgtcgactctgccgagtatgcattcgcacactcctccccattcaccgtgcgttgaacagtgtggccgagtttttcgagtcgattgtcgataatatatgcggtgaacgggtcgtcctcagctacgagaacccggaggggccgtccgtcgggcgcactaggcccagagctggggcctgacggccgtgaacgtgcccgtttcggattgctcatgagaagtagatgctgtcgattctccggtctntttgggtcgagtctgagcttcgctttcacctgacgcttgttcaccagcgccatcagcaggggctgtatcctccggttcagattttcgaggcacgtctgggcgggttaggctgtcttggctatttcttttggaaccagtagtgctatcaacgaggatcacatcatccccggtcgagaacggggccgcagagtccccagtggcaacaggacggtgttccgcggttggactcttggtatccgagccttcggggatagggaactgtagcgaaatctggaaccgactacccttcccttcttcagaccgcacagtgagttgcccgtgcatattgcgcacgattcgagccaccaacgccaggcccaggcccaaaacagccttatccttgctcgccttagcctctggagcggattcctacccttcttcgctcccgccataataatgcgagtcgtcttctcctagcacctgctccagctcacggaacaatagctcaagcgtgcttgatgagataccgcggcctgtatcaaggaccgcgatcttgaccgtcgccttgtcggtatcgccctccccaggagcgtgccacaccttgacagtcactccaccggacgaggtgttttgaaccgcgttggagatgaggttgctgatcgactgccggacacgccgctgatctccaatcacggtctcgggaatccccggttgtgacaataccttgtagttcaagcccttgcgtttggcttcactttcaaacatggccgttgcttcgctgaaagtggtgggcaaatcaaagggctcatctttgatgaggctctgtcccttctcgacgttggtaaggtcgagaaggtcgttgataacatagatcagggacttggatgcggagtaggacttgctcaagtgatcccttgtctcgccgtccagcgcaccttcaagcgcgatttctagatagttgacaatggcattcagaggtgtgcgtacttcgtgcgcagagtttgccaggagcaatttggtaaggctggagctctccaaagcggcttcctgctgccgccagactttgatgaacttgccatacaccaggcagagcacggcagctgtgtcgacctcagattcagtccaatcgcggcaccggtccaggacggtttcccgccatgtctgaaagctctttcggggctcaaggtggccctcggtgaacttggcctcgttaggattgccgccccatttgacttcggtcaattgaccgcgacggaagaaaacaatgaagtccaaaccgtcggtcgacagaggcacataaagcaaacctgaaatgtccttgaacccgggaggataattgaggtcctggaagtctttgacgatatggttggacgtcagtaccgaattgtattttcggacctttaggtactctagcaaggccaacatctcctgagactggggtgactttgccagaatttttacctcgccgcggatcacagcgcaccgtagtcggcatccacagacgaagcaaatcgtcagatgaggcaacaatgtatccggagggtttgcgtcggttggtactgtgttgataagcttgcgagcctgcaggcgagaagcgtaagataagcgttcgatatttcgagaaacggtgtcaccgatcagacgacacatcttccgaatgggaaatgacactcgcattcctctgggtccatacgaatggcaggaaataaggccccaaagatcgttcatactgttaatactgatagacatcgatgatcgaatttgcatgttagcaaggtatttgatgtggataggcgacatggcacggagataggcgtgcgtcatgtccaaaggtgtttcgaggtcctcaagagctcgacagaccagccgtgccgtgacatggtcccggtcgtaaagtagacggaccttgtttattcgatacagatctcgcgcttgtttaggaatgtcggcggccgggaaatgcaggcccttaaacagatctatgctcatcgtcggatcgaccaattccgaaacaaccttgccgttgaattccgagtcgaattggtataccaggatgcggtggaaaccagtgagctccttcactatcccagaggttgtatccaacagcgcctccatgttgtccgcacgagccagctgctcttgaatctgactgacgatgctgaagacctccattgcggctgcttcacctttccggcgacgagcgcgacgcaggacacggagtggctgatttatagtgatcgtactccccgccatctgctcaattgtcggaaccacatcgagggtgttcgtgggaacggccggtgaaatatggcccgagcttgtcaggggattgacatgatcgtcctccaactcaaactcgcaaatgaccaggccgttaagtgcaggattagtgtgtatggcgcaccagacacggatcgtactgccatttggctgatttacagtgagtataaaaacctccgggccgtccaccgagggatcataaccttcctccttcacgaagtcgacgtggtcaagaaaattatcggcctgatcttctgggaagatatcgcataaggtcggtagggaaaagagatcgtttggagagtagcctaggatgtcctgagaattctcgctgacaatgcgaaccaccatctgctcgcccggctcttcccgtactgctaccagagcaccgaaactttgaatggcgccgggtatatgaatcggctcgtcttcgcaggctttgaaagagtcaacggtcctcccagtgattacggcatgaccgtcgtcggtcaccacatgtcgaaatcgagtggtcatgagctcgtacggttcctgcacctgagggtgcgaatcctccgaggagggagtgaaggttgtgtggtcatcacccctccgcagccctgtagtgttagacggcggccttgcggacgatgagtctgacatccgctgcgaagatggcgcctctgaactctccggtgacaaccccgtccccccgctgtagtccgtcgagtttgccctgctatccgaccgcagacgggtccatgtatggccgtcgatgatcgaaaactgacgagcgccgctggtcggagagagcggactcttcgatttgttcgaagatggttcagaggtcgcggggggttcgagcgaaactagcgatcgaatcggatagactcggtcataggcaccgaagatggtgcgtcctgggaggcagagtaaccgacgcccgcgtctgttgatggtgttgagggatcgcggccaggtgtttccccgggggagggatccctcggggagatggaacgagaggggagctcggacatgctcgacaaggaagagcaagagggcgctcagacaatatgctgcattaggttccgcgatctgagggtagcggcattaaagtctggagaggagtgaagagaggaagcagcaaggccaaagtgcgggcgcgggcgagctcaagggtcactgcggggctcgtggcgggcgggagtaataaattctaaccaaatcaagccgcacagggtataggcgagaccgaggaagttttatcagaaaattggaattggcatttctgggctctcaaggcaacagagtccaggctgtcgtgctagtcgtgagagtacgtaggaggctcagaggggcgctcgctcgacctgcccaactgccttccaagaggcagtcacgggaccgctggacccagcttaccaatcagcgagcctgctgaaggcgattccagggtaccgccgggccaccgccaatgaccgcccgccaactccaagatggagacagccgacccaacttgatcgcgataccagaaatcaacccctcggattcgtgcatcgaaaatcgagataccgaggatatggagcttgggacagtcgatatctggagtcaagagtcgagaaacatcgctcgtaaccttatttagagtcgagactttcgaaactatcgacgtcattcctggtactctcaaagaatgcttatcgaatcagtgagcctggcaggactgagaaaatccgaagacaatcacatgaatcaactgcagccttcaaagcttgcgggccgttggcgggtcctcgcttaagaggtaccacgacttggctgacagggctggcatagacagggctcacagtggcagtatttacgtggttacactgcggagtagtactctgccactctagagagcaaggagagcacgggcacagcttgtcaaaacaactgtggacaccaattagcacgtcatcgaaaattgaagaactgagatatcattggcggacactgaagaaggactgatagcagacttcacaattcttcacaattccaaacatagtcatgtaacactgcgcctatgtgttggtgatatcagtatagattttggttatttgaatggtatctacagtgaatgattgtattgcaggtctcgatctcctatctatgatctgcataggcggtttatagtttcttataggctcaaaagaagcttctcgattaacatagctagttcagttcattcaaatagttgtgacctgtgataatggtcctaactgttgaataagtagataagcgagctgcttatcgtgattagtaagcagaggcctcgattaacatcctcagttaaatcatgtgatctcagcgagaagtatgccactaaagagaagataatcatagcacgccaggccctaaaattgaccatatggccgcagtattcgatattgctgctgaagcctaaataatccggccaatattgcgcattcggccggcatggtcaaatatgagtcactgattatggacactagcagtatggctttgatattactccaatgataatgcactatctcgtataagatgacactaggtagtatgacaagctgtcgcgcttgccattttaggtgcccgacatcaataagtcgagttgacctggcctgtgattgtttcacgctgctgtcgcatcaaagatatatatctcccgtatcccagcgctacggcaccaaattcgcttccaacattttccctaacaccactctggctcagaagtcgaggccgatattgaaaacttgaaatgtacaaggtaagaccgatgacatggacatgattctagttacacaaaccctgatgatgaaccctacctttcactcgccgaaacgaagcaccggtattgcttaaggccggtgtatatgtgtacctcaaaggcttctgagagtgctctacttacccaagatatttacttgttctgtattccgtggtaggagttgagctaattctgggtttcctggttgattagatatacattgccgcaacaaccaagagtgcttgagctttcacgctgggtgagcttcgtggaattggctgactggtggacctaaatgactcggaaatcctcgtcttaggccagggaataggagaaagaacaaatcggtgtatgttctaagctacctactgataaggatcctagtattctatagtgtcacctaaat

SEQ ID NO: 4005 - DNA, 4153 bp, Emericella nidulans
ttgtaaccagccccaagttgcaaatctagccctaggctatctctccatgcggtttaagcgaagagtggctcgcagaaatcaagctcaagcagtgaaggattcgtagggcatgaaaaggcatcgcatctagattgtctgtcatttgcatcatctgcctctcagaataattcaaagtgatcaagattgaataatcccatagtatttcagaaagagatgcattcgtgagccggaaccacgtgaccatgaagtaccttctatccaggtgcaggacaagaagcatagctgtcctgaggtgatgagaagaaaagacgaatcaccctttaggtttgtgccgcgctttttctcgtaatattcagcatgaccatacacagtccacgtcagattaaatcgatgcacggcctatctgtctcttgcaagggtaaacagaagtccacgcatacttttgaggtaactttgtgtctattgactttgtttgggcacggatgcagtgggctaaagtctgtaatgaagaaggctgcgctaatcactatccggggcgcgggtgcccggcgattcgtgccgtccgtgttgagagcctgcatgcctaacagaatactgagtgcaatgcggacggtaagcaggtcatagcatgcacgtcaagattggttgccggaggcggagatccggaattggagacgagacgcagagtcgcagacgcgttgcctgtcaggctgggcgtgtcaacgggtcgagaccttagcacgacgggtagacaagaactagcggtaagtcaagagctaaagtgatatcatccctagctgaagtaaatgaccagcaactctgctgctaatacagatgggagcccacagaacgagggtaaacaccttgcatgaagatattcataggctaatggccagctaaagtgaaacggccaggatgtgaagacagattacaacattactcagatagcaaactgatcagaacgcaaaggagaaaaatatgggcccaaaattatacatcaataggcaggactatcaaaccgcgcaaaattacacaccttagctggcagccagccgtactcatttcctcgaaaaggttctggtaccggtaaatttcactcatcgtctgacagatcggacgcgacattgccctcacttgctggatcaggcatcaccacgctgttgagatacgtaacctgagcatgacgacccgggttagctggtctctctcacaaagtacgtgcattcccaggtactccgccaccgagaaaccctgttcatgagtcgtggccaattctcagtcggcgtcattctaaccagagccagagcaagaagcttggggggaatgaggggcaccggtgatatgaggagggtatgtccagacacaaaatgctagtgccaattaaaaggcgcaaatcgcccgccgaatcggggaatagccaaagttggccacatatcaaggagaaagtgtagcttacaaatggttccataatgccgataagagcggcaattttatcctgtgcgtcaggactcacaaaatcagtatcgggaattcgtttgccaatagtaaagctgcgcagccgcagaagctggatgttctcgttatcgggttcgtagccctggggaaggagacgagttagttcctggtaagtggtaagttcactagatttccaatcgtaatctcggatgaggaggtatggagtgctgaaccatggaatgcgaagagacggcgtggacgcctttccgaaccgggcagagtaactcggggcaccagtaacctaggcagccaaagcaggccgcgtgtggcctagaaggctcattctggccaagccgtagcctgacccagtgcagaacctggtcacttattgggtttagattcgtggtcaacacggcctgaggtggtgcccaggaaggtcgccgcgtctgcgcttggaattggaatatccacacggagatgtatgcaacagcaaagcttctgttactgcaaaacaccgattaaggaagtctttctgcgtctccaattctgtgacagttcgtactttctatcgatcctcgttctgtaggaccgattcgttaccgagttcatggccagaccatcgatgaccagtgaccactcagggcggtcgccaagatagttcctgaggctcaacgctgttacaacttcagatcaagcacctgtctatcgctttctcttgatttgaatgaagcacagcagcgacgacgtgctcggtaactgacccaaaagccaggatggacgcgcaatctcgggaaatgtgatgaagacaggttcaaaaactcgcatcacactggctcgccttttgaggcaaggcgagatttttggaatcaaccattccagtcaacgagagagtggtggattgagactactctcatggtacaaaatgaccctggagtacgtaataaaagaagggtccttaccttcggcttagttttcagcgcactctcgctgttctggctaacgaaagcttttacagcttcgtcttcgtcatccggtatcccttcgaaaaattcacgtcgcaacctttcctccttgagaactgacttcaaaccttgcgaattaccatcgatgtcttcccgaagaagcgccagcttgtcagcttccggatgccaaaggcccgagcctagaacagaaatgttgtttagcaagatggaaacaaagatataatgtgaggaagggtgaattctcatagctgtcttccgcccatgcttgtacaaatgcgatgaacggagtgcccccgtcagacgggcttttgcaacacaaaagtacggccaaggatgagatgctgggacggtctctggcgatataaaagccgcgtccatagaaagacgatgacatatggaatagaggataatccgtctatcgggctaactcaccaacaaagctagcacccggttgacaatgcacataatatgcagcataaggacctttcttgccggtgcgggacctattcctgaattcagctgacgcgtgtacgatggcgataagactctgcctaccatgcagctgagaaatgtgtctgcatgagtatatcagcttcgttccttcaatcctgactgggcttgacagagcggaccgcgatgtctgaggagatgatcataccttgtatggtgtaggatctttactgaacctaatgtctctatgaatgcgaaatacctgctcattcatattagtatttgtcttctccctccaattagacgtatctcaccaagtctttcgcaggcagctcagggatagtgctatcctgctcaatgatcttctccgtcaaggtttcaacaaaagtatcccagtctttcttggaggcgcgatagtccgcgtcgtgcgctaagttccaaataatcagttataagtctcgcaaatggaaccgggcagaccatggaacctttgagccactgtctttcattgttcttggccaaatccttcaaaaacagcatggtattgggatgcaaggtgtcccccctgttaggcatatctcctggatcccttgctttaggcttcttgatgaatacctctatccctgatgcaaggtcggtcttgacgccctctatccatagctctttctattataaagagacaggcgcttccagcaaggttccacgcttttgagcggaagcctttacggcctgagaagtcctctattttacggctggattcagcacacatggaactttacaatttgaattttgttccggcaatgcccttcttccatcgtccctagaaaaaaaaaatcgtttttcgcttttacccaacgatttttgacctttggctttcgccttatggtttcgttcgtttcaaataactgcttggctgtgttcgcaatagcggttccttaggatggtaatatcctcattacatttaggtgcaatgagtcggaacctcaatttatctaattcctcctttaggtgccgtttttcaatgcccgtattgattcattataccccactcgatgtgtttcacaattgcttctatccctcttactatccccaactatagatgctttcttgaggcgatatcttttatatttcattcatctttttgtaaatctcattattatttcttttctgtctctctatttcctctgtattctctttcatatttctctttttaccttatatactatcatttataattctgttatttttattttaataattgtttt

SEQ ID NO: 4006 - DNA, 5470 bp, Emericella nidulans
gttatcctgacaaagttagccgtgatgctgcccgaaagtcacttcaaggctactcaattcgagccaagtcaatgctgcttgacagtagatgacaaaagtgccttcttactgtatagaatactacatatagtctccatgatgaatagagaactttgcaggagcctccaattgcttgccagttgagatttacgtacttggtcacgggagctgaaagggactatatattttatcaaccgctgatcacgatgcagcatcactttagctattttgccattttggaagttctataataaacaacgttatagtcttatgcagaatatacaccgcgagtaaaaactgctcgcagacaaggaacatccgaacttgtgctcagtctatgctaaaccacaaagccagaacaactaacctgctagcacaggcagaggtgatattcttcggagtggaataagtaggctgcgcactcaaatcataccacagttgtttcagagttgagatgaacgatgaggcccgactgactgtcctcacgcagcaaccaaacgatcctccattcgcatgtcagagatggaacccccaaacgatcgggatatgattcagcacaactggcattttgggcctgagtatccaagctaggtataatagtactgctgtcccctcacgcatggggaaaaatgcgaagaaagcaatggagaaaatgcatgacgtagacacatacaatggacagctgtacggctgttcgaatggcaagcacaaaaaggaaaaagaacgggaatatggatgtaacataaccagcaggaaattaattgcggtcttcccaagaactcctggttatgccgaatgtaaccacgtacatgaacttggggcgacggtgatttgccgggatacaaacccggatatagaggcctgggccaaaagagaacctagtacaccactgaaagcaaaaatcctccgagccagctagtttcagttggcaacggttgctcatccttatggagattgagagactagatgctctttctctatgtccttggaccgaccccggaactcacttctgcagacaccctccggccacaacgagaattgcagcagagatcgatacagcaccaattcgggagcgcctggagctaggtcaaggaataaggaaaccggcgaatcgagcggattgcaaacggcgacgtaatcatggcaacgatcggagcgactctgcgtccatatcatctgtgattaacgcgtatggagcatgcttgtgcccgacgagaagagaaaatgccttatatacgactcttgcgcaaccttcaacttgtgcttggcagtatgcaacctagtgccactggttttgacccatgtagccatcccccaagacgccgtcctcaagagtgcggatgaaatcccggtttcgtgttccaccaacacggctgcctcgccgtctttgatttgcagagttagggtcagcataaccatcggccggcggagggtagtaagccgggcttggttgcagccgaataggcgcattgggatccaaatggctggcaactctttggatagttggtggaaccccctgaggatccatggttgacgcacgttgacggccagccctcgttgtcgcttgtgcataaaggctctgggaggccccgtattgcgtttggggcatttggccgggcataagattcatttggtggccgtatgctggcggctgtgtggggtatggtggagccggttgttggtgtccgccatacatccccgtgtacatcggtggtggcgctgcgcatgtgccgaaggatggtactggttcatttgcattgtgtacgcgctctgagcggcggattgagcatgtgccgccctttgcttactcagcagttccgcttgctgctgctgctgaataccgggtgggagggtcttgttaagagacgaatacttcaagttcattggggggacaaacggcccggtgaacttttgctgtgtaatgaacgggtggagctttgcttgttgcggcgaccagcgctcgagcggattgatcgacagcagaccacggacgaagtcaatgaatgcaacgcggttgttgacttctgcagcggtgttagttgtcaaataaggaacagtacaggattcttacctctctcaatctctgcctgtttcatatttttccttggcattggataactccgaatgatttcctccagtgtcgatgcttggaaatatttcttgctgggttgctcctttgtgttatgttcccgggaatactgctccaggctcttcagccggtaactctttcgtccgaactcgtcctgagtcttctcaaagaattcaccagactgctttcccatttccaacatccaggtaggcggtaaacctagcatctccacaatgcgacacacctggttgtattctgaggatccagggaatagcggcaagcccagaaacagctcgactactatacaaccgagagaccacatgtcgattgcggaagagtatctagagaaattagccaaagatcgccaataacagtgagctatttctgttacatacggcaagccgagaagcacctctggtgagcggtaaaatctggactggatgtatgtgtaaactgtttgtctttcatcacaggcggacccaaagtcaataaccttaataatggggctctcaaggctgtaagagacaccgttagtttacccaaatgcaccaacggaattatggactgactttttcagcaaaatattctccggcttaagatcgcaatgaatcaagtgcgccttattcagaaggctcagtgcgttgagcaattgctgcgcaaaaacgcgcacaagagttgtactcaagcctcggaattgattctgcttgatcaactcgtaaaggttcacgctgagtagctcaaataccaaacaaagatgttgacggtgtataaaagtgtccttcaaccgaaggagatggtggtcgtcgtttttgtcgtatctgctgttgagctattgtgacgaaagtaagcacaatatacaaataatttttcatgaaggcttaccaaatccaaaactgatacctccatcatactctgattgaagtacgcagtcttgttcttgattactttaacagcaacgacctcctgcgtcttgagattctggcacttaacgacttgcccaaaggtcccttggccgaggacgtcaagaatgagatagcgattcctagacagttgttagacacttgactgggttatgggagttgttgcacaatggtactaacttatgccctgcctcttcgcttcccaggatgtcgttgacatacaaaatgtaatcgctgtcctcgttatcgtacccgtcgttcttgacgcccttactgggctttgtgagaacccgccgtgggttccttgacgactcgtagtgaaagttcggattgcatatccgataagtagctggaagatggttcgttaaagcttgaagtggctactcaacgtcagagggctaggccgttttggactgaatgcgtggacttacgctgatgaagccaccctcaggattggcacgccggtacgcgggctgggcattgatgcgaggcttgaggtcttgaatcgatttgatcttttggaatttcggcaacgggcctcgccccggctgctgaggggccccggatcccgtgcgtgaccatccgtcctgcgcgaacggtgagctgagctgaggtcctgacgatggaccaaaaaattgatccgggctcatgtctgtgggttgcaatggaggtaatctcggaggacgcgaaccagctgctacatctcgtagttagcatttgaaaataagacatgattcaccaattaaatacttacaaggaggcgactgaaacggctggggaggcgaggagtaattcggcgttcgtgttggcgactgcctagatggatgcgtcgcgggcgggaaagcgtacgtattgccagattttcctgggcttgagttgtagggcaaagttggcgacagcacattcatcggagagtatctgcgggcagcggtagacccttcgctgggaaagtactgcgaagacggtcggctctgatggttcgaccttgttgggtatttggcccggttatatggatctgcatcttccatgatggcatcctgttcagtgacataatcccgggtatggggtgtagcagctgggacgacgccatcgaagccgattttgtcgaaggcggtttggcaatgatgcccggggattgaaaaggctcgtaagtgtagccagcaggagcctgagatgattgtgactggccgccgtagttcgaaggcagctgttgagtgttcggattcgacgtcaacccgttattgttgaattgcgcaggacgacccaccaagggatctttatacggctgccactgagaattcatcgtctcctactcatccacgagcgccggcaatcgtggaattcgagccaaagctaagacgacgcctgggagtgctgacagcgcacattcactgcgaccgggataggtacgtagcagcggggcggcaggtcgacgaacgcagcgcgaatcaggcggaaacggcttgggacgcgggacacgagcgaatattggcacacaccgaaatgtcaaaggcagagcgaaggaattggcgttacttctagactgcaccgtacttcattatctgcaaagagtcgaaaggtgtcaatctggggtcagggcgagacggccaccgggcatgtgaggtgagggacacgatgatgggcggtcgcaatccacaatcctcggcctctgaaggggctgggagatcggatcaagtggagagtctcgactgctggaagtcccggagagaacgggagacccagccagacgctcacacagaatgatgacacagatcgaatactttcaagaataagacgtggaaaagaggggaaacaaagggagaggactgagaggcccgacgttcgtggaggcggaggccagtgatgcgtgattgtgcctgtggtgaagttgggaatatggaggcctcaggccacagccgactgtggttccttttgccagctcagctcagctcatgagttacgaccacaatcaaccagattccctgcgatatgtctccgagggaaataacgttttctgatctcgcgactttgaagcactatacagcgggatactgcgttgtcgcgccgagggggacgcggtgttattcagagaacagaggaagagagcagggaccacaatatcagcatctgacaccccacgaaataattattatacttgcagcgccccgacaaagactacgcagatgtaacgagagtaggttacgaataggattggtcaaatactaatgtgcttgtccgtgccttgccccctttcaacccagcctcttggacgatctcagtgcgcggtatactttcagctccccctcgagtctcgtacctcgtaaattgctacccgattcatgtccaaattggccgtcccattcattaccagcactagagctcagggatattaattcaatagcaggccggtacactgtgtctt

SEQ ID NO: 4007 - DNA, 1816 bp, Emericella nidulans
attatattgtatttaattatactctaacaagataataataattatattaaaaattttaaaggtcaagtctactttaaaaagatattactatttattacatcatacttatgattaactacaaagtatagatgaaaaccaaaatattaataaattgattataatcaaatgtagctatctaattctttttaaaattttttgtctaatatcattttcataaattaaatttcgactgttttaataaatttgtttttttttcctaagaggactaagaattaaaagttttttttagttcctaattctactaaagtattttcaattaaactaacaacaggaactattacaaagaaatatgcaaaataaataatagtagaaatttgtccaaattcaataaatggagtttcaacgtgttttgcacctatttgcattaatattaagaagttagctacaaaaatatagaatactactttacttaaaggtctaaattgtactcctcttaatttagataaatcagttataggcataaccattaatgctaatatagcagcaaacatagctataacacctaataatttattaggtatagatcttaaaatagcatagaaaggtaaaagatatcattctggaactatagcaggtggagtttgcataggattagccataacataattttcactatcacctaaagcattaggcataaagaaaacaaatattgataatacaataaagaatataaatatagttattaaatctttaaatataaaataaggagcaaaaggtaatctatcgtaattagcagaaatacctaaaggattacctgatcctactgtatcatgcatagctattaaatgcattaatgctaaagcagctaatacaaaaggtaataagaaatgtaatgcaaagaatctgtttaaagttgcattatttacagagcatttatgttgatagttacagatttaatataaatattaaatcctcttactatacgcaataaatttctttattgatcggactatatcatgatctcttttaataatttgaaggtatttttattttttctgaatatctagatattttacgtaactgttttaatcataataaatattgtaattttttattacctagtaattttacaggtgcattttgtaaaaatttaataatattttctactgatcttacacttgtaacttttaactttgaacagttagttttatctaaataaactttagtagtaaaagataaatatttacgtatggctgatattaaaatatccccatctctttgagcaatatcaaaactagctattaaataatcatcatctttatttaatttataaacgctaaaacaaccttcagcttctataaatcctactaatcaagcagaaaaataagatgtattaataatagactctatagaattaagaggttcatcacttctagtataatcaggtaaatctttaaagaaataatacctgtaagtaatgcatttctaaatcttaaatagtcataatgcttattagaaaacatgggatatttttcaatataggtaaaatgaaacttttaaatgtttttgtctcttattctaaggctaccattctattcatttctttcctaaacttacatacaattcctaaaattttttatttgaaataattgacatttaattgaaatcatacctatcataggtatattaccttttttgatgaaaaaaccatacttcaacatcctacagaggcaatgagactccgctgtgctttggaggtttgaagagacttaccccgcgtgttcccggattgatttccccttaaatcttttaaaaa

SEQ ID NO: 4008 - DNA, 4916 bp, Emericella nidulans
cggaagaatccggaatctctgatcaacagaccatcagcaggtatattcgctgggcactatatgatgcgtacctcgaaatcaaccgggcgtcaatgccgatacatgtactacacgcgcaaaagaagaacgagtcagtccgtgatgcgctagagcgtcttaataggcgcctgaaaaagctcgcgctccgacaccggatggccttggcggcgtctgacacattaaacaacaataagctgcccttgctcatcgggttcctcatctgcggcccagttgttgctcttatgacattcgacctaaacctgatcaaaggcacgccggaagatgatgaaatgaatggtaaattcttctcgcagtttgacttttccgagaagggccaggatgtgtggaactcgctgtctatcgctatagttgtcatgcacattcgtagctccatggttcgacttgcgcggagcggatacggtggttatgtgaagtctttagagagcagtcccgcaagtgaggatctatagatccaaatgatagaacggtcttgagccgtgatggtggcagggatggtcttgctccgtgtatatattccgatcttttttggcctcgtcgaacgttgggtatcaggaaaatgaagcatgcggtgaagggacgggatttcagggcgcgtgctattttatacattcagctgagtggaaggatagtggttgagagacggggtggttgctcgcttctggtgaaactttgatgtaaatctgctttaggcctactatgcaaatgcttactatccctaaacaggttgtgattgtatcagtacagtagctgctccaagggtgagccatggaatctatattatctgtcacatacattgtaaagtatggaaggtatttgttttatgtggtatggcagaatcactttcactatcgttgtcagctcctaaccctaaactagcactgatctgggagcggaccgaaggaacggccggatagtaaaataaagtgcgtgaaatgagagatacttgtaagccagaacttgtggagggttcagctctttcttcgcccctccatcgtggttgggttgataacttcatagctgttcatctagtcccttcttttgttggtgttgatataggagctcttgactgcacacaaggagaaggtagggctggttatcctaccatatcaaagaatgaattacatccatgaaacggcgcacaatatggtttgtgggtgccatcacttccgcgaccatacctctgttccccgaggcgttgtggctttgcctgcgggattctgactccttccttccccaaggacgggcagccattgctatcacacacaggaagttcaacttccgcaagagggggcagcagcaataaatgcattgtggtggatgctcctacctcgctatttgtcgtatgcatgccagaccaagctgaataccgattgagactctctattgctctagaaaaccatgctgcaatgcccccagtgccccgccaggttggcataactgctgtcctcaacccgttttggagtaccagacgagaatatacggtggatagccttcggtgacgtcttcttgtcttgactcgatagtcagcgaagtgcaggatcccggctgcacgatccaaatattaacttagtgcatcagataacgcaaatggcgatttccaagactgcagcactagtaagcattgatgtaaatgctaggtagtacagtaaggctgagctggtgagggagatcatagtgcgctttcgagcatctgatcgcacggatgaggtagatttcagtatagcgcaaggagattgccggattaccttgccaggaccttggaacagcgagatttttagacatctggacagctctggtgttggttgttagttcttatctcccgatatcagagttggaacgcagtttatgctagattcggatggctgtttgcctgctgaatcgtaccattgccgtcgaagcgagcgaaatattcagccaggttgaattgtgtcaaccgcagcaattatcaggtgacatctagtcatagagtcactggctgcgccggcagtcggatcgagatgttgatatttgtcttaagggcttgcgatgaagagctgtcaagagagaaggtggagggtctggctgggaaatagaatagcatcacgtgatctctttagagatcagcccgctccccgctacagcccagagtacttgtgtgcttgtggatttgtttatatctgccgatgtcgctacactcccatcatggatgcagctgatgaccgggaagttaagctccagcgagcatcgggggaccttgtcaaggagttcttggataagctgccttctttgctgtggaaaccacaaaatgctcagaaacacgcccaagtcccccggagatggaccttggcctcgaaaacagagcggctcgtcaaccttgtaaggactatatccgctagtagtaaatcagtctgttaacaaactaccacagttggagccgtttcaggaatggccgcagttgcttgacccgcacctgcaatcacttttgcctccgcttgtcgatgctctgttggcctacttactaacccaccggggccaatatgctagtgcaaaggccaagcagcagtcaaaggccctgtaccccctaccgagggctgtttgcaggcttctctataccttttgtaaggttcgaggtgttaaggtcatcagtaggttcctgaacaatgagccaaaatattttgatcctctgctacgggccttcattgattgggacgccgctcaaccggatgacgcttctgaagacataccgcgtcggcttgtctgggaagagcgctatgtgctgctcatttggctctcgcacttattgctggccccgttcgatctgtcttccatgtcgtccaatgatatgccggtgccaaatcaggacaatgaattggtcagaagtttgtcgccagaaacgccagcagtagccagatcacttctctccgtagctttgacatatgtcaatgtggcgggcaaggagcgtgaagctgcgacgatgcttctcgcgcgacttgctctgcgtcgggatatgcaagccttgggcctcttgaaaagcctcacctactgggcattcactgttattcatccacctgcgggtacagagccgtctgctgtttacgcatacctcggagtgctatctttccttgcgcgtttgactggatccggccaagctgaggaccttgcgccactcgttgttcctttgtttcagcagattatgcgtcttgtacaaggtgatacccaagtctcaaaaattattttgtcgtctgctctagctcgaaaaactatgatcaagatcgttcggtcgatcactgtcatggcgctttcgcttagcgagagaagcagcagtccactatccgatgaccaagtgtcctatactttggaggaaaccataaatcattgcttaaatgctctggcagacaaggatacgcctatacggttcgccgcaagcaagtcactgagtatagtgaccttgaaattggacccggacatggcaacagaggtcattgaagcggttactggatcacttgaggagaatattttatacgagacaagacagggtaagattatcacgccgtctgaggcaaggcgagtcggaacaagcacactgaagcggaatctaagcgcggtcgacgctcagagatggcagggtttgattctcactctaggccatttgctatttcggcacgcgcccccagctcagcagctgcctaatgtactgcagccgcttgtgtcggggctggactttgagcaaagatcttcaactggtacctccgtcggaactggagttcgagatgccgcgtgctttggtatatgggcgatatcacggaaatatacaactcaagaactccttgcaataaatcggcaggcaatccattcgtctgtcgctcaggatgaggtgagcattcttcagatgcttgctattgagcttgtctgtgctgcgtgtgtggacccatctagcaatatccgaaggggtgcttctgctgcgctgcaggagctcatcggtcgtcacccaaataccatcgtggagggcatatcacttgtacaggcagtggattatcattcggtagcacgacgttcaagggctatggtcgatgttgcaaaggcaactgttgctcttagttccctgtactggagtccccttgtcgagtctttaatgcaatggaggggcattgggtcagccgacgctgagtctagaaggcacgcagcaagggcacttggacttctgagtactcaaaaagccaacaagtccgtgctcatcgtccttcaaaaactatgggtcaaactccatagtattcctcgcagtgatactgagacgcgtcacggatgtttgcttgctatagcatccgttatagatgccttcaggactatggacacagaagggcttaaagaagctaaagatgatgcccttgaagtggcgaagcaaatatctaagctctgggaaattttcaatctgcctgttgggcccaaaaaagacgacttgattcttcaagcttcccgcccagagctcactgccgaggcatcgtcgtgtctgatttcgtcgctttctcaatcatcagctcgcattgaagagcttacaggttccgtacctccgtctgacctactcggagaagcgtgcagaacgcttatgctctgcctctcgcggagtgatgaaatctcaatagaggcatcgtcagaagcaatctcgcagctatggctccttctaccgtccacaaaaaaggctgaaatcttgcagacatggttctcacatattcgtgtaactcgaaacttgccgacaggtcgtggtcaaatctcttctctaggttcaatctttaccaaacttactgctacagaccatacccgatggtctgtcattgaagagctgatttgttgtgctgagaaggaatacttattaagaaacg

SEQ ID NO: 4009 - DNA, 2136 bp, Emericella nidulans
gttgatggcattatgggcatagttgagcggcctattggaactgttgttcaaaagatcctgtaatggttatcctgtactctagcaatctccattcagacaaatatataaagtgtgttatactttttacacgtatcactggattctaaacatgaaacaagatatgacgaaaagtcgttcatgtggatattgtccatttatagaaatgcatatatgttatattatcagcgagctattatcccgctccaacgacacacattcacttatatagctaaagccaatttacagagctccagcatcctttaacagcgcgggcagatccttcttgataccctggaggtccgagtttccaccaatgtgctttttggcaatgtagatgttgggaacggtgcgctggccgctgatttcctcaagggcgttctggaggtcagctccgtcatctatgaaaaaaagtcgttagcagcggttcacagttacccatctaagttacaacaataacggagccaggtaaacgcaacgtaccgatggtatccagctcaagcgcgtagtatttggcgcccagttcgctcaggaggctcttgctggccttgcagtaggggcagtaggacttggagaagacgactttaccaaatcgaccctgttagcctcgctctagtcttatcgcgggatcggaggaaaaacataccaacgccgttctcatcaatgatttgctgggccttgacctttgcggaagacattgtagctggagaggcgggggcaaaagacccgaaaagtcgacggaagatgaaagaaatggtgggcaactagctgggatatcccaggaaaatatgaaaacaagaaagatggaagaggggaaagaggaatttgtttagttggaggaatcaggaatgacgaaagaggggtttggtcatcatagatgggggagcacgcaatggattattccagagcgacggaagacctcggcggaggcggcggtaattacaaaggtcacatgattgccctactactttcagggactacgatactgaagtggaatgcaagccatagcctatatgttcattgactagaaaattgagttagaagaagtagttagatgcacgggtgaagtcataagagacccacgaattgcgacatttcgaatcttttccgcggaatgccgcacaaacatttggcgatagagcagtgacaaggtatcaagcgcaggaacaagatatgatatggctgcagcgccatgatagaccaaataggagatatgaagtaaaagagggtaaggtatggcaagaaaggaaatgatctaggatgcagaaaatggctgtcgaacagaaaaaaacaccgtcccttaacgctgaacgaacacgtgataaatccagaaagaagacagaaaaatacttgcaatagcagaggtataaatgcttttatagagatctgggagatcacatcacgatgcagcatccacatcccttctcggccttctcgtcttctggaggcggcccttgagctgtcaccacggtttggctgttgaacctcggcgtcaacccggttggaggtgtctcctgcactttcggcatcggactgtaccctgtgcttgtaccaggccgactcggctcggggctttttgggggcggttgcagacccaaaccctccggtttcaaatgttcttgttgctgactttccttctctgcctctttctccgtcttgacttccggttgaggctgatcaggtgcaattgcaagcggtgcgaattctcggtcatacattgtaggtgtcttgccttccttctcccattgttcttgttgcatcttccgtgcatgggtaggcaatatttgctgatctggggggagtcgcgggtctggcttatacatcgttgccagccatggcggatctccttccgggcgattgatggacataggtggacgtgcttcgcctgacctggtcgtggggcgctggttggcattactcgacgttgcgcgacttcggggcgatggcttcttggggttcggagcagatgtctttctgtttgtagtggctggtttcgcagcggtcttcttggtggtagcattctgggacgctggccagccccgactcccggggcggctctcgctagtagggtcagagttcgaggcagaatataatgtacgg

SEQ ID NO: 4010 - DNA, 5985 bp, Emericella nidulans
accgccaccgttgtgctggatgaccttgtcgtcggcgccctgagcaccaccaccaacgacgttgaaggggccgtcaccagtcttgagggagagggcgtctattcaaaccaagaaggcgatgtcagtcacaaaccacaaaatcagttacggggataggtgagggttaaggcgtaccctcgcaaacggcctcccaccagacgttctcgatagtgcaggagccctcgcagtggacaccctcgatctggtccgagccgatgatgacgttcttgagggtaccgccgttcttgacgatgaagacggcgtcagagtcgccgccttcgtcttgaccagtgcaggagacgccacggccgtaggttttcatgccgccgtcaaaggtctcgccgtcgatctcatagacctcgtcgagggtgacgctgccctcagagttggggatagggaaggtgaagcgcttcgagagcttgctggtggcggcctgggagtgggagcgggcgccgtgcgtggccagcacgctggtcgccagggagagaagcaggccgttcttgatgaacatggtgacaggtgtagatcgagtgatagggtataaagtacagagagagagaaagaatgtgtggtgccgatgataccagatcaacgttgagaattggagtggacgggctgtgagagacagtcggcaaggtaggctgcttatataccttttatcctctgcctctgcagactttcggcacgtcccaacagcagccaccccttgatcgagactgctagatgggcccttggccggaaagcttgggagcactctggctgttggcgctgcaagcccgagtcaggaaatggcttggcagtatcagctttattgccagatggatatttgcctccagtgggaatcccaccagtctacgcccatgtttgagaaccttctgttggtcagcagacggaaacgccggaaacctactatactccaaaatggtcgcccgcctgataaggcctggaccatggtatctggacgatccaaagacacggctatctctcttggagtatactaagagtactctagaatgcctagaagaggattctggatgggccaatagcctggttctttacagttgtggggtgacctagcacctgctccgtgccctagattactctaaaccctaatagaaatgatcgacacgtaatctctatctgagacgcggcactgcatcaagagaacacccttaatctggaggaatttcttcctctgtaggtaccaaatacgagtggccccaaattttccacaactaaaacggaaaccaaacacgaattcccggtggggacggacgggtggttgtgtggtctcacatagagcgacagagcagtgtctgttcgaggcgtctgtatcgaacactcgttcgtgaaaacaaactacataccagatagtctcctcgtggcctcgtcatcttctctcttggcagcctcacagggctccgggtagcgcaggggaaccgggtcttattggataacctgcgctcaaatgtacccagtagcctgtcagaatgtacttcatgggagcgttgtcatgccaaacatttcccagcaatgaaactgataggctgtcaagcatctacaaccttgcagctcatcactttatctgtcaggaacggtgcagccgcacccatgggggacccaaaaggcaggacgacagcatagaaaagaacggctcgtgcaagaagatttatttcaaactttgctctgacacctactaattaaaaggcatctacttgactaacctcattattcgtatatattccaaaccttgtcccgcattcttcgaggaagcatcctggctgcgatgccgatcactccccaagcaagaagagtgatcgactcctgggccgggaatattcattccgagtatcctgtcggacgtctagctttttccgaccaggaagccttgtatagtccgtactggtgaacattattgatggataattgtcgttgagtgaaatgcgatcttcaagcgctgatatggccgcgtgattaggacgtaaatgtcttaactgggaatcaggatacgggccgacaatccgtcattgcgagaggacgggcagaaaactttagttgagagcgaccagcaggaaaggcgttcgctatgcttaggtataagagagtattgtcagccagagaagcaagcggaatgtcaatatactttgtagtctgacacggccaagagatgtagacgccaccaagaccggataagcttgttccagccctgagtcgtcctgctcgtagtaggatctagctttataattaggagcattcgcgccgaagctggaggcatcgttctcttgacaaatcattgaagcatgcaatgccaccgacccccttatgaaatgttcacgtacataaccgaaacaaccacaagtttaatataatccagtcacactgtttctgactcgtcaggccataccttcagatgtccagccaagagtaaggtgcaggttatcctctcctcagaaacagctccgaccgccccctgcatcaccctccgcatccacagtctagtgctgcagatttagctcgaggagtgcaagcaacaaaccttactggccctagatgaagctgtcccatacagtcagcactcgtacctgtcatccatcagtcatcagaagggtttggcgcacctcttcatttcatttgtcactcaaatacctggagcatcagttgtggagtacactgcaaatgaaaggggttgaagcgatgacgagggatgacgctcaggcagccaagctgaagccttagtttttatttcaaaggtctcgtcacaaggcgttgctatttgaggggctgtggcgaacgggacgacagtgaaaaggacagggggagacatgacttcacgatttaattttgagatatcaggaaactaccaaggcgaataggtggcggagagaacatgtcacatctttgtttctggccgtcctaccttaatattagctcacactggtccagcgatagtcttgcaatatcatgatcaagattggtattctagctaccgccactgctctcttgagacacccgtagtggcggattcatttgtgacaatcattacacacctagtccttgaaaaagaaagccgtagctgggaaggctaaactcccgagtacagatgtatgttcctgttgctagagagtgaaaggaacttggtaggttggggagccgccttcttatcatgtagacaaccagatatatggaccatatttcctccaaaatagtacgcggacgagatggcaagaacatggccaggaattgatgccctgtggcggaagcattcatggaatgttgattagttgacagttcaactgccaatttttcaaccttttcctattcttaatcatgaccataagaatcatgaagctagacgccctctccatcaaccgagtatattcctaagggaacagttggttataagtctcagtctctataggaatactagggtttattaagtcaggcgagtgcctgatacgctcgaaactgtttcagcgagttcgcaacttggtcagctagctgcgctccagaatacgtctgcagcaatattattcatgttttcagataggtgccataatggggggttctgtgccgcttctaagccctagttatatgtgtaagcatttcaaacttcatagtttccaaggtactccccggaaggatccttcgtcataagaatagctaggttaatctaccaaaatactgatatttgctgaccatattactggatcaatattgttattcttcaccttgagcattgatcctttggtaacatctgtactacctgctaacggttttatatgatgatttctgaagagcatgccatagtatccgcagtgttccatcaacttcaccctcccccaacacccctagcttccatattgtgcagccaggaacgcattttgtagtctacttgttgatcattgacatgcgtatgcatagtatgcactagcatctgtagttcttattgagcctgatgtgcttcgccatactttccaccttgagcaatgacctctgcgccttgatccagcagtatctgtaccacttgcgcatggccttgataagaagcagcctgaagtgcatagccatagtatccaccttgagcattgacctctgcaccttgattcagcagtatctgttctactttctcatggccttgacaagatgaaacttggagtgcattgccataccctccgccttgtgcatttatgacgtcctttctttgtgggtcatcacccagagactctataatggcgcctagcacagtaactaatcccagaagcgcggcgtagtatacatgctttggtatactttggacgtcgcgctcataggctattttcggttttccacggggtatccatgtcgtgcagttgtacccatgtcaaaaatggctgctctttatccgcgaagagtctaatgattaatcatcaacagagcccctatctccagctttttggtaatagtcataccagtaccttgcagcataatgggccaaacgatactcaataagtcttccctcattcagtggaccatttgagagtcctggctccaacagatacccaagacagatctgtgccatttcactattcgcgcgatgcttctgtattgcgaatttctttgctttctggtgcagcacacggttggattcaaggtactcttgtacggaaaagtgtgcgattcgagcgaccagtgtttcttctttttcattgccctgaatcagaatcgctacgacctctattagcccacagcaaacatcaatatcaacatgctagacgccgtatgctgctcagttccaacgtcatggccggttttcataagagtcgtatgatcgaccttcgcgatcgaggcgtggtggtcttcaaggtcgacggcatgcgcatcgatcaattcttctagagtcaatgggcgcttggccagacaaagaatcgtcagtatccggcggacatcctcagcatgatcgctgtggatgttatacaggatcctctcatacgtttcatcgaggtcactaggtagcgaaaattgacatttatcaagctgattgccgttcttcgcccgcttcaacgccgtcaattgacattcaacataacgaaacctgtgtatatattagtggtaacgttttatatccaatttttatcattgcacgtacactccttgcgctttgttgtttagcgtttcttgaatttctccatggccgtgccttccatttctgaaatgatgggtcatggctgagtcagtaggaagacatggtttgatatgtcgttatcagtcgcagcgtttctcaccatgacctctgcagtaggaggagtttgccaagattgacggaatcaaactcatcacggctgatagtcaaaacaacatctagaaagaagggtattctgttatcagacagatatttcgtgtaaatattattttatctacctttcgaaggatgagatggaggctgacaaatgcggtattcatgtaatctataagatgaagggcgatatgccacagattgccgaagccctgctctccgttcctggttggtcctttacgtcttctctcccactgaatatgcatgaacttgactaagtcatgggcgtaggtgacggagctaagatagcttggcctatctataaacgagtagatacaggtgcctaatcttgtggtcccctggggctcatgccaccatattttgatggcagagcgtatacataattattgtttgcatatagccaagatcttctcaatcttcccgcgacactgagataatgtctggtatgactggagaaaagcataatttatggctggtcccatatataataccgaatgtgctaccttagatcatgagtaatcaaatggtacggcacagttgcacgaatcctaacttcgaccattcctgcatgatctgctgaagatcaaaaatacgagaagtagatgaacagagtatgggatgaattcgccttcattattttggccaggtaaaag

SEQ ID NO: 4011 - DNA, 6110 bp, Emericella nidulans
gtgggggggggggtaattgaaagtagagtgatgagagaggagggggggggagagatagaaaagtgatgttggaggaaagtggaggagaagaggaaaattatgtagaggtatgaatacagagagatataagtagaggagtgagaagggcgatttaaggaggagatagtgtaaaaagggaggtatggagagggtaagagaagtgttgatataagagatgagagggaagaaaagtgtgagataaatgggggggggagagtgaggggggaaaagtcattataaagtgcttatatgagcagtggaaggttaagagttaggaggggaagatgataattgtgtaatgagataaggcgcgaaaatagatagaatggtgggtacgggaggggggcaacatttacatgatgggacccccaagtaggggaagccttgagttaaggcttggcaacatctcacgcgcttcagatcgcgtcatgacgggcacaatgataagtcagttccatatatgaataagagaccatataacatccgatcattaggttgactcatagcagtcattcttttcgttcaagaggtgaggtcaaatatcgtcaagaagttgcaaatatgcacggtctgtcgatggacagcaagatcaataaagggtagagtaaatagtctgatgggacaatgaagagattcgagagcaagattgtcaggcaatggggcgcctccgggtagatgtccggctgtagtggttatgtcaagaattgacgaagtaaccagggtaatggcaatggagaggtcgagttgcgatggtatttagggtttagtaacatgctctttctggaaccacatgaggaacccagcacaccccgggctattagtttacgtcccactaggctccaattatatagtaggaagacataccaaatcaacaactggaagaacaacgcaatccagaaccacgcgtttgcaacggcgcccgctccatccgtaatatcaggagagatgggccctggcccgatattattcggcgcaaaagccctggcgcagatcgtcgcaatagagcctaggacttgactcgccaaaagcgtgaagcagatatgcatccgtgtgagtgtttgtaatagaatcataccaaagcctaagccttgcagggagtcgagaatacccagccatagccagagagagcgagatactagtgcgccggtcgtgtagcttcctgcccaagggaggaataagcccattcccgagaccccccaccagatctgtgcccatcgcggggcaccaagaccgcaggcaaaaacggggaggatccaactgtgggatttggaaagccgggcgaagatacagaggatgagaacccaggcgactccgaagaaggcgacgaccagaaggccgatgtgccagggttcccgcgtggacggagctccagaggactgtttccttagtttagtttcggaacaataaagtgatttttttgggacttacagcttcagtttcgtccgtagggggcgctgaggaagaaattttgcagatggaccactacgaatttccagaggatgatctttcgacggcagacagattggtagaacgaagggacttttccaggcgtctggcggtaatagtttggtaggccaaagaagacaaggatgccgagtacccagagaaagactgctatcggcatacagatagtactgcaatatagagttagtaaaggaccgttggagagtatggaggcacgtacgtcattctccatgtctccgtgatatgggcttgaacatccggaacgcctctggtgactgcttgcgatatagaagtcccccagtaccaaagaccgatgatgtaggcttgctgggtaccttgtatgatgcaagcacgccacacccaattcttgactggtgcaccgttttcgtctccgaagttaagggcgaaaaacaatgagccactggctgatgcagcggcgtatacaccggctccaacgttctggatccaagcacgagcgaagctatcgcccccatagtgtgcgactccaataagaacaaaggcgaaaccgtagaacagccagggcagagacagtaccacgacagatttgcaaaagcggaaaagaaaccaccagactatagagctcacgaggtatactgttgcaataccatagagcttctcaggccgctggccgacttctccagtcaacaaggtgatctggtaagagttcgctgctataatttggcccagtccgagaatgaaggagtaaatgggccagtcgaaaatccgaacttgcatccacttcttgagcccagagggaggaacatagtcgtttccaagacaaaattcgtcaggcctcatacggggctcgcttccactcgcgcgcgatccgacttcatcgtttgatacgagtgccataggcgaggagccttcaaacttggtgcggaaaatggaagacgacggggactgtttgcggccaagtcgtgcatcacggaatcggtcaaaccatttcttttcgctcttctccagatattcctcgatgcaaagttgggagatggagttcgagccattgagcttttctagttttctttcaaaaaccttgtagaattcgccagtgctatcggtaaatgtaggatcaactttttgcagtttgtaatctttcttctcgcccactactgagtcaacagagagtaccgacgcactgctgagacggtttccaggttctgcaaacggtggtgcgggtggaacgaaggtctcgtccccgtcaaacgtagtcgaactggctggagacaaaacactacgagacaaaatcgagctctgactcgagtgacgacgggtaaagaagtccctaaccgagccatgattctgttcctgctgtggtgtcatatctgcgcgacgtacttcctcagcctgttcaggggtaagcgtgtactcctcttccccgtagaaacttgggattatatcgtcgtcgctactctcctccgtcatggagacgctggcgttctcgtccgtccccgcgtggctatttcttctcaacctgcggcggccacgacgcataagatgtccaggcccagccctaacaccaagtgataactgtcgaataccagatctaggctggtcttcgccgcctgggcttgggtctcggctgtagattatcgtgttacgttgctgaggcccataagcactgaggcggttgatgtttgagtagcttcctgatcgcgaatgggcaagaggaggtgtctggattcccgtcggggtaacagtcccagtcgacgcaatagggggcgtcatcatgccaagtggggtgttgcttcctgagttatagggctggacgctcgccttagccaagccttagctgtgtatacgcatgtccgttgcctgtagaatctcgaggtcctcaacccattgagcaacagggaaacgctgctttgcagatcttgcacgcatccttgccctaacttggggtttcgagttcaaggcacatccgatagctagtttaaattgatgaagcagatgggcagtagttgttgattcaacattataccaccaacccggcatctggccaagccctccaacacgtgcaccgattcccaaggctcccttgcgaccaaattcaacggcaaccagtccgaacggttcgtcacgggatgggatcaaggcaaactccgctcctgaaaatatgtatggaggaagtgctgtaaactcgggctttgagaacacacgcccagggtagagctgcatcatccggtcaagcttcagggcggcaaattttccataaaggtcaatgactgggccgacacagatcagctgaacattgggatgagcctccaaaacagcgggcataacatcagctatcagatcgattcctttctgcatcgaccaccgtcccacgaaaaccataaggtcagcattagggttttgttcaaggcccgcccattcctgcgcttgccgtttcagctctgccctgcttgcctcgtagttctggtctacctggatctcactttctttaggcagttccttgttccattcagccgtgtcagaaggatctgggttcggaagattcccaaccttcttgagaccccagaagatgggatagcgcgcgtacgagcgttttccatatttcctggaaacacctacagcgccgaacccttgttggtggacacgaaggtagctagcaccggcatggagcatgttaaaaacttcgccaaattggacatatcgcctggcgacatcgacgtcgatattgaaaacagagcaaacctcatccctttccttttgtgtgcgcatgggccagagaccctgaaattcggcgttgtgaagcgaaagacaaacagggatcgtctggggaagaaggtagagaggcgcaatagaaccatgataatcattgatatgataaaggtcgatagggaagcgcttgatggtctcagcaatgcactgattccaggcggaatagtatatcgcactatcaaggtcgtccatgcgagcagggtagggctcagcctttgactgttgacggaaaacgggcgcatcgagaagaacatatgtaatattgttcaggacatgatactgaaccttgacttcgtagatgttcccgagaacagtcacaaacattggctcagctggctgatcctctgggtagtctacgtcccccgcacatgggacaacccaaatgagatcttgatgcccgaggttcttgcccatgagctgtgccatgactccaagaccaccaattttaatcctgataccccagtcctcaatgtcatactccatagtggcgatgagaacactgcgcctgcgagaagaccctgttccaaagacaggcgtgctttggagaaatccggatttattggcaagccgcgtcagtggattcaatgaaggcttccggccgactgagaaaccgaataatgaccgcttctggctgattccaatctggttgaatttgacctggtaaaacgatttcatgaaagcatatacgcatccgatagctgtcacaagcggtacgaaccaaagcaagaaataaactaccatctggattgtcctcgagccagtcggttgaaactggatgctcatggtaccgtcatcgacccaaatattccaagatagataggacgacggtggcctgtcggtgacgttaatagaaagggtgttcagggaggatggtggcatgcggtccaaaacaccgtcagaatcaagatcaccaaacacaaaactctggtcgggcttcccgtctgggttcataccccaaacattaaactgtccctgagcagggaattccgctcggagccgatatttccagtacccgtcactgtcctgtttcacctcattgtccagtcctgcatcgtatccatactggttgtaaggcccattgaagaagaggtgcggaaagcgtctttgatgcttggtatcatagtcaccttcttggacatagctgctgctaccagtcaacttgctccagtactcaacgcggacatgcttcccattccatttctgctttttagttccggaccatggttgttcttcaatgaattcgtcgccacctttgtattcgcgccagtttgaaaaagagcttccccaattggtggaataacgatatttatcagcaccagcggctttgtgtcgaatatagagtgttccgttctcgtgctggtgaagtaggtcagtggagtaattggccgtggtgaagaccatgggattgtctatttgaccaatgcgaatgagaaagtgatcaacagcctgtgttgagcctccaacctcgctggtggcattggtgacggtcagccgatgaattccattgtatactccggtcaactttgacgaccacgcccagacgctgggtagctgggcagtccaccgcgtttcgtttggatcaatcctcctgcatttcacgctgtctttgtcaatcaaagctgtcttattgacttctgtggtggactgcactttgatcgcttttgtgactgagtcgcagtccatctccgcagagaagtaaatgctcaaatcaagatcctctgcctcgctcgccacgactttggaaatgatcggttggtcgtgtcctggtgtgattttggtaatcatgggtctaggcttcacaaatcgctctttcggaacgaaagccttgaattcgaaaggcttcagcgtcatgctatcaaggc

SEQ ID NO: 4012 - DNA, 2930 bp, Emericella nidulans
tggcaaaagattaaatcatgttatgtgacagaacaacccattcgtaattaggggccaacccaaaaaaacgagaacaaatggaaatctccacataaataaggggtcctgctgtcaaggtgaggatcatcaggcgggcgtagcattgtagcccatctaaatttaccggactggtcgattgtcttttgtctctgaaatgactgttgcttaaaaaatggtactgtaaactctccgagcaacagagttcgggaccagaaaaggcatttattcttaaagtttaaagactatcacttttccatcataaaagacatcgccgctcggaccagggttcagagaatgagcttgtctaccatctgactagtggcaacggccccagtatgacagcagcgcaggatgactgccagtccccaggctgcattaccccaagactggcagcaggggcaccagcccgtgatggtctgaaaaccagcatccggctgccatataacacgcaacagccattgagaagtgcagctgcccacccgataacatagcctttcctgctgggcggccgcgactgctttgcggtgcaagggcagaaaagccataagatttggaatactgggaattgcacgacgaggacgctgtggtatggtaacttcagggtcatctgctattcgcctatcggaagaatatgcctaaatcagggttttggatggtgctgaaatgatgcataggatagaatttacggtgttttactgaaacagtaggtcgtctttgcagatccggaggacaggcatgcgaccataagtcgcttggttcaatagagagggccgcagttcgagaggataatgacgcatatgccggaagtgcatagatcctggggattattaagcgcagcagagcccgatgtaacaaacttcttggcctaaatggtcgattgttggctgatcgaagatctactagacgctcgcgaggaatgatatctatagtactgccaatctgaaacgtagagaggcaggtgcaaagatcaaaaagacctcgtgcatgtcccgtttctttcataggaccggccagctcagcacaacgtatgctccttcactcatccccccagttcagcagcatccgatccgagctgccctggtaccgcatcaacatgggcaagacctctgtgggattgctcgtctcggccaggatcctcccattctcagcactgatgaatccctggctgaccgcatggtgcaaccaagccaccacgccgtcccaatacccattcacattcaacaagaccacacccacatgatggatccccaactgattccacgtcgtcatctccatcagctcttcgatagtaccaaacccacccgcgagtgaaacaaatcccgacccgggtcccccctccatgacctttgtcgccatgagcctcttacgcgtatgcatatcgggcacgatcgtcgtgaccccgtactcgctctcgggaatacaatccttctcgtcaatgtgagttcccgcagcgaggacacgctcagcagctttggcgcccccgttcacttccgccccctcacgcttccctgacacctgcacgagcgcacggggaatcaccccgtgaacagattttggccctgagagggccacaagtgtctttgcgacctcgcccatgagtcctgtcgttccaccaccgtagacaagctggacattgttcttgtgaaattcatacgccagcgctcgcgcggccttcgaggtgggcagcatctttgccagatgttgccccgcagctggggagcgtgtaagtgatgagcccaaatatcgctaagggaagaaatgggaaggggcttgaacttacaagacacagacaacagcttgttttgacgaggccatgggtggcttgttggcaagattagtaggtgcagaagatcgagaaatgcgtgaccaggaacagggactggcaacagggaccggcacagccacaggcacctatctgaaattaaaaagtcagaccagtcagtgtaagcaaacttgcggcgccgttttggtaccagggtaaagtggagactgctgaccaaaaccttttttttttaaaccacgacttgttacaaaacgagacagaataataaaccgaaaaacaggactcaatcaagggaaaaatgaagggacgaataacgggacataacaaactgaataataaaccgacaacgtgactgagagaacatacaaaataacaggataattaacaggacataacagatcaaataccaagactgtaacggagaattatataacacgcagccctatcaaacggtatctaaagagagtccacgacggagccatactttgtctactggagttcgttgaatcgtacccatccccttagacttctttcttctttgcactgataagtttcaactcataaactgacgttatttggtgacattactatcagacaactagcgacagagcacagtttcctcaggagcaagcccggcccactgccagcacgcctcccagaggcgcctttgcaccgcagcgtctccggtcaccgatgccgcagcttcttctttctggccaacataatatccgcgctttccctggaaagctggatcaaggctcagagccaaaaggtctcgaccggcgtctttgttagtgcggaaagttgtagtgatatgcttcaggataggcatgaggagctttattgctgcgaagagacgctggacagatgctttttgtcccgattgggctcgtgactcgacgaggccaccaggatccatggccgttgctgtgattgtcgatagctttgggatctagaggtagagagtttacgtgtaaatcagctgcctgagatgttaagggaagggaacggggagtctgctcacctgtcgcagtctctggttgagatcttccatgaagataaaaattgccagcttagccgttccgtatcgctggaaaccccggtcatg

SEQ ID NO: 4013 - DNA, 6011 bp, Emericella nidulans
  unsure (1)..(6011): unsure at all n locations
accagagatgttggctgtgttgagtcatggagatctccgcagtaggacgcccagatggctgccaaccagatatacggtccgcgagaagccttcgggatgttgcgcagggccttgcggtcaaatccaccacctgctgctggcataattgctggttcttggtcaggaatcgttcaacgaaggaatcagaaaagcctgttggtgaaaatggatggcaccgtcaatgagggtaagctgaagggcatctttatagcaatggacggctatagtggcctatggcccaccaagtttagaccgagccagatggtgtcgggttaagcatccatctgccagtcgtctgataccatggagaacagaaaatgcagagaatggggacccggagggctccgggcagccctgggttaatccccctgtagctcaggctaatcataacgcacccaaataattacggaaattcggcactggaggatgatctacgtaatcgtggagtaaggatgaagggtaaagattattggcagagtttgtctattgagccagagccgtggctttgatgtagttcagggcactcccagcgcgaagccatggaatctgcccgctgtggtagctatgctttagttccgcttcccagacctctcctcgcctgggctcgactcgcatcgtcacggacgagcccgggcatagctcaccttcttcaacaccaatcaaagtgatccgatcagcttcagcaatgcgctcataggtggcggggtcggcgaacgtcaggggaagcatgccttgctttttcagattggtttcgtgaatccgagcgaatgagcgagcaatgactgccaccccgcccaaataacgtggttcgagggctgcgtgctcgcgcgagctgccctcaccgtagttgtgatcacctacgatacaccaccggacaccccgctgcttaagatcgcgtgccacctgcggagcgccttccacttttgaggttataggatggcgagtgtggccaagcagacgagggtcaccttggcctacgaacgcattggtggcggtcgtaagcatgttgttacagatgttctcaagatggccccgatatttgtaccacggtccagcaggggaaatgtggtcggtggtgcattctccctttaccttgatcagcaattccataccatgagcgcaccccggctgacagggaggaaatggctggagaagttgcagtcggtcagaatctgggcgaatttgcacagggaggtctgtatcatctagcgaagggttctggatggaatcttgaaccgatttcgaaagaaatggggagctcttggataacatggtgggctaaagtacaactccttactcggtcccccgggcacggtaactggatcggtcagggggttgaaatcgaggcgacccgcataggcgaacgcagccactagttctgggctggtgacaaaggagtgtgtggccggattactgtcatgtcttccgacaaaattgcgattgaagctggagatcaccgagttcttttcctttcccttcacgtcgacatctttgcggtcccacgatccaacgcatggaccgcatgagctgctgagaacaacggctccggcatctcgaagttcgtcgagtatgccatctgcctctgctgttgcacggatctgttcactacccggtgtgacaaggaacggtgtcgggagctttgtgatcccggccgctcgtgcttgtgcaacgatctgacgagttttatcgagatcttcgtatgagctgttggtacaactgccgaccatagcatggctcaagtccacaggccaatcttccgcagcgacggcagtcttcaattttgagatagggtgtgccaggtcaggggtgaacggtccgttgacgtgcggttccagtgtgctgagatctagctcaataacttgatcatagtacttgtcagcgccctcatcagcgttgagaagcgcagacctcgctctctgggccatctcaataacgtgggctcgttgcgtggtctccagatatcggcccattgcgtcggtatatgggaagatgcaagaggtcgatcctatttctgccgacatattgcagatagtcgccatggctgtcgctcccaaggtctgggttcccggtccgaagaactcgatgactcggcctttgccccccgacaccgtcaacagacctgcaagtctgcagatgatgtctttggtagaactccagccttgtagctggcctgtcaagcggacccccaccactttaggagcgacaagctcccaaggcattccggacatagcatcaacagcatctgcgccaccgaccccaattccgagcatgcccaggccgccagcattcggcgtgtgtgagtctgtaccgatgatgaggccaccgggtctgatcatggaaatagtgagtgattaggttaattggtactcacgaggagggataggcttacgttgcgtagttctcgaaaatgacagtgtgtataatacccgatcctggcttccagaacccgatgccatacttcctagatgcactgctgaggaagtcgtatacttcagcatgctctccaagtgcgcgatgcatatcctcttcagcccccttcttagagatgatcaagtgatcgctatgtaccgtcgttgggactgcgactcgcggaaggcctgcactgatgaactggagcaaggccatggatgccgtggcatcatgacaagctacacggtccggacgaagctctaggatagtcttccctcgttcaatgcgctccacatcccaggtgtttttctcagaggtaataaggtgagagtataacagtttctcggtcaaagttagcggtcgcgaagagcctcgtttcgcgatttccaaattgcgaatctgccgcgcatagttgacgccaaactgtagagcattacgaccggtcagtgaatagagcagacttctatagtgcattacgtactatagaatgcgtctgaggtgttgtaaatcgccttctagatggaatactggcgacatagcgtgccagtacttctcgtcgtcgggttgaatgtattcgctgcatccttgtgattcgccgatggggctatcgtcgcaagcatgtatcgaggtgaagcaattaataaacaaagacaatcgcaagtgagctgaggatatcgcaagtgccgataccagcgtcaactccgactgcggtactttcgtcgagcggagcgacccgacgccgaaagagatgcattcggagtaatccaggaggaccaccaactcattgctttggccgatacaagtcctttaaaacctcttgtcgagctaaacgatacttgatcaaatatattatcatgggcttaagcactgaaactatctgtgcactcaggaaatccgcttcgtgcgatgtaagttcatctggctcttaggaacacgaactcgtggacgcatggctaaaccagcggacagataggcgatgcccttgtccaactcggggttcccaatggtggttacctctctggcgtgaaattatactccccgggagtgatgtgcatgaaaacccggatttttggaccagcctatacggtacgaatggtgcgagattctgacaaggcggcgccgaccccccaacggcactttgccgatgcgattcccaaagacagggttgttttgtctcccagccaaaggggctgatgagtgcatgctggggtggactgatgagtacaagagcgaagaagctaggtgctgctggagtggtgattgacgggcgctttcgagatctcgccgggcatcagtagctcggcatcggcctgtttgcccgaggtattagcattctaggatcaaacaccttcactcgctcatccgaattgaatgtccctgttacgtactcaagctcagatggcggcgagactgcggtcatccagccgggcgactacattgtgggggacgtcgatggtgtggtagcgttgccgacggataaagtggaggaatgcgtggatctcccccaaagaaggtataaagtcgatgaggaaactcgtgcctgtctcgagaatggagaggaggcgggcccgacgatcaagagatgtgaaagtgagatgaacgaatgatgctggtgctatagcgttttagtgttgttggtctgggccgtcagagagggagatggactatgataggctaagccgaatgtagactagccggtattccccagaaaattccataccaaatttcataccacgtgattcgtccttcctcggagtgttccgaagcgtctcgataggcatcacctccacaccccgtcgagctcagaccgtgccttgttcgtcatgggatctgccaatgaccaagtcactccacataaaaaggtccgcttggcctgcaaacgctgcagaaccaagcgtatcaagtgcgatggaggcattcctgcctgctccaattgcgcgaaggctgccgtaccctgcattgatgtggatggccgcaataacgaccggtcaatcccccgtgagtaagtgcagcttggctaaaaccattttcatctacagagtccaagttaacaggacctttagctatgcttcccgctgtcatgctcgcatccggtggttagagcagcaaatcaagatccttgacgctgattttgacctaacacagggtccgcagttggactctctcgcagccgatagtagtgtctcttggcccgcgttggaatcacttccagtagatacgccagtgcagactctcgaaccaacattatctagaaaacggcctcatgctgccattcgggcttccggttcggaaccgcctgacccagcgccggctgctgaggctcgctcggttgcagtcgatttgggcatgctctcacttcactcagactctcgtcagaagcattacttaggctcctcgtcggggctcttctttaccaatttgatcggagcccacgcggatgcccttgcaagtccagcatcgacgtcaacaggcccagtccagactcatcgtgagcgctctgatagctctgtcgacacctaccgagcgctctgtaggaaactgtcagcagagcttccttcagctgatgacgcgacagtattgtttgatatttacctgcacgaggtccatgtcgaccatcctttcctccacctggcatcagtaattgaagcttataaagctcttcgtgcctgcgtggagcagggactggatggcactcacattgtcgatgcgcatggctggccagacgggctatccccatttccctacaacgggcgctatgcccgagttgcagataaggatgtgaccccagttggcttttctactgctgtgttgcacgtatttatggttttctccatctctgctaccattctcacacgcagtaagaatttcgacttttccccgacgcggttctataaggctgcagcaagtgctgcacctgagtgtttgtcaaatatatctgtccctgccttacagagtatccttctatttacgattcttggaatgattacccctaccaatctgaacatttggacgttggtacatgtcgccatgtctcattgcattgacctcggcttacatcgggagccgcggtatccttccgatttctcgccgatttccctatcgatgcggcggttcgtattctataccgtttataaccttgaccggtcgatcgcaaccatccaagggcgtccactcggtatccgcgacgagacattcgatctgcgaatgccaacccttgccgatattcccatggagccggggatgcgggtggacgggctgaatgggcagtacgtacggttctcagacgatatggcattatccatccaccgcttcaagctcgatcgccatatttctgaaataaaaattctattttatcatctgccgaccgaagggggagtcttccactggccagctgaccattccgcagaccaggcacgcatcaaagcttctctggatgggtggctcgccgaggtcaaacagattggagtagttgcagatgcacatcagaaagatgcagccgagtcagcaaaacttcgcctcaagaggcttnaactgggagtcccttatcatgcagtgcgtacact

SEQ ID NO: 4014 - DNA, 3404 bp, Emericella nidulans
cagggattatcgagataatatttttaattgaagaaaagaggcattttgtataatagtaatattagataatggtaaagaatagtcttaagaattaaaagaggaggggcgcccctttctgggagagaagatagaagccccccaaggggtttatttcacccgcgattttccctggccgagatctcacccctttccgttaagccctacacccttgggattaaccataggcggccccggagcccctagagttttataaaaaaccccctgagcgcgatttcaaaattttcctttccgggttcaaccggcccgttttttttgctcggtttttacagggttttggtggggggctcggttcggtatcggacccagggttagcttttcaaccgccatctcacgtttgtgttctaaacgatgggcaaagactccggcaactgcctcgacaaattcccgggagttccctcgattgcacaaaagtgccaaagccgcctcaaatcacttccaatcaacttcctcgccgggcaatatgccgacaatctccctctggtctcgctggacgatacaatgcccgctatcattcatttgattggcgaatacgacggcgttttgcagcgccatgaaagcatcgctgggaatctgggcgcgtgccctttgggtcccattctgatcaagcgctttgagcgcctttttgacggcccgccgcgggtgctcaagtcacatggaaaggacacgcctaatatcacctggttggacgtggtagagtttgcgaaaaacaagcctgaacagttcaacctcgaaaagacgcgcaacggcgtgcgagtatgccagttctatacaaaacagagtcgcgtggagatcagcgaggaggactttgtgctgatcgcgtcgggaatgcctcagaagatgattccccctcaacccattatcgaggatgaagagaaggaactcggcgctcttgagatactggagaagaatctccagtcaataattcaagtcgcagatcaaggtttgttttatgctttcccccactatgtcaattactaatcgatgcctttgtagtctctgcacgtgcaagacaactgaatcatcgtctgaaaaaccgtcggactgcgatcgtcactcggcgcgaaaacgatgtaaatctccacaactctcgggcctcgcagcctctttcacagtcgcaacacctaccccagcagcgatctatgagtcctgcctggcgcgatgccaatggcgtcccccatagttcgctcaacagcaatggtaatggcaatggcgcctccaacgctcagtagccgtctcccggttatgttgcggacaacgcttctcgacccgggggggaagctcctccagaagggagcgtgctctcgtcgcaataacaagagatctcactccaatacggaccacgtcacactcatacatcgcacctgaatcaagggcgcatctccgaccactcgtgctgagctgatgaagaagtttttcactacacaagaccgccaggtgcgaggaagctatgaagaagctgctgctgctgctgctgctgctgctgggtcgagcaaccgccagtcatcccgccctagacccagggcatctgaaggtggcgattacaacgtgtatgcaccaacacctgccactgtcgcgattccaaacacccccacttcgttgcttccgcccccgaaatcgcatcaccatgaaaaggacgatggaggtccgttcaagatcgagatggtcgcgcgcatggaagaactgcagcgaggtgaacgcatcatgcctccttgcgatcggtgccgtcgtctccacatggattgcctgaagaacctcactgcctgtatgggctgcacaaaaaagcatgctaaatgttcgtggcgagacgtgaaggaggaagagctgcgggaaggtcggcgcgctgatcgaggccccgtggaggagccacattcgaaagacactaccgccagtccctccaccgcaccagcttcggaacaagtcccaccatctaccgccgttgcgacaccagcgtctgcaccagcgccgttgccaacctcattaccaggatcagccaccgctgcatccgacccagaaagaccgcgtgaaggcgcgttggatgtcatggtacgaagggaatccgcaccgattgccgctcccgtgtcccggccgtcagcagtaagggaggtgtctccgcgacgggcggtgagcgagatacacaatagccacggccattcttatcggcacaaccagagtgataggcgctacagcttcaaccggaataacgagccaaatcgggatgatgatggtccggatgcgttgagccaggccatcatggatacctataatgcagccgcggcgaaagggaccgtacacgaagtaagcaatgaacgcgagcgcgatatggagcgggatcaggatcgagaccggaaactggtccgagcatgattctcgatttctcgatgtcgtgtgatgtattctggtgatttggctttgcaggtttgcgtgtatatttgaaatattggcatgttgtttcagcggttcagcggatatccccggcagttggtgtttgatcttgcattcttgaggtttgagttgttcacactatatacaatgcgattcatttgttttaatgggaagtgattgcgtgacgtccgctggccgtcttgtccgtaggtagatacaatcaacatcctactccgcacgacttccagtagtttcagcctatactcgtagaatcttagtcgacagcttcgactgagacgatggttttcgacttgcgcgggaatctacatctatcttcgccgccctgcgttggaccctccggcgtaggacctagctctctcatggtcaaagtacaatgctaattttcagagtactttctcaatcgcgacatcctgtgggcgtcatttatgcactattctagcggccacgttctggttcggcgacgccgtcctcattcctggcgtcccagagccacaatggacattccatacatgcccatttgtcagtaacttcgtaaaccttcctctttgaattcgctacaagccaactgttgagtggacacctttctaaccctcctatgcccatcacccatcacccctcggaacatctccggccgacaactggccctatataaccgtcttccccgcttccagtcatcaactccactgaattgaaccccaacgcacttcaaacatggacatcaagttcgtcctcgtcacaggcgcaactggctttattggcgcgcacatcgttgacgccctcctaggtcacggcctacgggtgcgcggcgcaacgcgctccctggccaaagcgaagaaatgttgaaagcacgcctgcactacaaagaacagctcgagttcgtcaagatcaacgattttgagaatcccggtggactagctgaagctgtcaagggcgttgatggt

SEQ ID NO: 4015 - DNA, 4688 bp, Emericella nidulans
taccgtctcgaaattcagatgcgatgagacgagttggggtaagcctccgatagctgaggggttgaaatggtggtcaagtgtagtaacccccaaccttgggcttgctgtggccactcatgcgcacatccccaccctttgtacgctgtatatcgatccaaaacaatccaacagtggtgcactgtcataatataaggctcttctcgattgctgttagctgcggataagacaaaagaacagcactgggaagcgctcaacgacaggttgctttgccacagtcctaacgtatgtacacgctcgtcgatcaattcgcttatgctcatgacgtagtctactgagacagtcgaaaccatgggctccctttctcccctcgaacccctctttactccccttcgcattggcgcctttgcgctgcagcaccgtgttgtccaagccccttgcacgcgcatgcgctcaaccaaggaatccgacggcatatgggtgcccaacgatctgaatgtggaatactacgcccagcgcgcatctaaggggggactaatgctttctgaggcaactccaatcagtcgtgatgtatgcaccgggtgttttctttcttttttatttttatagcatgggtggctaaatagcttgtccatgcaggcggcaggataccctggcgtccccggaattttcactccgagccagattgagggctggagaaaagtcaccaacgcagttcacacaaagggcgggctcatcctctgccagttgtggcacgttgggcgggcgacgacgcccggttttctcggtggaaagacgcctcttgccccgtctgatatccccatttccggcaaggcgctggatgggaatgtgtatgccgatgcgccaccgcgtcctatgaccgttgacgagatcaaagaggtcgtcttggagtatgcggcggcgagtaagagggcgattgaggctggctttgacggagtggagattcatggtactgtaaccacccttctcgcctgctattgtcatagcatgccctagcagatgctgactgtaacaggtggaaatggctaccttctcgaccagtttctacacgacaatgtaaataaccggaccgacgcctacggaggctcaattgaaaaccggtcccggatcgtccttgaaatcatctcggccgtcacggaagccatcggcgcagagcgcgtcgggatccgtctttccccatacaactacttccaggatacacgggactcaaacccacagaagcactgggggtatctgtgcactcagatcgcttcacttcccgagtccagcaggccagcctacgtgcacatgattgagccgcgcttcgacgagatcctcgacgagtctgaaaagatcagtgcccttgagacaatgcaagaagtcgtcaagccatctcttgacgggctcagatcttctctgaagaaggggggtgtcagcttcattgcggcaggaaatttcaagccagagaacgccggtgagaaacttataacagacagcgcggatgctatcgcttttggccggcttttcatctcgaatcccgatctgccacgacgattgaaggagggtatcgagttgaccaagtatgaccggagtacgttctatggcgcaacgcccccagagaagggctatacggactaccctttcgctcaatagagcatgaatactacgacacagaatacagatagacagttgatgcaagctactccagaaaagatagcaatcaaacaccaagattcagcaagaccttcatagcatcgtgcacaaccgcccatcgtaccgtagccagctgctgcgccatagcccgtatcagtggccgcgtatcatactgccctgccagcccttctaaatcggccgcattcgaggttgtcatggccacaataagactcgacaggtccgtcggtttgggtacacaaccctcgcgcgcgtggaatgcccaaaccgtcagcgtcgccaggtacagacaccaaggaaagtggaatgcgtctgtctggtcccagtcgtgcaagctcagcacagcgtcctggagaagagccgccgcatggcgagacgctgttgtcgcggctggagatggaccagacaaccagcgagagagcataacccgggacctctcacgatcatgctgtttgacaacccgcccaaggatatgcgatgcgcccgctgcgatctgcaggtccagtacttctacatggagtgcaaggctggcggcacgatagagtgccattgccgcggctttaagactcgtaaaccgtctcgtctcgtctgctgacacctgcaccggcccgagtttcatgttcagacagtcggcgtcgaaatctgctttccagaggtcatacgcccttcccattcgcggcgtccaggcgccgactcgttcgggtgtctctgcgcgcaatgttgtctgatcgcgccgtttcaggtctgcgctgatggacatgaggccgtgtaagacgaccatccgggagaacctgttcagatcgcgcggtcgggagaccgagccaggggtaatgtatcccttcagcacgggaagaaatgcatgttctgtatctctcgaagcatgtcgggaccactcttccgccgtatgtgcctcccacgcggctggcgagcaaggcagcgacgagcggatctcaaaagcagacatgcacaaactctggctgaagagcactgaatgctccgtatcccacatgaaacactggaacgcgaggcgcttgcgctgctcggcgtccatggccctcttccacgcgtcttccagctctaatccccccaaccctgggtcagaatgggtatctgcccggatcgaacagcaagtactccggcggataagcttgatcagcacacagtggaatagctgtgcccgctccctttgttttgggcctgcgcgcatcttgccaaagcagtcgatcaacagcatcgcctgcagcacccagagctcgtccggctgcgggctgaacgcgccgtggcagaaaagctggttccgcaggccatcgtgaatacctacggccagctgatgggcttcacggctgctgtacgtagctcccattgacagaatcgaggccaggaagaccggctcagtcttgttcggatcaaaggtcgcgctgtggatgagcgggtatgtagtattgaagcgggagaagaacaggtcactgtagctctgcagcgccgacaaagagaggagcggcgagtcaaggtttagcggctggccgtgtatgtcgactggaggactctgcgctatcagggtcaagatccctcttcgtgcatcttcgctcagttgagggcgcagcggaacggtgctctcgatgggcggcgcaccggccatccagtctaggtctggaaagtctcgcttggggtcactgccgttgatattgccccgttcgacaaaactcgctgcctgtagtagaacagaagccgacgatccatccgggccttggtcatgcacaaacccagcggggagcccattcaggtcgatatccagatcaagattcaacatactgtcctggacattctctgccccggccccagacagctccatagtattcacactcgcgtagttcccgtgggaattcgcaaaggggacgagatcaggaccaagagggagctcgaggtggtggaatgcgtcgtcgagggaggagacgtcgaagagccaattgtagttgcccgttgctgcgaagggaagattgaagtcggtagctttactgtattggcatcatacagctgataaaaaaatataaaaataaagaaaagaaagtaggtgacgaggcgtacccgtgtccatcacgattgcatcgcctagataataaaacccacccgatgacccatctgccgaatagaattaaccgggaatgggctcgacatacggctcaaaagggccccccggcatcattggggccagcattggatccgggtcagttccatcgtcgtcgatggagaccccagagaccgagacagggtcgctcgccgaccgcggcggggagacgggggcctgcgcagcgtgcaggctgacgtctggcgaccgcgaactcctcccagacccggcagagacagagcccgaagacgataaaggggccccaacgggcgggcctgtcttctgctggtgtctcgacggccttttcggcggcctgagcacgatacttccgtcctcagccctgcgcatcctcttcctggtctccagaacacccttcccaaaccctcctgcctctgcatccttcttcgcatgccggtccagatgtctgctcaggagatccgcgcgggaaaagtgcgtcatgcaccgctggcatgtgtagccctggctgttactgatcgtctcgtggttaagactatgccggcggagatgttcagcgcgcgtgaaggctttggagcagccggggtatgtgcaggcgtgtttcttcatcttcgctttcattcccagcgtactaaccgggtctttttagcttgctttgatggagactccgtatagagctaggagatgctttgattatattatctttggcagtggagacgataagcgtgcggggtagactaggagcaacctgccggcgctcatatcaaatcagagaggagtctatactgcaggattagctggccgtgatacgagccgatagctgcagacccagccttggttgttacttcttagccttttgtggtgctatttaagactgacccagtccctacattctgctgtctctgtgcctacagaaaat

SEQ ID NO: 4016 - DNA, 3135 bp, Emericella nidulans
agctatttcattgaacttgcgagggtttttttcaggtttcgaagtttagctttataacaaatcctgcatcgcaattgctgggcttggtgagctgggtggcaacgtttcgtctatcacggactcaacggctcatttccgaaatgcttttgaaggaacctctaacgcaacagtatatggagccactaactctctcatcaacgtgatgttctcctaccagggctacgagaacgcctttaacctagtgaacgaggtcaagaaccccgtcaagacgctcaagtggagcacccctgcctcactcatcacagtcggtattctatacatgctggctaatatcgcctacgttgctgctgcgagtaagcaggagattgtcgagtccgaaatcaacgtcgccagtctcttcttccaaaaggtctttggaggtggcggtgcatctcgcgccctaaacttcttgatctgtgtcagcgctttcggtaacctgctcgttgttctcatcggacagtctcgaatgctgcgagagtgtggcaggtatatacacctcaaggattgctcccaaacaaatcacttacgtgggttttatagacaaggtgtcctaccgttcacaagattctggacctccactcgcccctttggaactccgctagggccgtactggctaaaatgggctctaacggccatcatgatcctagctcctccagccggtgacgcattcaatttcggtacgcatattaatcgcaactaaatcccattacaaaattaacattcatccagtggtcgacctgggaatctatccacaaagcatgtttaacttcttcctcgcagtcggcctcttgttcaccaggagacaccggaagcgcctcaacattcccagaacagaatggcacgcctgggatatcgtcgtctacttcgcaattcttgccaacctctatctgctcgtagcgccctggtacccgccagcaggaggtgcaaatggaggggacgtgagcttctggtatggcacgtacgtcgtcgttggaatttctctgtaaggacttttgcctccgttcttttctccttcccttcaggatacgcgactaatattatcgctagtatcggtctctgcggtgtctactattgggtctacatgaaggtattaccgcacttcgggggctaccaattccgccaaacaatcataactgggccagcgggcgagacatctcataaaatggttaaggtgcctaatgatgaacttgcgaggtgggatgaggagcatgatgctgcagggaggcttcggagaagggctaacgctcacaagacggagcagcctctggaggcttaattcggctgccagtttactagagcgtagtgtgcctatccagtccgttttggggtagtaacataaagtagtcacgttatatatatcatcacaatgacgggcacaacaagcaaataaggagtcctgccattagtcgtatccagattgcggtatatgtattttatccaatgttcatttaccgaaccgtactactaatccgcacagataatcaaaacaccaagagaatgaattttaggtaaattgaatttggtaacgggacaagcgtatcatatgcgacataacgagtttcaacatcaatatcataccaattcaaacgctaaccagagaaataatcaataattgacgtatacacctccgtaccagtacattgatacctagtacatatcaaatcgatctgggagcaggatcggggcaaccaaagtccacaggtaaatagcatagcacacccaggcgctgataatctttacccaactcgcccagtaggtccggcccacgggggcaaagtcgtcaactgactccgggtccaggttctgtgtcagaagcgtagcgacccaggtggttgccaagaaaaagataatgtggaaaagagagtagttgtactgggttgaccccttctcatcgtcctttacgtcgtagtcgtcctcgtcatcgctttcgtctagagcgctggctgggagagcgccgctggcgacggccgcacggagggcctcggcgcgcatctcacggcgggcagagggttgctgcgtgacaagaccatgctcgttgtcgtcggtaccgagctccgagtagttgtggcctttggagcctagggcaaagccttgagtggcggcccgagtcgtggtatatgcaatggtggccatggtgacgattgcaccgaggacgatggtggcggttcgagtgccgcgagcgcgaattaaagggttgcattggcggtcgtcgggctccattgagacggctgacaatgtcagataggtgcagtaagcagtcaccatggcggcttgcgccaatccagcgcgggggttattttcctggactgcaggctgcaccgagacgaaggagatgattaagaaaaccaccaagttgatctgtcacgtaagctttggccgcagaaacaagggatgaaacataccgaaatagcagcctggttcatggagcatccacttttagcaaagaagatatacatcaagatcgtcatcacgatagacgcaatgtacatgcccaacgttgagccgatcagcagcccacgccacgtccgcgaatcactctcttcaatcttctgcaagcacagctccgcccaggtatgcgcgagatcgacaagcagaatcaagcccaagagtaagaaaagcatagcgcaaaagaaggcaatgtagtgtccgtagacaaagaagaacgcttccgggatgaaaaacgacatgaccacaaacaagagccagagcacgatcttcgggccccaaaaaccattctgaagagccgcacgaccatccttcgacgacctcacacctagtaaaaacagggccagaaccaaatggaacaacccaagaccaaagttgattcgatgaaccgcgacccagccgtaacattccttcccgtcgcactttatctccatatagtccagcgtaagatgttgaagctttttcagcgcccatggcgtgagcatgatccacgagacaattgagtttataaggaggataaaggcatatgcaattctcgtagccatactatttgccgccgtcagtaacacgccattacaatccaccctgtggtcacagcttcgtacctgttgttgaacttcccgcaagcgctacatacagccgaacatgttg

SEQ ID NO: 4017 - DNA, 2794 bp, Emericella nidulans
aacatcacagcgccaattcttccatgagatggcggtttcatttgcaatgacagtctgctgtccggtgacgctttgccacatgccgttaaagctgcctccgccgccggggacttcgacgacgggtagatctatcgtgatagtataagccctgctttggtttttgggagacgcggagctcagcttactcggactctgttggtacacttgagtgaacgagccgtcaagcgaggtcgtccattctacaagctgaaccaaaacatgtcagcctggttgtccatgcccgtgaagtagaatgaattcacacctcttcagtaaacagataagacccggcattgggtaccgtgaagttgaacgtgcgcgtcgcaccgggtacatggccatcacccgtcacgctgatagggactaaaccctggagcgtcaagtcatagattacaagcggcccttgacgctcagatgttagaagtaaatggaagaaagacaaaggaggagcggcgtacaatctcccaggacgcgttgcacgtcaatggcgggggcgccgatgatgccgaacgtagtgaggttcttgaaggtggtaccaggtgggcatctgcagggcctgtacacctcgttacatggagggaggccatggctcggccgcggccaggggtggcctgtgggctgggaatctggggggtggggggcggctctcgcagtgactgctaggaccaacagagtggccagggtaacgaggctatggaagagcatgatgggattctgtacagcagaagcaggaaatcagactcaacagtcactggaagacagtgcgctttatatggtaccggttatcagacattgttgttgttgattttttttatttatcttcctgttcctatgacctcgtattcgaagaggccttaccaacaccctggttcaaaacatggcgttacttcggtctccgaatcatggatctattagaggtattgcggggctactgtaggttgcgatcttctgggtagccaaaagatcctggcagaggtgggctttttatagctgccaaccaggcttgtctcgccttgtattgctttttttagcaggggttcgggtatagatacctgatgaaacagggaatctactcgcagtccgagttagccgattggattcagacaatactaggagtgtactcttaccagaaaatgtatattccaaaggggaagcgataacctctgacaggtgtgctcccagagcttaagtttatgctcacatcgcgccatgatctatgtttaggccttgatactagcgggtttcgtggcgccacagggtgacggtggcatgggcagtcttgcggacgtggccggctggtcaagaatcaaatatggtgtagaatggtctgggatcgcctcttgttttgattccgatgttggtttttcttttgcaatggatagccgattttgaatcaggccacagatgatcctccagatctaagacactgcggcttatactcgtcccagtccagccaatgggtgatacgatcgtatgaaaaaagaccagaagttttactcacgtcgctggagtagctcagcctgggagttggagctatctatagagagagagagagagtcatggttatcaaggaacgagtcaagtatgactctggccattgtttaggcctgcccattttcactctcattgatctctcattgatcttcctcgccaaagcaggcgtagtagattgggttcatcacaaaacagttcattcctcagcaaaaccgtagctgctgctgatagttcacttttcagaagccattgaacttgggctccgggatagtgctgtgactgacactgaaacagacggaaattagttgtgacagcgaggctgcctcagccggggtagaaaggcggaactaactggtgtcaggtgaggctgtatgtctagtggctttcattagtacttttggtctctaattactggcgtagcgaatgctccttgcattccgtacaccccacgtacagtgattaatctccggctcggtagtatggctctacttctagagcacagttctggcagcgggctgcccacaatcgagcgacgcttccccgcttgggtatgtagacctggaccgcaatatgcggtcgctcaccctaattctcgagctagggccttgttaatttccgtaaactgatcctataacatctatttgtggcaatcttgttgataaccctattcaggcagcgatgcagcgatggagcggtttcgttccagctgacagtgatattgctggttctgcgctgcacgaggatccagcaagagtcaatcaaccttcttactagtgacgcctgagctgcaggtaacgcaccctccacaatattttcactaacatcattttttgcttggagtgtccggttgcggcgtcggccagttactcgaacagatggtcgtcccccagagccgaggctaacgaacaacacttgattggaagctgccctttctctgaatagaaatgaggctcatatcagaatgaatatttccctgtatcctctattaggctccttgactcgttcatgtatgtggttgcgtagagacagtcagatactctggtccgatgttgtggcaccacagtcaagatctgtatcagccttgtcttggctaatatcagcatgaagggaatggtacaatggatcatggaacttgacggaggccatgcacttcccaatgagtcggtggttggccgcgatgccagctgaatccgctgagacaggcgtcccgctactgcgggtaagcttattccctcgccatccttagccatgtgtgagtgga

SEQ ID NO: 4018 - DNA, 4608 bp, Emericella nidulans
atataagtggcccgccgactgtcaagcgtataccgaaagctagccttagaatcagaccagcagttcctcccaacccccgtttcgaagctacccagcggcctggagactggccgctacctagccattgatgtcggtggaagtaatctacgagttgcctttattgaactactcggcgatacggcagatccggatatggctcgcacatccgcgtctgagcggccactcaagaaggcacagacacagcgcgtgaagaggacccttgagaaggcatggccaatccaggaacatctgaagatggacaaagcagaggacctttttgcgtggatcggagattgtattgcggaggtagtggctgagagcctaagttcggatgcgacaaaaaatgcggtccctgaagagctggagatgggcatcactttcagtttcccgatgatgtaagtggcctcgcatagctttccgctgctcaacgtctcggaagacaatagttacactgctaacaagttgcaggcaagaatctcttgccgaagctacactcatgccgatgggcaaagggttcgccattacgtcggatctcaatcttcgaaatatactactcagtggttacgaaagacacacaagacgccctgatgatgaggaccagccgtcaacgaaacgtcggaagctttatgctttgccgaagctgaagatttctgccattaccaacgacgcggtagccactctcgcatcacttgcatatgcggtgaaatctctacccaacagccgcgttgccatgggtctcattgtaggcacggggtgcaatgccacaataccaatgaagctcagcgccttacatgaagacaaggtaaagcatgtgaggcggagcgatcctgaaacctcgggtataatagtcaacaccgaatggacgatatatggtgtcttgcctccacttaaggagctgaacataatcaccaaatgggatgctgagttggatgcaagcagtgcacgcccgggcttccaaccgttcgagtatatgacgggcggtagatatattggggaactcatccggcttatttttactgactacttgatcaacgttgctggagtgtccacggctgcattacctgcaacacttactcagggatacgccttgacgacatcttacatatcggacaaggttgcgcgtgcccgctcagacgaggaactcacagatgagctggctcactcattacctccaccaagtgatacgtggcagtgggatgctacatctgcaggagtcttacgaacagttgcccgaactgtacaaaggcgatctgcagggttggtagctgctgcagtcgtcggtctattagcatgcgcaggagagatagaattaaggttggacagccctcaaggctcaccgcaagactcgcatgctgcttcgcctgagcgcgacagcatcacgaccctttccgctcagctcaaatctgaggggtcggcttcaaatggattccgggggccgatagttcctataatttcgcctacacctgcggattggcagtctggtccagaggagcttgtcgtcgcctgcactggtggcataatccagcactaccccaacttcaaagagatgtgccagcagactatcgaccggcttattatgcgtactgggcctcagaagagcgggaagtcggtctttttgcgtgaagcatcagatggcggtgttattggcgccggtgttctcgcagggatggtcggaaatcgttgatcttcaccgctcgcattgaacttaccgatcagcaagaagtcgctaaagcttacgaacgtgcttcagcatcgtacagaggcaactctgccttgtgtagaggcgacgaagataaccccccagtggccgtcgtttgatgtatccattccgcttcccccggctgtttgcaagggagcccatatatctgatttggataggaaagggccgaaaccccgcctgcaagacatgagtttgcatattcatgtcatacaattatcatgagcgtgacagcgtttgatcttctgagtgacgatggggacagatgacagccgacagtaaatgattatcattatttatatgtaacggaacatattgtttcgaacacttcgcttcatagtttgaggcttgccatcctcatactctaagcctgccgcgccaccttcgccggacatctcctcgagccgttggcgtagctcttcatctgcttgagcgacagttttggcttctggtcgcgtttgacggggttccgatgtaggatgcagcttcgatgcttcctttgactgttcgccttccgacgccgttttatctgctctattagtgaaaatatgggaggcgttgatttattcacatacttgtcctggattcagagtacagctgggatgttgaagatatagatcttgcagggatagatggtgaccaggatttcgataaggcttttatcctcattgatgattgtactaggctctgcatcttgaattgacttgattgattgttgtcagcacattggttccaagggagctgtcattagtgtgccttatatatatgcgcttgacgtaattccttcagtgagtgagaccagtgacttttgttaccatagtggccacgtgacagagacccatctccacatcttatcggactcatcaaccatctctcactcaaccaccttccagcctcatcgccgcccaacaacaccctcaatatgagcgctcaagcgtactacgaactctaccggggaagcaggtactttgtattcctattcggaaggtctaccacactgttgctgactggtgcgcttccaacactagtcttggcctgtcgttgacagacacccttgatgacttgatcaacgaaggtcgcattgagccgcagctggccatgaagattctctccacatttgaccgcgttattaccgaagttcttgcggataaggtccgcactcgtctgacttttaaggtacaccatacactccccgtccctgacgtgctggcgcaagcctgtctacattccctcggcgctgcgttcatttgggtaatcagttgctgatgatttttcattatctgtagggtcacctcgatacatatcgattctgcgacgaagtgtggaccttcttaatcaaagatgtcaatttcaagctggataatcagcaaaccatcagcgcggacaaagtgaaaatcgtgagctgcaacagcaagaggcctggtgaggcttgagaaccgtgggtttgaagatctacgattgggcatatgaaatggggcgttcttcacctttcaagtgttgccttcttggctttatgggcatgcggtcaatttttatcggcgtttggtgtgctgtcgattgcatttttttctatcttttttagaggacagatacccaaatcagaactagaggtttccagctgcgtttatcgctcttgcgtaaacaacgctgttttttacttctggcatttgatccttcaagagtctaggttgtcccgaatgcggagcgtggggcagccttaaattgccgcgccttgtacgcgagctaaagtacttacgtcgcgttcagttctccaacactatcatctacgtttacccactaacccggccatcttcaacgatcatgattgagctctctcgctctgtctctacgctctagccaaaaaattcatcatgcctaggacacctccttggctcaccggcggggaaaaggcgaaacgtgaaccagacttaccagctccagcaataaagcgcacttcaagtccccgtttgagagatgaaacaccaacgaagaaggactttgtttctaggaaagacttctttaagtcatgtaagtcttccgtggcactgccgattgggttccaaatgtatccctctgacacacgttttgtagctcccagtcctccttcgtcaccgatccatcgctgcccatcagaagagtatgcagcctcacgctttgatcaacgcaatactaacgtaacagttagatttatccgtgaaggtcttgatgaagacgacatctacataatggtagaagacgaattctacactgtcgcacaaactttcacgcgacatctacattacgctgaatacgtgcgtagcaaaaaagaagcgaaagtccgcaatgcagacacgattgcagatatcgcgagaccaacaagcggggccacgccgatgagcgtggagctgaagaagagatatgctgcggatgagctcgaggcaagacagcaggatgggctggatgcgcttctggggaagcagttggcacgcgatggagacccaggtgatgatcccgaggtggacgtctcgtgggctgggacacatttgcaggatttcatgtttcgtccgaggaaggtgaggtcgttggctggattgcaaaagtctaagccttcgacgaaggcggcagcggagtttccgcgatcttctagactgggcagcgactctgcagtcggcaatggccccgatgatgatatgcctgttggggagggccagaaagagcctgcgattacggatgaaaccactgatgacgatgacgatctgaatgctggggtgagccaggtaaacctggcggctgcgagaagcagcagcgccccgtctatctaggggccgcggcgcacgtccgctgcggtccggctctcgaaattactggccctc

SEQ ID NO: 4019 - DNA, 3274 bp, Emericella nidulans
taagttctccgctcgttgcccaacactcccttatcgtaaaggaaagtaaagctgatatacgtgtaggatgcctctctatcacttcgtcacagcggacttgccctccaacacgaaagctcccgagctagacgacgtccacgccgctgcttcccttcgcgccgacgcttcctggtcaggcgtcgacgtgtcagccggcgccggtgtaaccgaggaactggttggtttgtacacctcgtaccttgtctccgttggatttttgccgccaccgacagagtctggtgcacgaccactgccggctgtatcgatcacggatgatcagcgtgaggcgatggcgggtgttggtggacgtggtggaactgcttgatctatttttatatttttttaaggaggatggtttacggtaattctgtgatacacgtgcttttggtttctaaaaaattagcttgatctcgtttggcatgtgtttattgcttcaagtacatgaacaactgagagatgattagacggcaggtggaatgatagatagtcagaacacatttacattctttatcatgaagcaagtacgccggttatctactggatgcaaggatctacagtatgcccagcattcgccccgacccaaccgaaccccagatctcacgcaaaagcaaagaggacggcagagcaaggcttccctcgaagccgactgttttcttaaggttcgtaagttctttacggatagtgaactctcccccacgcttccagaacgaaactggcggacattgctcatgggctctgacatatcataccacaccaagccaccaatcgatcacttagtctgtgaagcatgccaggtattagtcctccacgctattactctttcgcgatctcggtagagagaggacgtagattgcgaagaggacgtggcgagaggcggcatattgggacccttcaggaggagcctgaaggtaccgcagagggcaaattggtaagaagtagtatcaaacaggttgctatcacggtagaaacctttaagccaagggagagattaatcagagtctgaccagcagaacgcttcagaaggaacgtaaggggtatctctgcttcctgtggggcataaaggtaatgagcagtgggaatatcccgcgacttacagaaagagtttgaccattgagagtcgtgatgctgttcaggcctcaggagattgcgagcttatgaagcattcggaagctgagagtctcagattccccttccagatagacctcccgagctacagtccttgctatggtagtatccggcggaaagattggaacacgtggtgctggatgagttattttatccagcccaaagatgttgtctccatgaagtcacaaaggggaagggaactcaccaccgttacgggcactgctccgtgtctatacggagaaaaagataacaggagatccacagaccagggacagaaggattagaaggattcgagaataatgcctcaaggctactggaatgcttatctttggtagtgacatgatcacaagtcgccaaagcgtcacccgactcgagtataagactgtcgatatagcgtggcatgctccgccgagaaacggtgacctttgcgcttacttttggtgtaacgctttcggtgaggccagctttaagattcgatcatctcccatcatgtccgtattgttcttcattttgttttaggtatacaggacagttttcttggaaatactttccaatgacaacccaaggtatgtatatagtgcatgccgatgttctcggtatacgagcattccatgtgtagggtactgatgcagtcgccgttcgctgttttatccaatgtcatactgggacagaatgtatcgtgtcgcttgttgccgggcatcagcttgtcaggacttttgttgccattttctgtgttctcctgtcggcccgtgaaggaaagcccaccaaggccatgggattactcgaaacctatccatgggctaggttgaaaaccggtcatggaaaaagagtgtcccatattcctgcgagtccttccataacacttaacatctgaaatgttgcacagatcagggtgacacgtgctgacaacaaaccccagatccgttcaccgcagccctcagccaaaacaaagcctgggcagccaaagtagctagagagcagccagaccttttccgcaaactttccaccggccagcacccagagatcctctggataggctgttctgactctcgatgtcccgagacgactctgctaggcctcaagccaggtgatgtgtttgtccaccgaaacatcgccaacatcttgcagccctcggacctcagttccaccgctgttatagagttcgctgttcgccatctgggggtcaagcatgttgttgtctgcggacacacaaaatgtggaggcatctctgccgtgatggcaaacaagaagcttggtattcttgattcatggctttcgcctctgcggaagctgcgtgacgataattcggactgcttgaagtcattaccaacggacgaggcgctcctcaaactagttgaactgaatgtccttgccggggtgaagacggtgaagcagaagagtgttgtggttgaggcgatgcagaaagggctgaaggttcatggactcgtgtacgatgtcgggagcggtgttttgcaggaattggataccagtgcttctgacaagaccgtgaagaaacggttgacattgtttaagaaggacttttagggctcgattttgcttttgcgtattcccaatctatagttagcaactgagcttgtacttttccagcgggcttgacatgatcgggtcgggtgcctggcagctcctcatcaaggagagttgaaaagtgttgtctgttgctgtagacactggcaggaagatgttaaggaaagcccatcaggtgactgcccgcctggatcgaagggttgcctgtttgtttttcagttggctgacgtcccagcactgctcctgactcaatcgtcgctacagcacaattgcagcatcggccactatggctcaagtccgccacaatactcatcaatcggagaatgtaatggtatttggcagtggggattctacctcaacctcctaaagacggattcattgggccaggggctgacccaagcctacatctgggactaacgctcgctattgggaaatgcttgtagcatcaggagctggcctatacagaagtaaaaacagtactggaatccagcaggtccggtcacgaatttagactgagcgtttgagcgtttgagtatgcatcagagcgctgacaatcagtaaatgg

SEQ ID NO: 4020 - DNA, 578 bp, Emericella nidulans
ggcgacaacgctgccggactgcgcgacccgttcttcatacggagtaattgggcgttatgactttcttgcaattgacggacttcgtcttcatgacgcgagatttcatcgtcggcgtgttgctgcgcagcaaggagggagtcctccatttccttcaggcgggcttgcatctcgttgatccgcgcggcgaacagctgctggtccttttcgcccttgttaattgcggccgcgagcgcgcgcgaagagcggtgtttgatgctagctgttggcgcacgtgctgcgctagtgtgtcggtgcggttgaacgactcggcgagttctgcatcatctacgttgggtgagtgcgctacactggcttcggcttcttcgcgatccgcctggagttgctgatatgccgactcgagggaggaagaggtggcgatcacctctgcaaaggcatcgcgcccaagggtatgtcggcaagctcagcgggaactgctatatcatgttcctggagaagaattcgaagggacgcagtctcctgctcagcacggtcaaggtccattttcagacccgcgaggcccttctcgcactgccatttct

SEQ ID NO: 4021 - DNA, 4075 bp, Emericella nidulans
taatctctcggaaaccaacaattattcaacctgctactcgattgcctgattgccggctgcaggcactgatggctgcggctcgttgacatacgaggctgcaagcagaacgctagtcaatatggccgggcatgggattagggctaattagcggacatgccccagcggaaacccggcctttgcgccgtgcagctggcttttttgatgactgcattccaacttcaataccatctacgatccccgaggagtattcacttcgcttgcagactccgagaaataacctccaggcgtcgactccctgagtgtgtccttcggcttggcgtcagactgggtgctctaacgcgctcagagctccggaccttccacttgcggaacgaaccctggaacgcaggccatctgatatagtatcctgtggctgatgctagagtaagtttgctacctgactatgttatagaggactagggaatggtattccacataacaatcgctatcggaaagacgaatggtggtcctatagttaagtcagcttagtaggtgggcgtagtgttaaatcctgtatatcaagtgcgaacagagaaataatggaaagtagccgataacaacgctgtttgatgcattccaaaactaatgggtattgtgtatctcaaatatttctatttgatttttgggtgcgcggttccgctccactccagccgccggggagtcatgtacttctcgagcaactcatccgtaacctccttcctccgatcctggaactcagcgacgtattcctgtagcttcttgatcgccagcgccttgagctcaccggtcaggagctcaccgctcttgtagctcttgtagatctcctcgagcttggcgtcgtcatcctcgaagtacgtcaggtagatgtaggaaacgtcaacgtcggggtttccgcctaggcggcggtggtcttcaatgctgacttggccgccgctgaaggcgtacttgttgattttggtctatttttgttagcctgtgctagatgttaattcactcagctgacataccttgatctgcttagctgtgtctgtcataaagatagcagagttggggtccgacgatgacatcttgccaccagcaccctgcagggcagtcaagaactttgagtgaatgagtgcaggctttggagaagggaagcgcatcttgtgcgcattatcacgaaggagacggaagtagggatcctggtcgatacccatcgggatcaagcactggatctcagcaatctccttcttgcgctccttcagaggctcgtccgtccagatctcaggatatgacgtagcgaacgcagcaacacactgcacagacgggaagaaaatgcgaccgatgttcgtgctctcattgaatccgaaggccccacggacctggttgaaggtgaccagtttcgagaactcccaggtgttcatcaggatgtggttactgacatacttcaaatcactgtaaatgaaggtcttcttcaggtcgaatccgagtgcaattatgtccttggcgttctccatagcgtagtgcaacgtctcttcgaacgtaaggctatccttgaacagggccttctcgtcatccgtaagcatgaacacaaggggcacgtcaaatacatcctgcagccatttggtgaaggtaagagggattgtgtgtcccaggtgcaagctccctgaactggggccacgaccggtgtagaggaagaacggctcgcctttctccttctttgtgaggattttctcgaagtcgcgatggctgaagaacagtccgcgccggagccagcggtgcggtttgtgtccggtgaccttttcgaagcggtcgagaagggcctggtcaataagggatgtgttccattttctgaattgaatttgtgagttagacgatgaaatctcaataggatattttctccttgcttactttgaaagagcctcgtagtcgatttggatggcgttgccgctcgcatcagtgccacctgcgacagaccaggggttgatatccactcagaaactactttgttggcggtcgcgggagtctcggccatcgtgaggatattcaacccaattgactggaatggaaaggagaaagcttgtcgcggtgaaaatcaaccccgctgtgactcaggacaaaacgtggggcaatcaaatcgatcatgtgatgtgcccctcgactgtaaatgtgatcacgtgcctaataacatatgggagtttgaaatatttggcctgaaactgctaattcattgatattttgataaaactactgttacatcggatttaccgtacagtagcacccttcagagtcttgactgtgcatacaccacccgacttagcgaccagcttacccagcgcaggcttgccctgctggctttgagcaacagggacggcgctgctgtcaaacgcaacctccagagaatccgttgtagtgaaaccaggctggaaagtctcccagaccttcttcttggggttgagtactttttcaggctcgccgtcgttccagccctcgaagtatatcctgtcgccggcaggggcatctgcgggaggagtaacaagctcaacggggccagcgtgagagtcctcgccctcagcgacacggggggaagcagccaggaccatggcagcggacttgatgccacgcatggtaacgggcttgaggttacagacagcgacaatcttgcggccctgcatctcctctaagggaaccaggccattcaagccagagcatactgtacgaacggtctttccagtctcctcatccacagatgtgttgtctgagccaggagcatcaccacagtcgatggtggagacgtaaagtgagtcagcgttggggtggttgacggcacggagaatatgaccgacacggaggtcgatgagagatggggaaggaggcgctgcgggagcaggagcgggcttcggctgcttctctttcttttctttcttctctttcttgggctttccctcggcctttccggcggcggcggcatcgggggcagccttttcgggcttggtttgaccaacaacaacagtctgctcggccccggcgccctgagcagcagccttttccttcttcttgcgctccttctcggctttggggtcgacgggcttgggtacgaatcggacgtcgttcacgtcaatcttgaccttctcctcatcggggatctgcagcgaaaagacacggctgttcatggactcgtcatctccatttcaaaccatcctgaattaatcacagctctgtcttgaaactgtttaaaatagaacgttgcagcgtttcagaccttgtctatccagctgatacctatgaagctgaagaacaggggtagatgttcgtttcgagcgaagccgtcatgccgtattagatacatggctatctgactacattgtccacgcgccttgtggtccaatcacaggccccatgcaacatgtttccactggtacggatgggctatgtccgggtgcaggaatagttgtttctgggccgcgggggaaagggaatgatcagcaagagaactggaaggaggggtcaggcacagactgcaatgccttacctacggataagtgtagtctacgaagattattagagttggaagttgttccagcacggaggaaggtttggagaaggctccggtcgcgaagttatttactgggatattgtactaggtatcgttctaggattaccatggctgtattttacgggtaagcgcaatgctttgtccaatcttctctggactccccctttcaacaattcagtctttactccctagaaatcgagtctacaagatctggagactgtctgcccgggagtgcatttgcatccagattggtttccagattggtcgtacccttaccatccaccccgaaattcgttctccgcccatagtcacataggctttactttaacctacacctatcaggctacgacaaccatggttccgtggcatgactcgttctcagccttcgaatctggagacctgggagtcaaaaagccgtccgttcacgtgtaaacggcccaatcgcaagatgtaccagagagccgggaaacgtttctttgttttgctgggccgtaagattggatgtcagagacgcggtttgat

SEQ ID NO: 4022 - DNA, 1944 bp, Emericella nidulans
ccatacaaccacatcccacgtctgatagcccatgcccgtcccaaccacccaccggggcatgaaagatgctcataggagtttgccgagatgtaacggggttccaatcccggacaggagaggaagaatcaatcagctaaaacagctctaaagtaataatgggttacttactgtacatctcgctcctgcacctggctggaaccccatgcccgtcccgtcctccctccttgggctatggtagtatgtagagaaactaaaaacaatgataaaacattatgcgcggctgttctcaaccacctaacccagggctgcacaagttagtatccaggcccgcccagcccgcccgtccatggcctggggttgcagcatttgattgacatagtatagtgtccaagttagccatgcagaaccaagacccatatagcggtgctcacttgttgaatcagacaccgcttgataaccgaccgtcatctctaagcctgtccctatctcccgccagggcatgctaagtcagttggagaaggggtatgatgagaccggaggcggatgctctagatgacgatggtgaaggtaaacggaggcgcggtcaagaaagacaggaaggaagctgggagaattgtaagacgaacgtaatcgtaagaggatgaaactgtagtgcgaagggggaaaacgttgaagctgatgtggagtagtcgaagccacatgcaacaccctactaactgccgggccatcgatatatatcactgtcagtcgcagtcgaacaaagccaaagcagaaatcacccgggcctccccgaccacccagcctgagacccagcccaaaccgccccaaccacccaccgggtctgggataagaataaggattgtgtctcagttgatggctacgccgaccacccaccaaatcgaaataccccgaccgcaccctctgccttgccgggcaagagatgggaaaaaaaggaaagtaagagggaaattgaaagatgtgtcaaaggcatttgcttcctcagcattaaccaaggggaggacttagcttcattgtatagagcgatacatactacgcaaccactgcatcacccaagccttgatagttaccgagcaacgttcgccacatgatcatggattatgagtaggaacggtgtgaaatgctccaagtctatattaaccgaccatcctctcacatcctataactcggacctgtccttgccaccccagccagggcgtggaagaacaagaaattcccttaagtagcatttagcacttattagaggaccattaccggggaaatacttatcttcactccaacgaaccagcagccactgtccgatgacccaggcccgtccctatcacccatccagagcctgtaatgtaggtgataagaaagaaaatgaagtcgaaggtgctatcgtaggcggaaagattaggggaaactatcatgttgaaagaggaaagaggaaggattgtctagaagacggagagaacaacttgatgggtactgggatagggcatttatagaagcagctgggaaacgggagcaatatactacaacgaaacgagaagtggaccttggccctccgcaggcttcctctggttgccccgaggacggcagacttgcagcaccgcgggcctgtgggggcgcctattcgttcgctagcacagtgcgccggccgtggcttgtcccaaactagatctatacgtgagtagcggtgcatggtataaatggtataagtatatatatcaatatatggtagatatatggcgttattaagtaagtagctgacaagatcaatggagaaggcctaggccaacccaaccacccagttaaacggtccttaaaggacgatgtcaaagtaaattggatgaacgaccaatatgccgccgatatgaaaagagcaagtaaaaggatgaacgggagacaataaataagagcagaagcatggactggcaatta

SEQ ID NO: 4023 - DNA, 3551 bp, Emericella nidulans
aagccaatgtgttagaaaggtcggactgtataagttggccttctgtgtgaagacttacatgttatcccagtagcgacgagcgtttccattccagccccagtgtgccacggtgggcatgtacccaaggatgctattgatcgtcttgttaacgagtccctcgtcgccgaagtatctgtggatagtccaggtgtcagtccttttcaaaatcctccacagcgagggccgcatttgtacctcgtccagtaatagactccttcctgtccggtcgagtcccaggcctgttcgctaccaaatggcgcagggagactggtccaatagtcaacccgatcttgcatgacagtttccagcctcgcggctttctcagtctggtcctcacgtttcaggtcgttcagcaactccccccagaccgtttcgcccatcaagcccaccaacgcgtaccccacatagtaataacctgactcgtcttgtacatagcaccgcatcactgtttcgtacgcctggttcaggaaccattcccagtcatgtaaggagacgaggtcgggatatgccctagccactcgatacatagcccagtatgcggctgtgacgtggacgtagttgtacgcccggccgtcgatagagtacgaatcggcgcggttccagctccaccagttgcgccagtcgatggacgagtcgtagtcatacctgggggcatagctgggctcgtagaaaaagacacttttgcgcacgccgtagatgtctgcgctggtattggtaggccccgtctggtcgtcccgcacctggatatcgctccatagggtatcttcgatgaattgctcgagcttgctgatttcttcgggctcaggttggatggattgcttcatcaatgttgccagccatgcaccagatccgccttcatccatgagcccggctatccaaacacgggggtcttggtcgacctgtgtgtctgcaatgcggtcataggagatgaccgaaggggatcgaccaaatggatctgtcgaatcgttgaaccaggccttcgtggtgaaaaagttgcccagcttgccgatagcctcagaggcactgtctgtgatgtagtaatggacagtctggacaactcggtcgctgtaggtgatcgtcaatcggacgcggccccaaaccccctgttgtggctgtagtttccactgattgctcgcatcgccttcggtaatatcgaatcctgagctggcgtcgttctcaactccgttacagtcttgttcgtgaaaagatataatgatgcctgtaaatccgatgggataatatagccagggactccaactgcatagggtgtccccgtattctggacaacatctccaatcccacgcaccccctcctttaccagtgatatgcgcaatccaaccgtccaactactccctggcgccaggatcttggaggtcggttcgttccacggctcaacatccgcccactcggtctccgcgtgggctttgctaagagtctgccactcatagaatccctcgaagacttgactgtgatatggaagtgctccgttcgttggttctttaaggaagttccacgcttcgaaaggtgtatcaccaagaggagttatcacaagcgcaggcccggttcccctggttggagtcacttgcacgtagcctcctcccaggccaatgtatggatcgataagcgagcaggtatccagcgcttcttccgccgtatagttgtagaaaatactgttaaattcaattggcagcccgagacttcccagctcgatagagtgattttgtgcgttcgtcacggtaaagctcaaccctagatcgccgtccacatccgtccacttgcgcatgaccttgagagggaatgaatcagggagcgtgtctgtgagatctgcttcagcgagagccgatgttaaagggacatcttcaaccggttgacgggatgaggcagagctggcatcgacccatgtgctgctgtctccagcggctgtgaatcggaagttaacgtcgccgacatgatactgttcatttcctgcgcggtgctgaagaaagtcagacggagaaaagtcgaaatcttgtccctttggtctcagcgaagcgagaatctgagcgtcctgcaccagactgagatcgaaattagcagtcgataccttcctgtagccgttcgacaagcccagagtgtcctggctctgcgccgcgaccgtcaaggtcagaaataccgcaactgccgacactctcatagtatagttggagacttttgggttcgctaaacagactagtaaagggatcagcgtagatttgtacttggaacgagtatcctacgatgcggggtctctccaccggtattttacctatactgaaacgactatacagggttcatcttcagatgtaaccctgcagctgtggtaccttgcagttcagggcgtgatgaccggtaacatgcccccatttccggggagaggggggctaggatttattggtgtctgaagaagctcggttaaatactcgcagtgctttagagtctctgagacgtatgagtagattagatctacatcatcatattcatggactgcatagacagtatcagctgtggaaataatgtgaatggcacattgagatgcagtaggaccttgaatgtcgaccgtgtcttgcttgagacccattgcaaggaccagattgtagagagcgttaagaattctctcataaagctagttctcatgtcatagaccccaaatttgagaatctcaagagaggagcagagttgatcaagacaactcatctcacgtccgtccgcaacaagactatcaaccctagtaacacgatggcctagcagtcagacaaaccaacgccagttcgcaagatcagcgaaggagaagtctgacaactatcctagcacctcagtagagcctctccacagatgtaccaaggagccgacagataccacaatgattttagagctctctgttaagcgcccaagtggtgttgagtggattcctcgaggcatgattccgaaagctgtatcaagtaacggccaaactgaacaaagacacgctttaaattctcatgcaatctattattactcattactagaaagcaaatcatagatcaacgaattcgcctctcagcgcctcatcttccttcagctgctgaaggtaatgtccaaccttctccgtcatgaccccaatatcaaagccaaagaacttatacgctgccttgccaggaagactgtgtccaaaccgcctcactgagatccccgcgtccgcataccgctcccatccgttcggtgcatacggctcgattacaaccgccggaatgcctttatgccgttgcagaacgtacgcctgtactcgagagattgctgctcaaagagccgctggcaggggaaactgaccacccgtgcggtggcgcccttctcctctttgagtctggcggcgacgtccagcgcgaaggagagctcggcgccgacgccgatgatggttacgtctgcattggaagcctcttcaaggacgtaggcgccctttatcacaccctcacgacgggtctgcttaagttgggggagtgcgtgacgggaggtagaga

SEQ ID NO: 4024 - DNA, 4986 bp, Emericella nidulans
actcactcgccttattcaaatgaaccccggcggctgatttatgggagcgagtctctggttgaatgctagcgttcttccgcatgccctgccagcttaaatactgggggtgtgaactaaataacagttggatcgcaccgcgtaccgcgttggaatctagaagggggatgctaatgttcatatggttgctgagagtacgtctataatttcgcaccgactgttgctgaggaaggaaaaaaaaaacattgtcaggaagtttgcagtaatggacgatcttcgcagcaagctttggcggacaactgatgtgcgcaatggtatttgcgcttcgttgagtggctcgcctcctgctatgcaaggtatgcccgaaattcctaataaacactaatatcccagggctcaccgtcgggaatcgtcaccctacggagcctggacaggctgctggcagacgcccaaggacttggccgagcaaccctgcaaggatcttgggatttgagtttttcccgaagatcgcattatttccacatggtctcactccttgctttttgttcgtcgagcctttgcagaaaccacgactcacatcttctaccgtcgtcaattgaaggcttatagcagtctttgagatttggaccgtccttcttcaccctctccgagtctcgcctgtacctgactgactgactgactgactgtctctaaaccagtcgatgatgatatgttgaggctggactaacagtctgtcagcgcaatcaaatactcgccatgggttccaacgagatcagccctaccagaagggcaaacatggcggacctaactgccgactatgccggatacgctgagcacccacggaaagggactgtggctcccaagtacatgggcacggtggtggatcagcgagacatgaatgctttgggccgagtccaagttcttcgcgtaagtgctacaggcctcaatgtcgcaaccagcagacaataacgtcgagcagaggaacttcagattcatctcgatccttggcttcgcgtgtacacttatcagcacctgggaggtgattttgacgtaagaccacggccttctagcgcagtgacactagatgactgaccggcaatagtttgctaagcagtgtgctgacggacggaggcacggccgggctgatatggggcttcctcatcgtcaccgccgggttctcgctcgtcttcgccagtatagctgaaatagctagcatgtatgcgtccagtcctcttctttcagaagagtatcttaccaggctaggtcgccaacctcgggtgggcaataccattgggtgtctgaatttgcccctcgtcggtatcagaaattccttagctacatcaccggtatgagtgttgtcctttaactgaaattcttgctaatgaggataggatggcttaccgcaatcggatggcagtgtgctatagtgactattgccatgctggccggtacgatcattcaagggctgattgtcctcaataacccaacctataactttgagcggtggcacggtactttgctggtcatagcaatcaccacattctccatcttcttcaacacattcttagccaggaatcttccaatggtggaggcattgatcctgatcatccacatcgtagggctctttgccatcatcattccgctatgggtgcttgcacctcgtaacaacgcaaaggccgtttttacggagttcaacaacggcggcggatggaacagcgatggcactgcaacgttggtcggcttctcaactacaatcactgcgatgataggttacgactgctcggtccatatgtgtaagtacctgcctccatcgccggtcggtaactaacatagacagccgaggaaatcaaagacgcttctcggacgctccccaaggctatgatgtctgcggttggagtcaacgcggtcttagggttcatcatgatcatcactctttgcttcactcttggagatgtcgacaacatcctcgaaagcccgaccgggttcccgtttattcaaatcttctacaacacaacgcagagctatgccgccacaaacaccatgacggccatcttggtgatcaccttgacggcaagtaccatcaccgaggttgccacggcctcgcgccagctgtggtcttttgcgcgtgacagagggcttccattctcggatttcttcgcctacgtatgtttgaccccccactctatttcttagcatgcagtacatatctgacacgcgacaggtaacacctggctggaacatcccactgaactctgtcctcgtctccctaatcgtcacaattctcctctcgctgatcaatatcggctcaaccgtcgccctagcagcgatcgtctcgctcacgatcacctcgctaatgtccgcctacatcctgtctatcggctgcatcctgctcaaacggttccggaacgagcctctccctcaccgccgctggtccctgggccgcttcggcatggctatcaatatcgcagcaatggcatttcttttgccggtgtttgtgtttgcattcttcccacttatggcggaggtggacaagcagacgatgaactggagcgttgttatgtatatagggttaattacgctggcatcagtttattatataatacggggacggaatcactttgttgcgcccgttgcgctggtgaggaagctgcgctaggcttctgaaaagagtatttagggttctctaaggttttctgtatatggcgattcctgggtggtctataaatgtatactgagcaaaatgtgaggatacgatgtccatagataggtagcagatttacatacggcacagagtatagtgcagctcgtactaccacaggtgctgtctcgcatgggctctagcccgattaagctcgctctccagtgcaatacggtacttttgcgcacgctgccttctcaaaaaagcaaaaacccagggtcgactgcctgacctctggggttccagcctaacgcatataccctccgtcattcaccggtaaagaaacctgggctcctcaaagtggtgttcggtgtaaccacactgcaacagcgagatatgtagcaaatactgtcacgagacagacatagaaggagagttctagatactcaggtcttgtacagcgcgcagatagatgcttggaccccgggtaatatgtgtccatgtccatgagatacgaaatagtctataatcaagtcgaagcaacagggaaccgaatgtatcaatctggagagcgaacccatgatggaatcgttgcccaaaccaggtaaagggctccagcatctccatcgtgaaatcgactcttcaaggctgtgtttcggtcggcatgctcgggggccccgggggagccccgggtgccccgatacggtacaataccctactttgtagcattttattgttgtttcttcgtcgttggtaatactcgtatgggatagttgggcatagcacgatctgataaggatgcggggcttttttggtagtccgaccagcaaaaaacacgtctgaggcgatattctctcctcatgcactaccatattatgattggggtcactggattcaagctggccagttatcgagtcgcgatttactatcatgcgcaccttgacttggagaaggtcgagttggagatatatggaggatccccacatggagaagagacgttaaggatcgccatgattcatattgtttgtacttcgtgtttgtggcgacgagtttactgtacgtgatgatttgatcttcttgcgcaatttgatggagatttgatagccacttgtcctcgagacagtatcttatcataattacaattcgaatggcacagcagtccacgtacaaacaaccctgacccagttgctcaacctgatgatctgatagcggccgacatcggaagccccacttggccgactcttttctcggtactcgctcctgggctcctggactcctgattgacaggctggattcctgaatctggatggagagtcgtagaacggcacgtacgtatttagaagaaaggggcgtccatcattatccaatggagcacggagagcgaagaccagctgagcagtctattgatcgggaaaatgagacccatcctggtcggctcaggtttatctgatccggaactcacgtgcggccctagagcaccgaaagatggcggatgcgtcttggtctcagtatagcctagcggcactcgccgaaacagtgctaaatcgatagcagaaaacagctgcaggtaagtaacagtctagtagatgcatccatagccatgaattcatctgcagactccaaacctcggtagagagccataaccgagggcagagacgacaaccgtggccagatcagattagattttattacgatacagcgtaccgtcactgtcactgtaacgtattcggctgccgctgcccacgttctgctgcatcaggccactcgtgattccagtaaccggcgagcgcaccgggtggggggttccgggttctcctgagagtctcgtatgacatgaagatcatgctccagaggattattctatattcggaagtcttaatcagcttcgcccggtactcagggtcggaacctggattgcgttcatcgatgtttgcgggctggtggaggatgcagatcggagaaagccgccgccttctccacggagtccttgacgatgttcgtttcgttgctcattatcttgcgaataagaagactaatcgatagcgcccgagggggaaaagcaattattctgctacatagagtccctgaaaccacttaaccgcaatcattagtctaacctcaaaagagagtatctcgtggttgaattaggttgaattttgctgaattctgtgttcagccgtcgggtataattacaggtatgcggtcgtaatgacgtggatggcaattcttatctgatcctgctcgcagttttcttcacttgcacagcactctgaacttcaatcaaaacaacccggcattgcaacccactgtcaaatatattaaacacaagcgagccgtctcagacatagctc

SEQ ID NO: 4025 - DNA, 814 bp, Emericella nidulans
gcaccgcgtggttcaaagccatattgcgagttttggcgcttttttttatcgtttgacgaggcaaagggagcgtgtatgcatcctcgtaagtcagactcagacaaagaccaactagttattgaccagtcttctagaaggctctgttgtggatcttgaggccctggagagttcctccaacaatccggagacaagcaagtcctcgtcggactagtcactaactagactctaactagttgcagacatggataatgcaaaagagacaagcaatgaagaaagtggtaagacatttctcctttgtggttctggactagtctttgactagtcacagtcttaaacaaggaaaatgagcatgaaaataaggagaaaaggctgctgagcctgaggaagtacagggtgatggcagacatggtaggttaataccttattagttattgctagtcactgactagtcaataactagtctctgaataccttacaattactctgtttgtgcagctgaacagtggtaaggataatagtagtaagttattctagcttcagagttataggagactagatactaactagtattagttgcaactaacctggatctcagagactttggcctcaatctagaatctatctagttgtcaactagactatagtattattatcttttattttcctagtcctggaactagcttctaactagtctccctaatatatggctgtcttgtttttttttttttgtttccctaactggatatctagtccccttctaggttctgttaacctctcgggctctgatttagtttatacaaacctaggtagtttc

SEQ ID NO: 4026 - DNA, 2427 bp, Emericella nidulans
cacctataaaggaaatttctgagatgataagtaccaggttcgcagtcagagttgagacggccgtttatgaagtggaattcgtgaccttgggattcgagggcttggacgagaccgcctgttggatatcgattagtacgagacgcggatttcagggatttggtttttagtgtggtgtaccagcttgaatctcgaagatctgataaggccattagtattcggcttgataaggttacctgacatgatgtagattgcgttaaatgcccagagctggatggatgggtaaatagacgtacttccccgcttgtgctggcaccatgtagacagaggaaccgcatttcgacaacacagtaagcgactgaatctggacgcagcggtgaaaaaaaaaaagctatgtcgagtcttctcttgaaaggagaggcagtgtttatctttgttgcggttgttgtttaggatccgatgatgacatatcttgatacggagcggggtgggggaatacggcgtacgaccgcatgtagcacgggatttcgcttctgtataagaacattgcctggattcaaggctcattcatgacaaatcaacgcaaagtaattgatcatctcgccagtcatcatgttggaaaagaacatcagatgctatagttcagaattcagtatactagttgattacttgtttaggtagtggccaatctaacgttagcagacatggcggcctcagtgcctgaatgccttacgctcgccatcaaaggtcaccacggtcgagaagaaacattgtttccgaatttgaccttggagggattatatgatgacgaccaccccatcatatctctttgtatttgttctttcaggagtcaggacccagcattgaccttgttctgctgaggttcttacaccctccaattgctgcctgaatggttagggtttagccgaggagcctcctctcggggtacaatccacacaatcaccaaacagctacggtagagatgcgctcaacgcgaagaatcgtcttagaagaggcagctatcttgtagaatgtatcctgtagccagaaacgttgcgtagttgactcctccgtcttacgacgctgttcctgtaccttacctagcgagctcacggcccgctttcgccatctttccctctgcttctccccacacaaacttccatccgaacattcagactgcacctcaacgcatccatcctcacctcaccactcattcatcacccctccctctcaggtaggtcaatatgcccgttcttaattcaacgagcgatcgattgcctttcagatagcaccacaaaatctggacacgacctctgatcgtggaatggacatcgtctgacgtcgtgaaattccgagtcttggcacctttcccgaatcccacacccacagcacacaacctccgtccattcgagattcctggcactgttattgacgcttcgactcttgttagatttctccggactccgaatctaccgtcaagatggatcaggcaaagttggctagaatgcaggcgagcgtgcggatcggtatgtgattctttttcttctcttctgctggagtccgaatgtgcggtgcggttgcgattctttctcggtgcgaggagcgggaaaatcatattttggatcgattgatttaagcgatgtttggcatgtgatggatttggctggaactcgcggtattggagaatcagcactggatcgtcttggtttggattggtatctgctggggttgaatgaggttgaatcgaactgcaccgcaccgcattgttttcagcgaacggacttgataaattgctaaattctctgagaaaacgtccgctaacttgcttctacagggtatgttatcctggttttccctctatctccatatccgtcgccgatactcaaagcgccccggacgtccggaactcaattagaggaacaagcatactgacatcgaatagtggaaagggtactccccgccgcaaggtcaagaaggtccacaagacctccggcgccgacgacaagaagctccaggctaccctcaagaagatgaacgtccagcccattcaggccatcgaggaggtcaacatgttcaaggaggacgggaacgtcatccactttgccgctcctaagggtatctacccctccatatccacctcttaagactccatttgcataaggcgcctggagccaaatcaaacagaagaacgcgcactaactgttggttgcgaaattaaagtccacgcttccgtcccctccaacaccttcgccctctacggcaacggcgaagagaaggaactcaccgagctcgtccccggtatcctcaaccagcttggccccgacagcctagcctctctccgcaagctcgccgagtcttaccagaatatgcagaagaaccaggccggtgagaagaaggacgacgacgaggatgatatcccgatctggtgga

SEQ ID NO: 4027 - DNA, 4815 bp, Emericella nidulans
gccagcagttactcttgatcaggcgcatccgagcccccttatcgtcccatgctcccactgatgagttagaaaggtatccagctccctagaagatggatgaacctacattaagccggttgatcaacttcccggaccgagagtaaatatcaatgttcgacttgccggtctgagcgtcgcgaaaccttagaggtttactctcatctcgatacagagctatatgcaatcagcgatatccctctcgcggatctgtcttacacaccaatagcccctccgtacggagcgccggcaacaatgtaattctccagctcaacatcctcaccgaataccgagtggtataaagggacttttcggtagaagctagacccgagcctttcccagttagctagaggattagacggcgccatttattgacggttttatggaaaagcgacccaagtatggagtcgcagaatggatgttcctggagctctggctactgtcgttcggagctcacatggctgggctgcgctaacccgatttgatcacgcctatatcaggctgcccactgtccctaccccaacttctgcaactcacccgaccagcaagatggccagagactaatgtacaatcatgagcgtcatatcgatggataataatggataaccttcaaaatataagcgtgcttgcgcatgagttatcggatctcgaattggccctgctcatttgtttgggcgggcgggagcactgtttgattgaagctactgagggcaacatccatgacgtcgcggcagagcttgccttggtaagtaactacctcgttatctaggtatggaacttacaatcactcagatctgctcccatacgtatggtctcagatacgcggttgtggagttctctggtacaacttctctcgaggattttcacgatcaagtttgtacccactcgcgcagcgagccaggaactgtagcggatgtcgttatcgctaagaacttcgactatgcgtccgagcgtatacaactcgaggccgtggaggtacattgccgtcttagtgattacgccgacttctgctcacctataccagttaatgcggtcgagaaagcttaccacgtccagcggcgttcgtgaagccccaacgcacttcctgtttgttcccgttatagtccacgacttatcgcaggtgcggccgaaactcaacgttcacttagtgagtctcctctggcagcttgttatgctgtctaacgcgcccagaacgacactctcttcatatcccactttcacgactctgaaggcgggtatgtgtacttagaagatgatgactggatgtctgaaggccaggcctctatgtcctctgttgttcacaaaccaatcacgagagatagtcatcatacgagcatcgaccatgaagtatatccccgctaatctttgcacaacctaattactaacgtaccaagctcttagaagcactccacgacgcgagcaaaacggttactacaaccgcagagcttgttcagtaccaacaagacattgtggtctttctccgcctgagccgcgctgtcgcaggcggtatatctgcgcgatccagcattcagttcgcaaaactagcaaagtaggatatctaacgctccccacaagacgtctcttaggctgacgctatagactgctcgctgttattcacggcattgactacgtcacgccatcgatcgtagcgctggccgctaacaaggtctttcgtcatcgtatcgtggtggcacagccgaggatgatcgcagcttgcagtatgggagtgacttaagcgctgtggcaaaggtgttggagtatgcgactccggatacaatattagagagtgtgcttggcctggaagcgcctctgtaaccagcctattgggtattgctgagcagatgacgattcctaacgcccagcgacaatcatatatgagcgctatgtccaatatccacgatgctgtctatgccaatgactattcgccgtggccgacactaggtccgctaaatctcggccttaaaaacatgtctggcatcataaatccttcctccttctccccttcatcaccgtaactagcgcgctccctctccacaaccgccatgaccctcctccactcctccaacacagcctcaatctccatccgcgcatccccaacgagagcatccatcttgatatcattccggtcatacccgaacgggtcttcaagctgggatccaatcccctcgatcccatagagcgtaaagatcaccaagctaacaattgggattgtccaccaccccatgtcatcgaccatcgcaaatggcagcacacatccatacagcgcaaggacctgtttttggtgaatcaaatgggcgacagggatgggtgttagctttatcgtctccattttgccgaaagcgtccatgagcacgtttagctgcgcttgcatctggcttgctccaggcgcgttgaaccaccccctttccacaccgcgcttaataaatccatctacaaagaaagatagctggaaggggagacccagtccctctccctcatacccctggagatccggcggcaacaagcccgcataaacggggttgtaaaccgctgtcccgttctctctcaggtcactacccaacaaacccgggagaccactaccaaggccggcgaaattagaggcagaggcgccgccaaaatcagtctcgaaagctgcgccccattccgcgcggaggtggttcttaaccgcgaatgggatagcagttaggatgcggacagtacgctcaatgtcgtgtttctcagcgggcgttggtgggcgcgcggtgctgtaggcgttcgagaggatagtacggacgagattgcggattgtggtgtggatagttgtcatgccgttacggccgtcccagaagcggttgtacgaggtttggttgcggaagacgagcattaaaccaacgacgatggagagagatgggatcttttatgcaatgcattaacggccttggtcactttccttttttaaaaaggtaatacgtactatagaatttggcaacccaaccgtatcaaaaacatagcgatcaagccatacgacaaaggccgtgaagatggcgtggagaacgacttgaactaggatcgcaccgtgaattgcgcctttgatgaagcggaatactaggggccatctgtacatagagtcaacctctgcgacgtgataatccggtctctgtgctcaccttctgggcttgcgccgggtcgataagagatgcgggtgggtgcttgcgcgagagtgatgacgctcatgatggccgtgggaagagtgttgacgacttagtgtcggggtaggcagttcactgaaattcaacctcataatgtcagttcatttttcgcgacttgcaacgttactgacggaagaaagacaaacagcagagaggagagagaggcggagtagcggtcaacgggcgagtgcgatatgccgctaaatactgggccagagcagtgaattctcccaatatggtcgttatcttaaggtccagatattctggtaatattcaaatcattgattggatctgtcaacggtcatatggggtcatggtgttatttgacacaaatcagcgacaaataagaacagcagattaaccagccaatgtgcactgggcgcatgaatcaggaagtaccacaagccacacttgagcccggagcgcggggtaaccgcagcctaagagaatctgcgcactgtcgatcatgaatactggatcgagattggagggcgatgtctactagggtatcaagctattaccgtatccgtcgtgctagtatggaatacgcaaccgagcgagggacgggtgtagtctacagcctgccctgagtatcacttgccactatgcgggcaccgtggcaaagatgaagtcttatttggcagatggatgagactcatggatgatggttcgataggaattagtcttgtgaaacccgtaacatatcagtatctatcatttgtcccgtgcagtcgacattaagacggtgacggggcagaaggacgaggaattaagtgtagggaatgtccatcaaaaatggcttaatgattaggaaacgccagtccggcaggttccaggaaagatttgaagttaaacgaatgcgttgttggaatgactatgcaaaattgagaaccgggatgtgtcaatcgaacagaatcaaaggacgccgggtaccgctgatgtcaacgggtgttaagttagtcaaagcaaagccgtgaaggggtataatcaatcaagggcaagaaagagatgccgcaatgctaaatgctaagaaatgcaaccagcaaatggtagaaaagtaagtataaaaacgccatacagcacagacggccgattaaagttatgcttgcgatgcaaaataatgttgaagtcgagatctggtcagtgaccacccatgaagattcaaggtcttaaagcggacgagattctgacattgaggctcgaccatcgaacgccagaggaccagaatcgtttctgggggtcaacgggttttcgtctgaggattctgagcgcataggggtgtccacccgtagttcttcgtgtcttgacggaaccgcagtaggggactgagtcagtggctgcaagtcagagacattaatgttggagttcggcgcaaatgttatggtctctggagccggtcgtggcggatgctcatcggtgagatgcatgctctcaacattggcagcaagggttgtcggcggttaatttcgtcggtctgaccatcctcactagcaagcgaggcgctggaggtacggctagtttccggttgaggggagcatgtcggtataccgtactttattttgagccccttttctttgttattcgatgtccg

SEQ ID NO: 4028 - DNA, 1717 bp, Emericella nidulans
cataccccatctagcgcatatgtggccaagaaaccaagagctttccacgcaatgattgctcagccctttcaagctttgctattccaggatttctccctggcagattgctcgttcaacgaagaactggacggcgcatcgtgcgcatagtctgtaagagaaggaagtgagggaggagcctccatgcgagaactcttatgggagtctcttgaaagagaccgctctaccacctcgggctcgttactcaaattcacgacacgttgagaaactgacttcatcatcgaacttgcgcgcagcagtgctgatccggagactgagggggacagcgaacgtcccccgtctttcgagacactctccgcgcggcgccgtccactataaccgctctccatattatgcaaatcatcacccaatcgcgaccccatctgactgtcgtcgaaccgaacggagggcgcattcgatggatcttgcgaaccgctgggggtaattgaagcaccgctaatgggttgcacatgtcggatactagtcaaggtaccggcatttgcttattaagcggatggtcatagttactgtccttcttcgggagggcctcttcaatctatggggtaaccagccactgtcatgcctatgtccgctcgctcgcgacgatcgaatccgcgactgcccccttcgccttcctcttcgtcttcttctgacgctgtgcggcttcgccgcattcctccccgccttcacgcctcaggccaccatccgccaaccccgacgtgtcctccaacatcctccttttcctgatcggctttcgcctcgtcaacgccctcactgttcgaacctttttccaaccagatgaattctttcagtctctcgaacccgcctggaagatcgcctttggcacgaaccaggggccgtggataacctgggtgtgatccccgccaaagctcccgaccgcatatccgcggctgtttgctgacccattcgtgttcgcaggaatgggaacaccagctgagatcctcactgcatccgcttattttcgctgccgtgtacactgttgcagacctcgtcgcacgcactctcggactcacccccacatcacgcgctgaattgctcatcgccggtcccgggataacgcaggccgttattgcagccgtcggcgatttctatacttggaagctagctcggtatatttacggggacagaagtcatgagtcttgggcgacggtacggatccggtcaaacgctatagaggccgatgctgatcagctgcagcttgcattaaccgtcgtcagtccgtggcagtggttctgttccaccagaactctgtccaactgtctcgagactacgatcacaatcatcgctctgtatttgtggccgtggggatgggctataaactcgcggtccgtcaggcgtacaggtcaagataagagtgtcagcatttttaggtatgtctttagcatgataaagtgagcggcactgactccacggagattacgtcaatgtctcttgctggccgcgttcgcgtgtatcctacgcccgaccaacataataatctgggtaggcctagctagtgtggctttataccgaagtgcctggggagagaggcagactcttgctcgagaggctctaatctgcgggtgagtgcgccccaagtcgtgtgtttcacaagctcacgtctgcagttcctccgttctggcagtgtctactgttgttgatcgtttcttctacggattct

SEQ ID NO: 4029 - DNA, 6966 bp, Emericella nidulans
gcatggactatacattcgacttccctttccattagctgaaatgataacatggttgacattactgctgtcatttgtcaagttcatcatcgagcgacggcattcccgtcttttaaacccatgtcttatctgatcaaggcccataagccgaaggtatcaggactcgaatcagaaacgccgactgtgtgtagtgctcaagacatgcaatacgtaagacttaaggtcaatcgatcctggttcgaagcaatcttccgactactttgtcctacttttgttgaggcacttctctgaaggccttattcttgagagttgatatttgaagatttagacttcaaccggaccaccctggtcagtccagttcgtcttcccgagttgcacaagcaggctggatacgcagtacagcgtgtccatgatcaaatctgaaaattcttccgcttttcgaatacgcgggagaggttttactcctccgctagaaccattagagcattcagattcacaaagtaaagtccgaggtcactcaacatggagggtgtgataccactacatgatagcatgagccaagtaatccaatcggtagtgcggcggctcttgccaccatattccgccggtgccgcactaaaatgtagtggctggctcagttataatttgaggtatatatacaccgtataattgcactctaacatcaaagttgcccggttagctcagttggctagagcgtgggacttttaccgccttaatttgccggtgatcccaatgtcgggggttcgagccccccatcgggcgtttcctttttggtttttggctgcctgattagccagactggtttgatctgaagcttagtcgtgttcatcttgatcgcttatcgatttatccctgagtacaatgggcaataacctttctacggaccaggcataatgcatggtccccagtccgacgggaaggtagaataacctctatgcctttcccataggtgctggctacacagttgagcaagcacctttatccttcagtgccattttctctcggaagttgttactcttttctattcaaaatgaggcagtatttgtactctcggttaactctgatggttctaagtcgcttcggtacttttccgagcccgcggctggagcagtccgggagagcctttagtgcagtgcttggcccatttaacataagcatttcctgtgctttaacgatttgagtctgggacgtattgatagccgctgtgcagtacctaagacggaagcacgccgtattaggtagatcgagttcagttcatcgcgggtagtctagtataccgtgcactggatgattgataccgtctagaaatccgcaattcgttgtatatgttattggattgccactgaagttactcgtcaatacgaatatatataatattcgtagacataattttggccgtgtactataggtatttgcccagaattcataggcaactgccctagaaccgaccagctcgtatcgttaggtcatgtacccatcctctgtaaactatttttctatctattttttgtggttagctgggtgttaatacttccttgagcacacagactcgtattcgtacagactgccttcttgagaaccctgactaaaccaaggcccgtgcataggacacgcttggcgctttagaaatttccccaacaagcttcctcaacagcacgccatggttgcctagaaggcttgtgcagtatatgccgtaccgtatccgttgctcccctcaagacactcgccgccttaacggatacgtggtcatgctccaagccgagcagtttgcgcaatgccgctccgccgcacgcatcgcaaatcaagacacggctgcaaagcatgcaaacagcggagagtgaaggtacgtcacccagcccaggctagcgcttgctaagctgacgatattagtgcgatgaggcgcggccggtctgctccaactgcaggcagcgacaggaagactgcgaatatgtcaccgaggcctcgttcatctgggccggggacaacgctcctcgccgcggaagaagacgcgtcgcaccccctgatctgacgggagaagattcttctgccactccagagacaccctttcgtcttctggatagaccgttcagccatgagacccccttcctgaatccgccgctggatatgacccagctgaggttgcttgttaattggcagcacgagacctgccaattcttctcccgcaacacagagacccgagtggtatggcagatcaatcttgttgacgaagcgctcagggcaccgccccttatgcatggtatcctagcagtgtcagcgttgcaccttgctctttcaaatcagggacaagaacaagctttctggctgggtctcgccacggcgcataaaggccaggcgctgcaggcacttcgcgagggtctgaacaatgtcacccctgacaacgctcggtcgttgatggggttgtccgccttggttgtggcctatgcattcggctcggccctgacgagcgctgctggctcgggctcagactcggacaaaccttcactagctgcgctcaacaatgtcttcgtcctgtgccgtggtgtccaacagatcacaagagcagcttttgccttccttcgacagagtaatttcgcgccggtcttcagcacgggcgaacagtccgtcgccattccagatcatgtcaaagaacccctggactatctggatcatctgaacacagagtttttatatgctggagaccacgacgccgcaacgtacacgcttgtaaatgaggcgctgcgggtctctctggtcactccttctctcagcccaactcaatgacattgccggttgggtgggcaatcagggtgtctccaaagtatctagaatacctgcaagcgaaacgcccgtttgcactggttgtctacgcccattactgcgcgttcctccatctagcacgcgggaactgtttcttgcaaggatggggtcgatctgtactggaagatatattggagctgctggacgaggactggaaggcgtatatcaaatggcctatttctgaggtgcttggcgaaggtataatgctgtcccaatcggcgctacccttatcaacgacctgatattcttttacattcacctttaataagctatgtaaggttcggaaggtgtaccttcatagtaagccctagccacgaaaccgatcgctagttgagtatcccgcgcctattattaggcataggcccaagaactccagctacgagtgcacagcctgttggctggaaaaaaagggcaaaaaccgaccgtcgatcacggcccaccgaagctagttgtataattgtcctaatcgggacaatggtacgaatgcgaataatctcagcgaatgctctgtaaactaggtgtaattataaacctggccaaatgcataggcgaacaatggaatataggcagcacagttgattttttggagtgtcaagaacataaataaacagttcgtcgtcgatatctagatcgtatctaaagattgcctgaccacgacagaaaagttgttcaaaccttccaccaagtcttaccctttctcaaccatgctttcaagactcaacatcgctgcagagaacattcctcggacaaagctcaagctgcatgtcatcataggcgctttggtcctggtaacatttatcctcaccatcgcccgcgtagccgacagtggcactcctcgggccagaacgaatacatgggggtttgcggttgtaagtaacccgtcttctcagctccaattgcaataccaaaccctaacagtaactagtgcatcaagtcggctgtcttcatggcttaccaggtcttaactgcccacgtcgagagcctgaaacgatgggcaaatacaaaagtcaacgtcgtattaaatataatcgacacggttttctggtttgcgcttatcattatttcgatcatgggtactatggggtcgcgcagtgtcagtagtcgtgcgttaggggcgatcataattatcctggcgattgttttgtgtcctctagctgggtttctttcgtgggtctgtattcgtgagcgggggcactacaagcagtatggcgtcttgcctggcagagccggaaaaggagctggtgttgtctagccagtgataaactaggtagtctataaagataggtcacgggcaaaaaattgagagtgttatggtttatcgagcatggttgacatgacagcttgaaaccactagagtcttgaacagacaaagcccttaggccgttattctagtccaccctgcagctctgacatatatgactcgtagcggattcggaagtaggtcgcccgtaaccatctttctacttgaatttagtccataaatggtgtttcttaacagttatgatagaatacaggtaagaaatccagccatccatttcaaaagttcgtccgcccactattcgtcagcatctccagatcctcagcatgcttatacagcgcctgtttccccgacacaacattacttgggtgccaaacgtttaggattacacagcaaacaagcatgagagatgcatctaacacgtatataaacacctctttgctctgcagaaccccttccttcccctgaatgtactcggcaacgcgatacaaggatctgattaaaatcaggaagctgacgagatataagatcttgaggtatttgttccagggcacatctatgcccatatggtgcattggggtcgacaacattcggcggtggaaaatgatcgagacaacaatgaagatgctgaagaagagaatctggacgaagaggccgcccaggatcatattctcgcccatttcagcgcgatcttgggttttggcactggcttgcattccgcctccttgatatctcgtcaatactcggcccttgcagttatttcgacaagctaaaggtgatgagtatagacgtaccgccgctctgcataaagaaagaaattacatcacccgccacgaagatcttcgtaagccaattcggtctaataggcgacagtgaaccggcgttcagcgtgcggatgatacgtccgagtagcatgtagacggaagctgcgaagagcgctggacctaggaggatcaacaggctttgcccgatataagggtacatagtccagttgggggtctgggtcgcgctgatgaacctgcagaggtagccgatcgcttcgactggaaagcatcagtggctgccctcatttctgtacccattgaagggaaaacatacagatccctccgataatgaatggagtcatgtaccatgtccggttttgaatcgtttgccacatatgcacaactgtggtgagaccgaaaagggcagcgaagggaattgctgcgcccttggacggatcgtacatatagtactggtatcccatgatgagtagatgttagaaagatatttgactggaaaggccaatagatacgggccaggtcccgtttatgtattcgctgcatcgctcatgatgggtgggcaccaggtgcacaagggaagtcagatcggaatagaagcactccacccaggcataaccctactcggatctccatacgaagtacgaactgacggatgtccaagtcctgaaacccgaacccgaagtgcgtcccgtctactaaaaaaggtaccaaccaaattaaagcgagggttggatccacaagctagagtggcgccgcctgccggatcgggttatgggtacgagaacgagagattgaatgtatttgcctacaggaccatttttttgcagccagatacttgttggagagggatgttagcattgagccttcgaagttttatttaagctgcgctcgtcccagctctgtctgggcactttggcatcaactcaactctacccctcttctcaccctctgcaaagacactttaccatggaattcacgttctactattacactccctcagcggcagctggaggcatatttgctgggctattcggcgtctgtacaatcctacacctctaccaactgctccatacacggacctggttcatgatccctttcgctatcggcggtgcatgtaagagccttcccattgccagggacattgcaggactaactcaaccagtggaaaccgttgggtacataggccgtgtcctctcatctaccgaagcacccaactttacaaaaggcccgtatgtaatgcagagcgctctcattttgatcgcccccgcctttctggccgcgagcatatacatgacactcggccgaattattgcaatgctagatgcagagagatgctcaatcataccactgcggttcttgaccaagatatttgttgctggcgacgtgctctccttcctcatgcaggcctcaggtacagttctcttgaccattaaatacggacaaagctaacgagacaggcgctggaatcatggtcaaggatgagaagagcgcagatacaggcgagaagattatcgtcggcggtctgttcgtacagatcatcttttttgccttcttcgtcctcactgctgctgtcttcgaggtgcgaatggcaaggcaacgagtgccggtttctcttgaactgcagagcatctggcgtagacatatgatggccctctgcttcacgagtgtgctgatcctgattcgctcggtggttcgcgttgttgagtacctcatgggctacgattcgtacatgatgaagcaggaggttttcatctacgtgtttgacgcgctgctgatgtttattgttgtgttcactctgaactggatccatccgagcgagatcaattgtgctttgggtagaggaaggacgtatttctggcgcgtcgttgcaatccgcaagttcgctacaccgacggtggaaatggaggagggaaggctgtccagtcataaataagtcatggtttagatacgatttacgaaatataaagtgattttaatccccagatagttcaaactattacatatccatcaagaccggccctgatcggtgtctcatattggtctggcaataggaaccctaactcagtgacattgtatagcgttagaccattg

SEQ ID NO: 4030 - DNA, 3840 bp, Emericella nidulans
ctcatattttctccttccggagcagtttgctgcatatagaagacgtggcgtcacgtcatcaaccactggtgcaggttgacgctgctgcagcccgatcgaagctaggttccgctctactcttgtgcatatctcgcaatctcggcggcgtatgtactccgactcgggatggacgggtcctttgcaatcgtcagcagtgcttaaatgccactccagagccgactcgaggaggtcggggtaccattgctgtctcggttcgaggctgcagccagaaaacaattaaaggccaaattgatttgggctatagaggagccttgatatttgatgtttcaatggcgaggaagtaaattaggggtatatatctgatcgggagtgcatggatcgccagaggcgtgcgctagacggactaatggcgcgttaagctccctctgcagtagcctgcccctgtctattgttttagcccatattctaatatacctgacgatccccctcattttcccctcgatgtaacctgccccgacctctggtctttctgcgaatgtggggtttataatcaatttctcatgcatggaatgctacgttcctgcccttcctgtgtgcgaaatcccaattacaaccgccacaacacacctctgatacgattctacactgccctccaaagacagttgaactggcccctgacctgcctattgccatgatatggactttgccactaaagccctcggtgctcggggttgccgttgccgctgggctgctgctatgtccctccacggacgcgcgaaaactccgcagcgagcaaattgatttcgatatccttgatttcatcgatccttttattggtaccgcaaatggaggtattcacgcccacgtgttctttaagagaatctaaaaataatcgcgtctctaggacattcgttcgccggtgcgaccttgccttttggtacgtccaccaaatgatagaatggccatcgactaatagagatgaaggtatggtcaaggcagtcgccgacacgcagggcgagaaccaaggagggttcgcttatgacaccacgcacgtaacagggttctctcacactcatgattctggtacagggggtgtaggtttacctctagcttgctccgcgcctcacaatgctgaaacaatggatgaacgacaggcctcctcaatgggaaacttccctttgttcgtgcaccccagctgcccggatgacgatattgcaaattgctcctggacttcttcagacagagctgtaccctggaaccgcgactctcctggccctgaagcgcgacccgggtacttcgctatatcactagagaatggcttgcatgccgacatgaccgtgaccaaccgctcggcactctatcaatttcagttccccgacggcacggggacgagtccggtggtttttctcgacattatcgatcttccacagtcgaggaatcatgggactgcttgggttgatcccgagacaggaagactgactgccagtggcaacttcaatcctagcttcggggaggggacatataatatccatgtctgtgttgacttccacggcgccgaaattcgtgacaccgggtcgtggacgaacaggagcgctgacttaggacaaagcactgtgtcagttacggccaactcatcgtatccggcgagtcaatactctgcaggaacttttgtcaggttcaactctgtatctgctgacgatgtgatatctgctcgcgttggagtaagtttcatgagcgtggaacaggcttgctcgaacggcgaaaaggagcagccggatttcgacttcgagcaaacacgagcagccgctgagagtgcgtggagaaagaaaatggaagtgattactattgacgctgaaggcgcgtcaacagagctccaaaaagtgttctggagtggcgcgtaccgcgccatgatcagcccgcaggattatacaggtgaaaacccgctgtgggagagcgatgagccctactatgacagtttttattggtgagcctctccacctttccaatctggtcctttctctgatagcaagggcagtatatgggattccttccgtggcatccaccagcttctcactctgatcgatccgatatcccagtcacgaatgatacgaagtctagtcgacatctaccgccatgaaggttacctccctgattgccggatgtctctctgcaagggctggacacagggtggctcgaacgcagacgtgctgattgcagaggcctacttgaaaggcgtcatcgacgtcaactgggccactgcctacgaagcaattgtgaaagacgcagaaatcgaaccctacaactggaatgttgaagggcgtggcggtctcaggagctggaagaatcttgggtacattccgaagaacgataccgatcccggtactgaagggctacgcacaaggagcgtgtcaagaacggtcgagtatgcttacaatgatttctgtatagcgctcatggcggacaagctggggcgcgcacatgaccgggataagtacctggaacggtcaggaaactggcgaaacctatggaaagaagaccagtcctctgctatcaacggggtcgatacaggcttcaccggcttcctccagccgcgtctggaagacgggtcctgggcgtaccaggaccccatcttttgcagcccgctattgaacttcacgtcctgctatctgaatgccgacgggcacgagacttatgagggtagttgctggctttataccttgtgcgtcccttcccctcctgccacccaggtgtgctctgctgattgatttgtattgcttcagttttgttccgcaggatatggccacgctcatcacaaccctcggtggccgcgaagcatttacctcccgcctgtcctacttgcatgattccgcggtcctgtatctgggcgacgagcaggcctttttgacggtttatcaataccactacgggggcgccccggtctgtccgccaagcaggcacacagttacatcccgtcgcagttcaacacctccgtctctggcatcccctgtaacgacgacagcggcgcaatgggctcattcgccgtgctagctatgcttggcctattccccgtccacggacaggatgtatacctgatcacgccgcctttctttagagagattagtattcgaaacgatgtgacggggaagatcgcaacagtaaaggcaaagggtcttgatgcaggatacgaaaacatctacattcagagcgtaaagagggacggcaattcatggacgaggaattggattggacacgatttcttcgccgagggggggttattggagatagtggttgggaaggaggagagcgactgggggacgaggcttgaagatctgccgcctagtgtgtcggaatatgcgtaagtcgttggctagcggtacctaagcggcaccaagcagcacccaagtggttgtcagcaatcagatcactttccgatgcacatgaccgtcccaccaggggtctgacgtatacattcatttttttaatgaccggagaaagtccgtagagactcaaccctcttggcgtccctgactcgctcaggtccctgtgggggctccaatacctataatagggaccccgcacgagctccaattcgcattctacaacgcagcttttcaccaaatcttttcttattgccttcataagtaatagattgcctgggctcactagactcgccagacttgctagacttgccagacttctaaattagagctgaagaaatggccttcgcccgcagactcgccatcctgcccggcggcctcggtgcgctctcccttgcccgccgtttcttcttttaaccctcaagatttcaatgaaacaggcttatactgacagagattttag

SEQ ID NO: 4031 - DNA, 5227 bp, Emericella nidulans
tggactaatgggggaaatctccgtggctccagctttagcttatcgaggattgtctgatcaagctagtaagaagggtcgctttggacctgtcgtaaatgagttgccacttcatcatacgtagatggaactgccatttttgcggaagatgacttttgaatgctgagagctggaagtgagatgtgagaatcggcaatgttggcggggaagcttctcatgcaaacaaagcaaactcggccgacctgggccccctcttgagccggggagagagcttatcaaccatgaccaccaaactatctgataacaattagctggccaactacggccttaatcgcacctttaaacaacacgcatacacacacgcaagatgccagacgaagccatatccattctgtcccaaaagtcatcagactccggtctccacatccagctacatccgctcgcgcttctcacaatttccgaccatattacccggcatgctgcacggtcacagcaaggacccattgttgggggcctgctaggccaacataatgggcgtgagataacagtcgaacatggctttgagtgtgtggtggaaataggtccaaacggcgaacgtcagctgcccaatgagtggttcgttgaccgagtgaaacaatgtacgaaaacgtacgccgacaactacaaacgcagtcgctgaccaaacgcagtcaaggatgtacacaaggtaccagctctagaccttatcggatggtggtcgacagctcctccctccgggccgacaacagcacatctgccgattcatcgccagattctccaaaatcacaacgagtccgcagtatttctcacgttccatccatcccaagtccagggagcgtcacaatctcaagggaagctgccgctgaccatctacgagagcgtctacgagggagagagtgtcacggagaatgggaaagccatgcaggtggacggcgaggaacagctgttgaatatccggttcagggaactaccatacactattgagactggagaggcggagatgattggaatcgatacagtggctcgtacggcaagaaatgcagctgctactgaaacctcaactgtagctgcaccttcttctcaaatagactctgataagcaggagcagcagccagcaaacaccgaccttctctcaccagaagaagaagaacgtaagtgcaatccgcaattggcacacgacacgggctaacaatcaccactagtgatcgcctctctcaacacacgcctgaacgccatccggaccctggagtcccgaatatccctcatcaagtcctatttgtcaagcatatctccgtcctcggaagaaggtcagaaagattccgcaacaaaaccggaccacaccatcctcagagatattaactctcttttgtcaaatctctctctcctcactccacatgaacaaagcgctttctcagcggagactcttgcacaaaacaacgatgttagccttgtagccttgctcggccaactcagccaaagtgtcaatgggatgagggaggttggcaagcgcacggcgattgtgaatagtgtaaggcggaaccgaaagcaattgggggcccagagccgatacgaggatgatattctgggccgggatggcgtggcactcggataatgacttagcttattaagaccaaccacaagaatatatggtgatttcgagggttattctatgcgatgcttgtccgaatagtgctcgttctcgtcatctagtaggctagggaggagtaaaaagatgcttggttttttgtgaaggtgtaaatcaaacaaaagaataaaaagactgtatcaaaccaatgattatctatggatttgtcttgcatagctagctacgtttacactcgacagtcgcctatgctgatttcctacgcagaagttaagcccctaggtcttgccgggcatatccgatgcaaagttagggctttttgtcagataccctatctacgccagatgctatattcagctaccatattcacacggagtgcgttactcattcctcggtaagatgaaaggggccctcagagcagtcgtcgtgcttcatacagtttcaacaagggtagggggaaatagccgttacgtcagcgtctgtgcgataatccaagacctgcagccacaaattgacgaaacgaacgaattgcaattcatcgggcccaaggttggcattgtactcgactatcataagaggtgtttctaattgtggctttggagtaataagagctgtcatgctaccatccttgtgattacagctagatatacaagtctatatcgttccagttcatgacataaaagaggacgcctaaaccatatcatacatgcagggtattgttctagtaacatcaacattgaaacagagctttagagaaatggcacgtaaacaaagaaatgcaataataagacaagcacgccagcgactttaagtattgcttaacgacgtccatgagggtcgtatcttgtatgtgggggttgataagattccggtagcgggattggaggttgctcttgaagttcagtggatgaggggaagcgggcgtgatcattttgacggccagattgaggaggataatagctgccgtctgaatccgagggagacctagatgggatgtaatgtacctcttcgaatggggatatcgggcgagaagagtgcgagtgtaggtctgattctaccaggtaatcgtgatctgatctggtgttggcatgatagtgctgattacggtcgtcctgatagtaatgtggaggtgccgatcctacgtctcctaggtcgctagtggatgggttttgctgggcgtgggacaggagcacctctccttcttcatctgcttgatgtccgtagcggtttgaagcagcgtcggcctttaaagcaccagagcccccgtagctggtatcagctagacgttgtgtgcttcccgcttggtcgaggccggcaggctcggttgaaagctggtagctgggatccaacattctcttctttcgaccaacgaacaaccagcgcatactgcgacccacagctttgaggaggtcaagaggattgagagcgtctagaagagcgcccattccccagcgtccgccttgataggtgcgcttcccattgccgtacatgtcggtgacctcatctctttggaatccgattgcgtacggtttccacggaaatgaccaaagatgcagtacggcgaagagggccatttcaacgctgatgattagttcggcaagcacgaccttgagatcaggggctgcgatttttttcgacgatttgataacgccagcggagtataagaacgatatcaaactctaaaaactgaatcaacaatggtagttcgggaacatacagatttgacacttaccgattgccaaaatgacaggaagatgacgagtttgatcgacgcaaccttcaagaaaggcttgtgctcgctgatttcgtccttgatctgtatgtaaaattggatgagacagtacattgcaatagtaacggcaacacactcaatggccagcaccttgataatgtcagcacccattcacgaagcttccgcgcggcacctacccagatatgagagaaagccggattgagggacgactcgcaatataaatcaaacttttgcgtgatgactgccacaatggtcatcagtacgcgaagaaaacagtactgaaagacgccaacccaaatgacctaacaaaccatgtcagcacctccaatcgcgcgcgcacaatgtctcctggcgtccctacattaaaccacgtcaaaccactccgcggaaccctccatatcccgttcttcccacccgagcatttctgaagccaagttagaggccaaacccagtttttcggttgtatcccgcggaagtaatctttctggctgtgcagatcgggcgcgatataatggcagagcagcgcaaagaaagccgagattgtgaacgcttcgtagcagtcgcccagtacactgtagtagacggcatgtttgtagtagtaggtgctgagccaggagacgagggcatagattggtatcatgagcaggatccggatgatactaaaacaaggcaaggacatggttagcatcggaaaataaacgaggcggacgaaaaacggtcggtgcacgtactgccgttgttcgacgggtttgctgtaatgggtggcatgtcgcataataaggtagaaagatataaggccggcgatgatggcgaagacgccaaccacaataacacagagttcgtgaaaagtaagtccattatcccataagtcaatctcatggactatgatcgacacgtatatcagttagcgatcacatcgagtcgatcatacaacaaaacacaacaatgcaagcatactggtctcatcctcctccgtggtattgcagaccggccaacccattttcgctgtatttgaaacccctcaaaaatgaggtgcgagaaaaagtgcacggaggaaggctgaagcgttcaagcgcaactattttgggccgcccgtggagtcagcggagtcgcggtagatcaacccctggaaccacgcgacggctctggatttgcagtgtttgcttgtcgagggcttgtcctcggttcttgagcactggattcggcgagttcaaaagtctgagaaaatgtaaatgagaagagatggtgcccagttcgcgcgggatggagcctgagagaggctcacgttccccaacccgtcacaaactactcagaggcccctcagaagcccaaaaggggaagttgattataatgacctggaggtggctgaagaacccttgagttagtgaaacaccgaatctatatttagaatgtctgaagactgaaggactcaatttcaactatttatatagcgtcggaataaataaattgtgaatataaaaggctgttagtcgtcaatctcatcgtcataccctcataaggcagcagcaaaaaaacaagatcgctaagctttggacaagctggctgacacccactctaaccacgcacgcgttcacctgccaagccatgcatcctggtcgcctgcacagccatgcaacgttggtagttctagccatatagttgcagtaaaaggtacacactggttctccttcagcccccgaatttctcttattatagtacagtaaagcagagcaaaaaaaaccccccgcagtaacatgcaatgtggcctactaataacaatgttaaagcaccgaatagggagacctgccatagatttttaatcccagtcccttctatctcttcgcgagtcaacaaat

SEQ ID NO: 4032 - DNA, 4100 bp, Emericella nidulans
gtataaagttggtaataaggtctggcttgacctgtataatatctagatagactatcctagcaagaagcttgatacacagcatgctaagtttactattcttgagaaaattaggtcttatgtctactagttggatacccctgcagggatctataatatcttctatgtatccctactgcaccctgctgctaatgacctgtttcctagtcagcagaataatgactatcaaccaccaccagttcttgttgacggcgaaacagaatatcaggtggaggagatccttgacgaacgcatatgacgagttggacgaggccaacggagggagtttcttgttaaatggactggatatcagcgtcctacatgggaaccagcccagaaccttgaagactcagcagcgttagacaagtgggaagcccgcagcgatcaccagcggcccgtcccaactacaccatctcaacgtcggaagaagggggggagtaatgtagcgggccctgcccggaagtagtgctcgaggccgtcgacggccactcgcttcacgtgacctttccgtcacatgacccatcggtaagctggcgcatatctagatgtttctatcctgtcgatcttgtttcttctcttttcttctttcttcagcgtgttcttctgtgatgatcctacctgtaggataattaatggcattagcccgtaacacacaggttcctgattggagactttatgcacataaattcttggcgggtaacccgcgggttccggctcttaccttggaccctcacgggttgtcatgtttctacacccagttttccatcccaacaaccctagtgtaaacccagtgtaatcaaatgtagatgattaggaaagcggaagcaactgataagtaataacagcagaatgaaggagttaaatttcgctgacgatagtgctacagaagagtggccgaagaaatgatatagggatagttaaggtctggcggatatatatatagacgggacaataactgagatgatgggcaaaccatgacctgaattgagaagtcgaattctgcagcgacggtatgaaaaaaaaaaaaatccccctttagcttctctgttattagttgtcatttattggttgaattgatctagcagatggatattgtaaattctcctttatgttggcaatctttgatgtagttcgggcgggagaagtcctcaggcataaaatatcaatgcctgataaggtctttgataggcaaaatcactggcagcctgcttaggtaaggcggaatgtcagagcacttgtaatcaccattacacaatcaccattacatttacaggacaccattccaggttacagtccactgggagtgctccttatcaactgagggtactgcggtcgctgggatggctggccgttcagcttcagtgacgcttttagcgccggtacgtatctgccatgccgtactctacgcaaaagaccaaaacagagctagtctagaacccttactgcagcatgagagctgatgttctctgacttgaagagcgaatacccctggccgaacgcccacggccaagatgcagccccaacttggcattattgaccgacgctgtctgcctcagcgctagcacctcgcacaatgtatcactaggctacattagcttcgactgcagggacctaccagacaagaacactgatcttttacagagacgggatgccccgcctaaggagcccattgtcccgcacgagatagcgtccagtgcggaagacatgagtacgccatgatagacattcgacagtttacagtgacgatagcagtacagcaccggaatgagacgtctttttttttagctggaagacaacctaatttctcagccgcaatgccgtctacgctgcacatggtgaaagaacgtctcgtttggccgagacaacgcttggtgtgaagacagccaaaccgacaacgagatcttccagccctagacatgtcggaggacggtgggcaatgtcatctttgactcaacgcggcgcttaacgaggataactaaattaaggcttatcgattcatctgaagcagacaaggagagagctagagggaatgtgggctatctagagcggtggaggcgacctggacaaaggtgaaggagcttttgctaacctagcgggatgctgtgaagtggacagatacgccgtacacaatactgatggatgatgccgaggcgtttgatgagagtataaggtggcagggaagaacctgttgaagtatgatccaaagcgtttatctgagtctgagactgggccgaagcagctgttgatgatgtcctggctgaggatcgtattaagctgtatcatctgtatcgtcaggatcaatggtaattaaatcggcgtcgagttatctggagccagctaaagtagttggaagtacagctctcgatatagcgaggcaaattactgtatactgagcttcgcgaaacaattcaaggcagcattgggtatttttaacactatctagttcatatcgttgtcaagctcagcatttgatttcccaccatccctcaagggttttggtttagtggttcaatagaagcctccatgaagatctctggtcctattttcgcattgactgtcgacaataaaatatcatagcaattcaattcctagcttgatgaaaatgaacatatcagcataaatttaattcttgttccctctggttgtggcctgcctatatgacataccgtaatcggaagactgcaccttgctgcgataggtatagcgaacttaagcgttgaacacccaataccagagcctctgcgaagaacaccggccacaacgatgatgctcatggtctacaatgaaccaactgctagtgataaaaagccctttcttggatccacagccaaaccaagtcgacccaagtcccgtgcttcgacgacaatgtcaaaacccttctcgagacgagccaatcgagtaggcggaggtcaaatgagcgacagcgcgtggcgattggttatagacgaagtggtgggacttctgcgcctatttcgggttgttcgagatacgaaggccttgcgcttattggagtagctgctccattcagtcgctatcgtcatggaaataacaaacaatttaaggcgagatgaggaaggagagaaaatgacttatgtttgtgcttaggattgtccccgtttggttggccttccccaggacaagtatcgtctatgatctatcgttgcgtttagtggactctggccaaccacaggctgaactcaataagcgccgctagacaaatcttagggtttgacaggttaatgagaaatagttttacaatgcgcaaaggagcggatgggattcgcgactaataaagccttctggactaaagcccctagtcttatcatacatttattctcatttccaaagattggacgaatgttgatacattccacacaagaatccaagcaaacataagatagaggtatttgtaggtcgatagcaggaatttaggcatggacagaagtaatgacagacgtcttattgaactcttgggccgacccaacctatgatatatggatgggatagcttcggtatatgtagccgtatcaagtgatacagtccctcgtaaacacggtgtcaccttatagccttgctcctgcggcccggggcagtgctctaatataacagttagctcatcttgcacatcaaggaagcgtactgatacttactcgtccactaggcataacatctgtaagagtcaatggcaatccaggatcgggcgttgcatgtctgtccagcatagcaatagtacgtggcgccaaatggattaccacaagcagtactgcaaaaatcacaaacggactgttcctgggggcgggacttccacaactgcataggttcttggtcttgaagccacttaacatggcgcaaccgttgccagttggctgggttcccaagtctttaccattacattccaaccatattacaattgagatttgtcacccctggcaccacgcaaacaagacaaatagtctgggctcaaatctgcatcttgttggaaaggtgattattttctgggttaggcctccggcagtatataaacttgctgggagaaatccaataggagatggacaatttcaacc

SEQ ID NO: 4033 - DNA, 4664 bp, Emericella nidulans
tcttaagagtgatcaaggtattaaaagtaaaatacaattgagaatatccaggtccctccatcccttgagagcaagcaggtttatatccttgagcgagccgcaaacgtaagccctctgcaattcaccatcctactccaaatgtcccaaacgagtcccaaatgggtaataataaaaagaaaataaataaaaagaagcaggaataaaagaaaaataaaaatgaaataaatttctagaagcccgcgtgactgacctcgaccaacaattgcagattttccttcatcgtgaagtcaatcgtcgataatcccagctggcgaccagcctagtggccatggaacgccgcccagatcttagacgcctccctcccggcccgcgagtcgtgggactcagatttccgcagctgaccagttgtggagaaaagtaaaaggatgaactgcgctggattactggggaactgtggccaggggggcagcggtgaataggctaccaaaggcctcgaaggggctgaaggcagggaaagcagctcaggtgagcatcgtgagattggatgctggcgtcgcattaccgaagacggcaggccaggtgtctgatcggtcggtcgagacatcgctgcccagttggcaggttctagttccaccagatatcaaacgggtatcccgagatagccagtacggtacctgtggggaattctccaatatcggttctcgacatatatgggttctctattttcaattctcaatcaccgggcttggccagctcgtaagccaccgtctggccctggggtagggctgatttcttgattttgaaagatatcaacacttcagtatgtcaccgttaccgtatgtcatcaatctggtgggcagatttggctagcttctgctcgcgctggtagggattgcttccaatgagcgttctcggcagagagtgattgtgtcattcttcaatctgtccagagcttgtatcgtctgtcatgtcgagcggagtcacccagcctccaaatcggtgtcgcttccgtccaaccaggaagacgagagttttgagcccaaagtgaacctgccttagtgaaaaatgtgattgaacccttgtaggcttggcaggtcgctgttgcatcatcttgactctctacctctagccacggccttggaacatggctttggcgattctcaagggccctggggtaatgttcggttatcgcattcatcgtcaccatggatttcaagccgagtaaaaaaagcttcgccgcccacagaaatcgcatcccggcggccttcccgaacggattgctcggatttcccaaagcggaaatccggtttccactctaggtcagcagaatgagataggcaatattctagaactctgcaggtatactggcaattgtcccattacatgaatgataatcgtcaagaactccatgaaaatgcctatcgttaatcatgcctaatgaatgttcaccgcccatgcttgcattgccagaaatgctccataaactcctaatttcgcgctgtcccgaagtccagtttcatcagcaatcggtcgactcctgcagccttgcgcggcctaaacgagcagccgttcatatgaccgaccatccagctccctgtggtgttcgctgtcggttggaacatcatccgcccctcctgtgtccgactgtcgtcgatatcctgtaagcgtgcaatgacctcgttgattcctctttcggtgtctgctcgtgccgctcgaagtgcgttccatacaccgcgctcctcgcttgcgtagtctaccaatgcatcaaccacgccctcgtcggactccaaatccatattgcgctgaataatctccaatcggatcacaagagcgatgaaatgatcgattctggccagcagatctcgaagagctttggtgaaaggtgtgtcgttgagaaagagtgactgtaccagggaatataggtactgtcgatgggcagctgtgagggcttctgggtcgtgccgtctgggggcggcgcctggctcgtcctcagattgctcgttcgttgcaagcccgattcgtcgtgccttcgaagaggttgcagttcctggtcgcgaggtcgacgggggactatcagacacccctgcttctatccagtctctaaaatgctgccatgattcattgatgacttctccttggaaataactccctatttccgatagcacaaacagggacgcgctgcctgtcgcccagatggccctcatcttgctagtccttgcgttttcgcgttgccggcccatctggagtctactctgcccaaatcggctattactccggggtggaccccagggcgatgggtgactgcgacgtagtggtgagtgtttccagaggtctcccaagcgaatttgggctcgtctgatgcccagcagatacgagtgcattttcgagtagattgagatgtcggccgctgaaaggaagaggtctagaggagggcgcacgtgcactgaaagtgaagtcgaggtaggaaagagaagatcgtcaaatggggtattggaggtttccgctactgggtcggcagcagcggcgcctgagaaccctgggttctgtccgtggtctctgggcttgagagatagccgaacaagctccctggcaagatctagctcatcatcgacggggtcttcttcgttctgtaaagagtacaactccgcccaagtcttggttagcgtggtcgccacgtcaccctccttgatagcgaggccgtcgacactattcgatacatgcctcgcactagatgactctggacctcgttggcgttcccgtaaccgggcatcggcatgcaatacaagggccgtagcaaattcaccacgttgtaaaagtaaaaagttgtgcaggagagaaaggatttccagaattttaggaagagggagtagcttggagagagtgctctgcgacagggatgttctgatggagtcaacggtgttagacaactccgaggcggatatgggtgacttcaatccagcgagatgactgatgtgttcgctctgtagtgtaaccggtgatgttaaaagtccgtccggtgtatgtccggtaggactccttttagcacgcataaggttcagggttttgcctatgaacaaaatcgacgctgcggtatgtgaggagacaaattgaggaattagctgtgtatggatggtaaactgaacggttgaaacaggtccttcattctcttttgtgtcggcttcttgaatgaaaaaatcacccttcccaagaataggaaggttgccgtatagcagccatgtagacagctgcctcatccatgcggtttccgcagccccgatcagatcaagtactatctcctcgatgtcgatatatccggtgtgcgactccctccgaagatgatcaatcaagccagcgcctgtgcagctttgagtgtgtttcttcttctcagtcggtaatatgaagcgcacaacctcccatagccattccaaccgtcgtgtccacggagcgaactcgccgacaaccgtcgctaacgggactattccgtaacccccaacataaccactatcctcaaccaaaatggccttctccacttctagtatcttcttttggaacgcccccagatggtgacttcggatcgcagtggaaacggcacggcagatgacagaggcatgggtggaacaaatcaaagccgtatgagcttgaagccgggcatggagacggctcagacgggcgagagaggcaaggagggctttttctgggggcgaaaggagcggaaaagattcctcagagacggcatcttcctctgtttggaagctaaagagagacgactgctgaccggagagcgataggaggatttcatggagcatcctggctgaagttccctaatacgactaggttagttcggagcagcgtccggcgtagtactatcacaactcacactaagcggaatggctgatctttactctgcgctgacccacgacgttgccagtacaaaagcccactttcaaggatcttgagtcgacacatgtaaaagagtcaaaaagaacaatttctatcagacggggcttgtattaccggggtgccgagcctttcggggttgcgaccacgtgagaattattccaaaagggatcggggttagggagcaattttctggcttccacgaaagtggcgctgtttgcgacattgggcatagggtgaaatatattgccgcagacttaattttatagggcgattatgcggacctatctgatcccagacgccttcttttttccttgtatatctaatctctttttttttgtccctgtcatggaaacccgttttgcccataccttatcataacttcttttatttatatctccagatcattattgaactataacttgtctttaacccaacctactcccttcaattaccttgatgttgtattcttttaacatctgcctccttatattaaccaattaaagtcatttctaatcaatgatatattgcctttttcattacctccagattgttatcgctattaatctattaatatctgcttttttggtccctaccttattactgttataccattacttttctcagatgtcatttacactatgtgttatttatcttccaccaaatttcattcataaatatctcttattctcttatcttactttatctattatcattcatattcctactaatatccttttttcgctatattacctcctctctttctc

SEQ ID NO: 4034 - DNA, 1347 bp, Emericella nidulans
accataacgggctaacaatctgctacaggacccggttgtgctaaaaattgcgagagcgaagcttaagactctttctcagatactgtattcaaaccagttccatctactgtggtactgtgatatgctgatttgtgctacagactaagatggaacctcaggtgggtgaggtattcaagagcatacatcggcgcatgatgtacatagatcttggagggattggcgccactccacacgagatgggggagatatatgccataaagactagggctaaggttgatggatatagctggatgccaattaaggtttttactggggatgacgattagttgcaatccagaagcttgggtgtacgggtggatagattgctttttgacctagttgaatgttagaaatcattttcttgaacatatgggttactttagcttgtagcatgaaacatgttccagtactgatgctgatactggcatacttggcaaagtaaataatatcatttcacgatcaataatagcaagaacccaacattcatcatagaagtaatcattttagcacagtcacgtagatcatgaaaagcccctagtaagtcgcgttcatcctcatcgcaatatactcgctactcgtgatcggttcatacaacttcggcctcccttccccgtgacagttcggtagacattcaatcatcttatctcgatcgggactaataaagtacggaatggagtaccttggtctcgtcatccgccttttcttctccacggtactcccatcctcaacatctaccaaaggtggtgccctcacccgatgcatcgtcgacttcaattcatgattactccagcgcatgagcaagtcgccaatattgacgacggctgttccggggatatacggtgcgggattgaacttgttcttctcatgaatatcctcaacctccaatccgcccacctcatcctggaagagaatcgtcatagtgccgaaatctgtatgcgctgcgatccgctcggccttgccagctcgcagcagttcctcctccactgctgggtaatgcagtagacggcactggttcgttcgttcagaatggtactttaagaagaagttctcatcgaggcccatgcccaaagcaatgagtcgcagcatgagcgtctcgagatctgaacaaatgttgaagaatttagcaaaaaaaccgcggaatccagggagcgattcttcagggatccagatgttgcgcattttagtgtcgttctcgttgcctatctcaaatgattctttcacgtccggcgtcttgcgtcgttcgacgatcgagtccgagtcgaacaccatctgaacgacttttcgcgtcctatcccgctgaaccgcggt

SEQ ID NO: 4035 - DNA, 5308 bp, Emericella nidulans
cttttcacgggctgacggcgcttgctcggcgaacagcgtatggttccaccggacgctgtcgaaggcagtatctagaaaatggggtcgtgtttcagttcagaatcagcaggagatgtggaacagaagaagagaagccaggcaatcgaccggaaactagaagaggactcaaggcgtctacggcgagagtgcaagatcctgctactcggtacgctacaggtcccttcattttcccggcaatcggcctgcgataggtcgcaaggtcttctcaaaagctaacctgcccttcttgataggatctggagaaagcggtaaatcaacgattgtgaagcagatgaaaatcattcatcagaacggatatacggtcgaagagctggcgctgtatcgactcacagtctacaaaaatctccttgaatgcgcgaaagctttaataggagcctaccaccagtttaacctcgaacctacaagccagaaagtccgcgacaatatcgagtttctcgccaattacaacattgacccagatcccaatatacctctagatcccgcggtaggggatgccataacctatatctggaatgatccgtgcacatcaacagcactagaaagacagaatgagttctacttgatggattcggcgccttagtgaggattcctcgagcttgtccttgtataagcatgctgaacaagttttagtttctttgaggaagcgaagcgcataacgtcaccagattatataccaaacgttaatgatgtgctgcgcgcaagaaccaagacgacgggtatctatgagacacgctttacgatgggccaattaagcattcagtaaggaattcccctgccgggagttattgatcactactaataatttgctacagcatgtttgaatgttggcggccaacgcagcgagaggaaaaagtggattcactgtttctaaaatgtcacgtctattatcttctgcgtggcattaagcgaatacgatcaagtactattggaagagggaaaccaggtaggttgcgccctcaacagtgttttggctcacgctaaacttctggcagaaccgaatgatggagagtctggtactctttgactccgtcgtcaactctcgatggttcatgcgaacaagtatcatccttttcctgaacaaggtggatcttttccgacaaaagttacctcgctccccgttgagcaactactttccagattactcagggggcaacgatgtgaaccgagccgcgaaatatctcctctggaggtttaatcaggtcaacagggcgcacctgaacttataccctcagtaagtcttacgcgaatgacctttccccaattcctggataatctaataatctggaaaagcttgacacaagctaccgatacaacgaatatccgactagtatttgccgccgtaaaggagaccattctgcaaaatgctttgaaagactcggggatcctgtaaacgacaactgagtcgccttagcctcattgagcccgacatggctccatcataccgaacgaaaccacacacctgcgtccattccacatttcaccctgatggcttcatgctcacatttgattcctctcttttttccttgttctattccccttcctacgttttttggcggagagttttcggcgtaacggcattgatgtttttcaattacccatttctttggcgccgggttgggtcatgttcattcgtacttctagcatggtggttccctttcctctgcctgtctcctaattccccaccttaatcattctgagatcgggcgggtgcgtgattaaagctgtttgtctgcatcgtttagttattgacacgagctactgccttttgtctcttatgtcttgtggtacatgagcattatactgtgatctaaaaagttgcagaccgcggcactatactttgcatatatcatgcgtgagggcttctgaaatccagtctcttgtgccctgtgattgtttttcttgtgttctcttatccatacgttcgacctccaatggtcaatgtcttttgtatcatgtccttggataggggtttcttgaaatatacttctcgaattgtagttctgcgataatataggtacttgtcttattattccaaggtaggttccaactggtgctgactgcgtaaccttgagagtatattagctgactagattgactgaccgaaagcgggcgaataaaaccaaggcagtggcgccgataaggcaggttccggcaggtattcgagatcaaaccatatgccagtgccggagtggtcagattagtatagtcgcatatagcggctgcgtcatatcagtaaaatggcatatattcttgaccacgagttgaacacaaggacagtgccatgtgagctgtctctccgtaaataatagcccccagagcgtccatagtcgctcgatcagtggcccagagcactgacaactgctcctccgcagtggagagcaagtctagaccctcagctaacttctgcggcccagacagcttggaccagtccacggttctgggatgtagaaaccgtgttgagctcatctgcatcgctgcggcccaggtgcccgtgctgcaatacccctcatgcagtgattcgatgatttccaggttctaatcccagcatacccgtcacggggtacaaagaccaggccatagctcctcaccatagcccctcccttaccctctaccatcctcctccaattttattcattgattgagaatactcgttccattgttgaagctcgctatatcgtgctcatttgcatctctagctactgcgcagctttctttgttttcaacgcccactatcaagtctcgacccggcagcccagctatattcagacgcagcgcgcaaacgtctaattatcggcaccatgtctgagggacgtcacgaaagaagaccctccgttggagccccggtttcggatcttaaaggaccaattggccctggattcagtcggcctaagcacaaacgcaactacactggctttgggaaggcagagatcaggagtgttgaagccagtatccctgaagcattaagagaggcgtaagtgaaatgaatattggctcttttgtctaccaagtgactggcatgactaacttggtttgtcatctagatggaggaaacatgtaagctacgagcacactccaataaaactttccatacattttcggcgaatgacaagactaacttagggtagtctgtatctggttttacaaacaaagaagaattcgaggtatgtcagctgcttgtatgctgatacagcctcgtgacctgtgttctcaaaagcatgaactcgtacgccacgtcgaaaccacgctggcacgctcgctgtacaattgtgatgaactgtatgtcccttgcctcttcttctctcgtgatttgaactctgaccagacttagtgctgcatactctggaactgctctggctttccgagaccggttgatcattgaatggaacaaaacccaacagaggcaaactttaaacgaccagaaacgggtctactgtaatacagaacggctgactttatggattctacgctgacaaaataaatagatctgtcactcgaattcctgatgggcagaaccctcgataacgcgatgctcaatgtaggcatgaaggacgttgcgagaggtaggagccgagtatttactgtggaaactctattgctaagccatgcacagagggtctgagcgatctgggtttccgtattgaggacgtggttagccaggagcacgacgccgcccttggtaatggtggtctgggacgtctggcagcatgccttctcgacagcctcgcaactctcaactaccctgcctggggttatggactgcgttatagatacggaatcttcaagcaggagattgtagacggataccaagttgaaattcctgattactggcttgatttcaatccatgggagtttcctcgacatgagattaccgtcgacatccaattctacggctgggtgaggacctatgaggatgagaacgggaagactgtgcactcatggcaggacggtgaaacggtgcaagctgtggcgtatgatgtcccaattccaggatacggcacgcgtaccacaaataatctacgtctttggtcaagcaaagcagctagcggcgaattcgactttcagaagttcaatgccggtgactatgaaagtgcagtagcagatcagcaacgcgctgaaacaatttccgccgtcctttacccgaatgataatctggacaggggcaaagagctgcggctaaagcaacagtacttttggtgcgcagcctcccttcacgacattgtaagaaggtttaagaagacaggtcgtccatggagcgagttctcggatcaggttgccattcagctcaatgatactcatccaacattggctattgtcgaactgcatcgcatcctcattgatattgaaggccttgattgggatgtatcctgggagatcgtgaccaacacattcggctacactaaccataccgtctaccagaagctctcgagaagtggtcggtgcccctactgcaaaacctccttccacgtcacatgcaactcatcttcgagatcaacctgtacttcttgcaattcgtggagaagaaatttcccgatgaccgcgagattctctcgagagtgtctataattgaggagtctcatccgaagatggtcagaatggcccatgttgcggtcattggctcccacaaagtcaacggcgtcgccgagttgcactcggaccttatccagtccactatattcagagattttgtcgcgatctacggcccagacaagtttacgaatgtcaccaacggggtaaccccacgccgctggctccatcaggcaaaccctaggctgtccgacctaattgcctccaagcttggaggctacgatttcttgaccgacctaactctcctagaccagctagaagattacgcagacgataaggatttccagagagaatgggtagagatcaagacctcgaacaagctccggcttgctaagcacatcaaggaaacgaccggatatagtgtgaacccaaactctctgttcgacgtccaggtgaaacgcatccacgagtacaaacgccaacaactcaacatctttggtgtcatcaaccgctacctgaagataaagtccatgtctggtgaggagaagaagaaggtccagcctcgcgtctccatcttcggcggcaaagcggccccaggttactggatggctaaaacaataatccacctcataaacgaggtttcagtagttgttaacaatgatccagatgttggagatcttctgaaagttatcttcatcgaagactacaatgtcagcaaggcgga

SEQ ID NO: 4036 - DNA, 5686 bp, Emericella nidulans
  unsure (1)..(5686): unsure at all n locations
gtaagtctggttggcagagatgtgagtgagattgcgagtttctctggtgaagaactgaaggctggatctggacgtggtgaagccgaagtggttgaagcactcgcatatgtgagcaaggattatatcaaggatggtcccccaaaaggcgagtatgttgctagaatgcgattgggactgagggatgcgcttgagctggggatgtcgaaagagtatgcccgggttatagagagagtggttgctgtgggtatgcgtggtgcaggtgcaggcggtatgggcagacctccagctacatctccacgaccacgaccacaaccaagtagaacagctgctcctcgagcgagtcctcctacgtccccggcgtcagccagctattactatttcgccttcggcagcaatatgcaactcgcacagatggcggaccggtgtcccggcagcaaggtcttcgcaaagggcattctcccagggtatagatggcatatcaacgagagaggggtcgccaatatcgtggccacggcgacccaggatggcaacgataatgctgtccagggtatccttttcacagtcactccaaaagacgtcaagacgcttgacaaaaaggaagggattgcaaagggttactacgagaagatcgtgcttcgtgtgaaggtggagccgttagccatctccggactgaaaggtgtaaagactgttgtcgcggccgggaagctggcctcaaactcgcaggctgaggctcgagaaccacggaagcacagacacggacaggatcagcatggccagcgtgcagaagtggcaggtgtgagagaggtcgaagccttagtgtatctcagcagccagtacaagaaggacggccgcgtccgtgccgagtatgtcgggcgaatgcagctggctatggcggatgcgctgaagctcggtgtcgatgaggcctatctgcgagcttcgcttcattcatgcatacttggtgtagacgaagcagcagtctcagcccatggtaagcgggatttcattgtcaggcagccggctggcgatgcaagtggtgcagcgcagacgagtggaagccctaaggaccgccgcatcatcgaaagagtgccagctggaacgggatatcaggctgctgcttgaagcatggagtgcagtgcttagagcctcgatatattgagatccatgttagtcattcagtgagattttagcgtaatcatgtaatatttaccgtcaacttcgatatgtacaactttcacaagctcttcaataacactatgtgctcgtccgtcaaccgcgataagttggctaggacctctcaaatatatggaatctacatcaattcatcaactaggcaaagccgtcagcaacgacccaactgacatcgtcagtgaaggcagtggcggcatcgaaagtattgactcccccattgctcgccacatagagcacgttctcatagtgcctccaatagcgggtcgggtagttccaggaccggatcgagttggtcccgtcgtcattgaaactgtcctggggacaaaaggtagcgtcctcagagaacagcttggtcccgtcgtttgcattaagcaaaagcgcaaaattcgagtgtcgaatatagctgccgggggtgtcgacggactcgaagctaacgcacccattcgcggccgcagtactggccagcccggtgcggacggtccagctagcctgctgcttcagggtactcgagctagaggaggagacgacctgagtgttaatggtgctgccggtgtgggcgatgtaccgcgtatcatagccggacgtggtaaccttcaatgagaccgtgtcaccgacggtcaacgccggcccgctgatgagtgaagtagtagcatatttggccgcaacgatatcagcctggacagagttctccgttgcgtcgtctggatacccgtccgtcatggcgccctcgtagaaggtcccctgcgcgctaacgctgttgtcgccgccaattccaaggatgatcgcaccctccttgctcatggggttatagcctgaagcatcggttgggcgaattccattgtagtacgtcgacagcgagccggatgcggcattgccaccgcgaagagcccataagttcgggccgcccttaaggatcgctgtgacgaagcggtaggaaatgctcgggtcaccggcgttgtagtcagagctctgaccggagaacagtccattctcgagatcggccatgatccatggtccattgcctgcgccatagccccaggctgtgttggtgccgtagtagatagcctccatgtgcccgttgccggtatcgagactgctggtctccgcgttgccatagtcaaagcagcacccgtcgttataatgggtcccatcaagaacagcgtacattccctcgggctcatcacccgtcgctgtcccaatggcctcgttattcctgtacccagtgcccggtgagacgaacactccatacgccttcttcccgttcagagtaacaggggctccgatagctcccgcaaggttatcgtacccgcccacgtcggggccgttaaacccacccggcggagcttgggtcagatcgttcccattgcctgactggtcgtagatgatggtgatgaggcaggtcgtgttctcgcagaaggcgtcctgcgccgaggcgtctgcgaccccgccggcagagagtggggtgatggtggtcgtggtaccatctgaggcgcgctgcacctgatacagcgggccgttgtaggagctgtagagggcgcgcgtggtactgtgcgctgcgatacacggggtgccgccggacgagtagatgtcgcagggaccggcggcgacgagagaacccgtggcaagagctagggcaaggacggaagatcgtgaggacctggacatggtcatggagatggtcacgctgacaagacacgccgagggagctattgatgctactgatcggcagcttctgccgctgtcacttcgccctctatatacccattgttcagcctgcctgagatgctcccctccggagagcaggatggggtttgtcagtgcagtacgtatttcctccaataattgcctccatcacgggcaacctggactctgcaagccggttaattgatagaagccaccttccaccggttcttgaaatgtggggtaagagtcgatcatcctgggatattcttcagaagatccctgccagggctaggacctggctctgcatgatcagcgtcagtgaggggacaaagcactcagttggtttgttgcctcggtatcaggaagcggaaaattggcggataatgattactctctatgccaggttggtctcgcccggcggagtataagggccgagttcgcttgcataataaaatcctgctatatagccgtccaggtcgtctgcctcgagtagctcggccatctacctgggagtagcatgcttgtaagaggagtcttgccggacttactcggttaaaaaaaaaaataaagggaaaaagccagactagaagagagaggggcaggacagtgttcatccttgcatgagagggggtcctcggataatactgtgcaaaatccacgcacagtaccagcaaacgattatcgagaaagctgacgatttacccgactaatgctggtgcattaggccaggtcaaggtagattaatgaacctctagtataagtagggaagtcggggtattgtcggtgcgggtggtgcagatgatacgagtggtgtcactcgcgaggggctaagagcaccagccagaaaacagggagcttattggcaacttggcagtgcttggtgagcttggaaatgcgataggatgtaacatggccttagcttagtcgtgttgtggtatccagtcgcaagatcttccgccaaccaagagccaagctcgagcttgttagggttaatcccggggtggcctcgatctggggccccgcgtttcccaattgatttcttctacaggaagagcgctatctcaaatcgactctagttcaatgggccggtcaataggtggctaatactgtgattgattccatgagcgtttgcgtgtcgatccactttagcgccacgcctgcccaccattatgcttgtactatctgttgaccgagtatcctacggctggacttcctcctattcccgtttagagactgcatggcccgagtgtggagatttataaagcccccgccctttctgttttttctcctggtgaccccaattttctcttctttctccattttgccggactggttgagtagtgatcggccccgatcgtcactacgactctgcacagtgttcacgcaaagcactgagctcggttgaagagagtccgagcgagaagtccagaatggattcataccaagaagccaacgcccatgagactgagatcctcgtcagtgccgtctatggcgagaaccacaagcatcagctaggcgttggggaggccacaaacagtcccctgagccagcttctggctctcaaatacttcactattagaatttgtggctttgaagcatttctcaaagctttacggcgtccaaccggaccaacgtgagggctattcctaccgatggcagaatgccctcttccaggccggatagcgcggtgcctttctggcgtctgcctaggccggaatcaagaagatgaggtacctcaatgtcccttatggcgataaatgaatgagtattcgaaatatccacttccttcacccatacgaccaaaatcaatataccttgttggtctgggtagaagctcgcgtacaaagtcagtagagtattccattgatgggaggagagcgtttcagtaacagacgattgacatgcgaacgctcattaagggcttacaggccggtgactcgggaggagagtcgctgaaatggcaggcttgcagctcgaccttcctgccactcggctgctttgcttccgtttataccctgtgacccgaaaataggtgctgtgcttgaatttcaggtaaggcttacatgtgaaatggacattctcagcaaacaattggacgaggctttcgagtcacggacgcgccatctactaagatatttaaacctttgcaaatatcctcgactctcgcctatgtcatgagtctcctttcgttcagtattcccaatacaatttaacattcggtcaataactggctctggggtagtcatccattccacatactccccaattgagggtctttgccgtcgcctcagtaggcccgcccaggtaggaatggcagctaattgagcacgaccagagagcagaggactagagatgggactctttgtgtggtcaatcaagatctatatcacacttgggcgtccacgttcagtttgagttaccttataggatgaaggttgtgcggcctatcgtgccctcaaaatatttaaatacgataaactgatatgcgggctgtcactgtgcatgtggtagaaacaaacttgtcggcctgactggggagatattggacatggcaagcttcagaggtgacggttaaccatacatgacagctagccatccattttgaaaaggtgtaatttacgcggccgttactgcctcatttgtatacagaggcctgttcgtcctgtccatatatcagcttaacttggttggacaaacttcagtggctgtgcatatagaacctgcacataggcagtgcgagttacactacagtgacactcaatggtcgatcagncgctgagcccactcgtacgtgacctacctgatttgagctctg

SEQ ID NO: 4037 - DNA, 3855 bp, Emericella nidulans
gagattgagttctgtaacgatgatatcgtcaacgatgattggaggctttggcgacttattgagagccgccgtgagaaggtcctgggcgcgagtgtaaaaattcgcgtccgcggtcacgcgaccagttgaagttgaaggccatcgcgaatcattgagaaaaacgtttctcaacagccgcgataggtcgggtttagtatcgatgatgggcgacagtcggcctcctgagacttcgatgaacggggaggaagggattgaagaagggaagaatggacgggagcccaggctttcttcgtcgctgtgggggcgcggcgataagcagaaaaagggaaaaagacgggaagaaaaggaatcccgaggatcactcgcgtgatcggcgcgacagcatcatctacgtcgctgcagtccagaatgatcacagaaatattgttgttaataataatatatcttttatatattggttttttgaccctttgactcaagattgtttgtatacaacgacagcgcctacgatattgcgttcgttgtggttgtttggctatcctcggtcatgaagccggagcgacgggacgacgtcactgcgcagagccttcataaaattatggagacaaccattggagcacaaccacccagacagctccgtacgatcttatgatacaatatcgactcacacaaggtgacttctctccacccccgtccggactcctccgaatactccgggcttcgttctttgagacttctagaaaccctatatgcttctctatcgcggctctgtttcaagcatatggagaataggatacgtcgactaatcgcgtcttagaccctgtcccgcgtcgaggtccttcatttatggtaatcaagactactcaccttagctgcgctctattatacgatccggctgagcacctcacccgctcgcctcccaagaaggaaagtagcccttcaaattcagtaccatggctctccattcaccacgcctgactaccgcaaaacagcaaatgcatccgccttacaatgatcttcatcatacgtacccggcgcgtaactcagtccaaccttccatttcgggcagacgaattgcctaatagctataagctactcgccgcagacttaccccttgggcattaccagagaacgacgcgattcaataccaggttgttgggttcatacaagataaacttggcctgtggcatcagtaccccagggtcctagtaatcaaggaacctgggactgggaggcaaatgctgggcggatggccgccgctaacagccgttgagagcgtcttggatccggtcatacggaggatagcggtcagtgggctatcacgtacttttgccatagaaggtttctttacacttgctggagttgagatttattcccaatttcgcaagggcatcccaatctcgttaagggcatccttcgaggatatacttcaggcgctcaaagcagctacgttagagagatttcggcgctgaccaccgaagccggcaaagttcacttactgctataagacgctcgctgttaattgaaatgtgattgtagatttttccatactataatgtatagttactggcattcatagtttgaaagctccgtcaacaaaggcacgtgcttgacttccacatgaggtattacataatccgcctaccccagcaacgacacgctagtctctttatcgaaagaggtcaacaggctcaatcctcggccagcactggacgtacacctgcagactagacgcacgacaatcggctgcggcctccaaaatcgctttttcattgttgctccctagcttcctaccgacaaagctaagatattcagagctctacgagctgaatattcgtggctgttggtgctttgcgaaccggacagtcatggaatcagtccgccctctatatattaaggacactcctccaccgcgcaataccggagcatcaagcacacgcgcgcccggcaagcgaaaggtgtatggcaagcgacgaactgacgctccaagagctgtctttgaacaacgaagccccgcaaagaccctggatgtagcggacagcgatgctgtgcaaaatgccgttaatctactccaggccaagttggccgattttaagattgacgaaacaaaaataccgaaaaaggttcaggaagtgtctaagcagaaggatatccataaagcggcaggagcaggtctttgcaagagtaccgcaaatgagacgcctatatcaaaccctgagtcgctgggggacactgtcccagctcagcaacccgtcctgaaagctaccccaagacgcaaaaagaagtatcagaccatggtggaagtgagagtcaccccgagggtaatccctaaagacccgcaaattcctcctaccctggacagctgcaaaaggagcacaagaaagatcaaaccgttgcaaaggccctcatttgagtatatttcagatgaaaaagcaacttcatatgtccgttctatactggaccagaccttgtccccagcagcagcgcagggtattcaaaaatttgattcctgggcagcgcgtgcgggggagatgctgcaggtcgtaaaactggcagaaggctcatacggagaggtctacaagctcaggctacgagaagacatatgccagaaggagatgtccagctccaggttggcgcgcctaagagcgtgcggcaatggcgttttcaaggttgttcctttacgagcccagagcgggcctggctcgaaaaagtttaccagcatcgaggagatcgtggcagaagtcaaaatgttaaagtacctggaccctatacccgggtttgcacgcttcagggaagtccacgttgtccaaggccggtttcccgaagctttccaaaaagcctgggaccactacaggaaaacaaaagatgattgcctcaaccctaacccttcaagtaaacgagcctatcctgattcgcaaatttgggctattattgagatggatgatgctggttgtgagcttgaaaagttttcttggtcatcgatcttccaagtctatgatatattttggggagttgctatgtccttggctcgcgctgaagaatacgctttgtttgaggtaatgtcccaacatcaggaatatgtttggattatatctaattgaaaacagcatcgcgatctccaccttggcaatatttgtattcgaagtacacgaccggacggtctcatgcacccgccgtctgactcggagatcatatgccaagcgtactcaagtggttttgggctgagcacactacagacaacacttattgactattcgctttcaagggcggagctggtagtcgatgagacgtcagagacgctggaggtgacatcttcggatctggacaagaagcagatttttgatgctatcggccaagacgaagatgatgcgctcttgagagacacttatcgacagtgagtgacctggcctttcttgacactaacggttgtgctagggcatagtactaatcgtttggatagcatgcgtgcccaattatacaagggcaacccaattgacactgaaaaaacacccgatattcctggaatatgggcggaatatgcaccacgaacaaaccttatctggctccgattccttcttaagatgctgctgaaaaaccggaagcatgaaacctcagagcccccatctcaaaaccaacggcagccccttgcgccatgttcaccaaacaagaagatcaagaagggagccaagtctgacaagaagaagcaggacgctattaatggattgcagcttgcctcagatgcccactcgcaaatagtacagctgaagcgtattcttgaagaaagactccttgctgttctggaaactcttggatctggaacacgggcacgaggatatggctgtctgctgcttgttg

SEQ ID NO: 4038 - DNA, 5318 bp, Emericella nidulans
  unsure (1)..(5318): unsure at all n locations
gtcctggactattccagaccacttcagggcccatacatagcattcacatcgtttttcgtgatatatatcccccagatctggatcaaaatggttaactagatcacgcaaagaatcagcatcttactaaaagtggctttacctagcctcatcccagctcgtccaatatcgaaatgtctaagatttggcaaacttgttggcttgctgcagaacagttgcttcatttctcagggtaggtggaaaagcagtacttttcgaagactgcaccttcagagttagccctgcagaatagagaaatgacctcgtttatcttttttatctatactcacaaaacaatagcacatgattcgagtatgagcttgcgcaaggtttcagcataggaacggatccaggcagctatgtatcatgcgcaaagctgtaactaatcagacggaaattcctagacaggggaagtggatataacgtaagtatagctacaacaggtttctaggggtcaatgtctcgaggtatccaggcaataaagagatattgcttctgtcgaagccagctagatttcgatatttcacgcacagtcattgaacagctatttaggtgatcagtataacatcatgtaactacaagatactatcgtcctgttccctagtgtcaaatatggagagggatagcacgatatatgaacataatgtacgcgaacattatggaggaccgcgccccagagttcgagaaaagcggcattctcttagcactgcacatagagacaggtattctaatggccgaggaaacgagattatgcaaggcacaataattaatgttccgtttcaacagctaacttctcgttgtgggtcgtgctctgctctgtcagcgtagtaggaatcatctatacagtatcctctcagtgggatctcttccatgcttaaatagaaacaacgtcgaaacacagacatactagcttcccaatcattcacatgaatgagtatctgacagaaactcacccaagtgcgtgattcctggcgtctcccacacgcccaggaacggggaccgatcgcaccgccacaatgagcctcagggatgatttctttacgatctcagacgtattaacgtaacgtacgagggcggacgagagtatgtgactttgaagagctatggtattgcgaatccctgtgagatgttaggcgggttggttgagtgataagtggccgagatggcgagctacaaggatcaggagctcagccaagtaagcatcgttcttggaatgcgagaacgtttgaaggagtgctattgctcgaccagagaggaaaaggccgctttcttgagtgccagtgggaagaaagacattataagccggcagcgcgcagcgcgcaataagaagtctgctgttttaggaaggtgaggaagtcgtatagagccgttggagttggaggctgaatcgacactgtcatgaaaataatgaggtaatctgaatagagccagcatgtcaaggcccattaactcggtcccagacatactttgatccgtccagtaggaatttggtcgaatcaaggtgcgttggtgcgcttgtgtagtctatacttggtgatctgcgcccccgggaagggaatggtggaccatgtcccagtcgaattcttctactactgtaccgtactccgtagctacactcaccatcctcctcattacactcattctcttcgtgaatccctagtcttcacctgataggcttctattcagcggctcatcatccctgtcacatctcattactctattttccacttgcttctttccgcgtctcttcctaatccttgacttcttacgttcatctcggtctttcttcccctggccgtcactcaacaacagccagtgaatccgtcaaacaatccatggagatccgctacgcgttctgttaacgattgatttttcgcgcttctcgttttcaactcccgggagaatctgcttcttgctgttttgctggcctgcctcattctcggctgtgagcgttactgggtcgcccgtctactacatccgggcagcctcactagatcgactagttggcccgtctcacccgctttttagttttactccatctcgacctcttctactccgtacctcgcatcgcctcttcctagttctcttgtcgcgcgtctcttctcctcgtcctggtaagtccgctaatctcatcttgttctttcttttatcttcgttttctgtactcgctctgtaccgtcctgcattgcatcctgcggccgtgctttttcttttctttttcctgtgctctgcgcctgggtttgggcttgtcttgatctctttgggtctcttttcctccttgcatccgcctatccctccaatattcagttttcccttattgagccggttgacctacggctctcatcctgccaattgaatggcgtccgcgctctcccatgctttccactccttgtctggttacctcttgagccgccaagcgctttaattctaactctgttcatgttctgtcacgttcacttggttctatctgtcttggctattcctctttctttttcttccaattgtcttgctctgtgttccttctatcaccttgctcccgagctcgctcccgtgcttgctcccgagctttcccttcctctcccctgcagagtttcctgtccgcgcatccaatccttggcctcgacacgctctcgtcaacaattctgcacaaccccaaactaacacagtcccagaggaaagcgatggcaggagctaaacgaaggcttgatgcaagccacggctcagtcactccttccacaaataatacgtcgatcctttacagcaaaggtgagtttatacttcctgcgtcttagttcagcactaagtttccgtagaaactgctagcaatgattctcccaacactcgtgtgactcgaaacttacgttcaagccgggatgcgcgtgctgctcaacttgataatgctaagactgccagcactactgctagcagtgacactagcaatcaaaatatcagcgccactaacaataccacccccaagcacggcagcaatcggccgtcgcgcatcataacgctcaaatatagctctggcaaggtcagttcctcgaaggagataaaccgcgcaacgcctgcaactcctctgactgccacacctgcctccggtgcttccaccagcactcgtgaaacacggaacagccgagcacgggctgccgctggcccccctgctgttcctgcggctcagcctaattccagccggactgatcccgcaccttctgccattgcggctcccgagacccctcgaactaagcgtgccaaacgcggttcggtgaccgaagaatcccccagaagtacgaggcaatcgacaagactgagaggtcatgctcatgacacgcccacagaaaatggggtcaccgactctaaaccattggatgcaagcccattggctcctggtgccgccaataccagaactagaaaccgtaatcggcataacgtcgatgctggtgccaatgtatctactcgcagtcgcccaccaacctcagccgccaaatccccaccgcctgaagatactgcctcagaagcggctgaggcgtctaacctagcagatgtggagacttcacatactgcagaatctgcgtcatccgggggagaatcgccaaaagggactgtgtcttccgctcatcggaaccacgaagaggagcacccagcggctgatgccgaggaggagttcaaagcaaagtcgaccaggtctagtccaatcatgtcacggaaacgaaaatctctcgattcagatgagcaaggtggtatctttacttccagctcaccaactaagaagccgaaagtagaggcagccgcgctcgaccgtgcatcagaatcaacactccagattggcgatgagcgtaaatgggaaggttcacttaatcaaccggatgatgctaccgcatccaaagaggatgaaggatcccgccaactaactgaagaggctgacgattcaaccacgccggacaacgttgctgagttagctactgctaaagcaacccgtggaggccgcaatcggggccgaggtcgaggggcgcgcaacagaacttcggcacgctttggtgtaaacaggcgaggacgtggtggcactcgtgctgcgcggtctgcgcgcactggacgtcaaaatgaccggtcgagtgatatagaatttgaacggtcaccgtccccaagtgctgccactcagaaattgagagaccgtcagcgcgagctggacaaggcttttagaagggtggccgccgcgcagcgattggccttggcagtactcgctacgcagtctgagaagcgcattgctcgcgacaaaaacgcgcataaagctgttcctgaatatgaggaggtcagcttgattttgaaaacgcatttgcgtgaaaagcaagatactttgagacgagaatacgatctcaaggtagcacaagagaacaggatctatcaagccaacaaagaagctattgaggagcgatgtcgagtgagttcatgcgccccgttattattgcatttctaacgattctttaaggcgtcctcccgttacattcaagaagaacatcttcttgncaagtcatggggagtacatgacgtttatcgaaggacgtcgcgcggctgaagatgacgagcacactgaggtattttgtccgctcagtgacatggtcgaggctaattgattatacagaccgacggctctgaaacggaaaatgaccgcggacgacgggttcctgttgtgcgcgaagtatatagagggtttaattcctcgttcgtgcgtgaccctgctggagcagccgcatatgaacgtgctgctttcggctgggatgacttcgttcaacgagccaagctcggcgatgatatcaatccacaaatgaaggagatacgagacgcaggtccgttcgccggactctcaggaagtgagattatcaacatgttgttggaagccacggggactatagaaatgccagatgacgttcctgcgaaggagcatcatcccccaccttatgcagatgcgcggtccaccgcgctgacagctctggccgaccttgcggcggccgaggtgcaccggcctgctctccagcataccccccggctcgcagctcatcgtaccatacttcctcaaccctctcagcctcagcctcaacctcaacctcagccaccgtcaatacaccatgcgcatccagagccaaggcctttcttgccgccacccacccctcggggccaaccgaggcggctcctccctgcgggacagcagattccgccgatcaacgagacgcttggccttcctgaccccttctcatcacgcggtggaccacctcagcttcctcctccac

SEQ ID NO: 4039 - DNA, 2053 bp, Emericella nidulans
catggtattgttgccggcagctagcttctctaatttccaaaagtttttatataatcttagttggatttcctaggtgcttttacaaatttggaattatattagtagactacagattctatccccaatacatcgagataagtcgcatgcttagacctgaagcccgctgagtgtaagacgaatattctgatatcctccaggtcgctgccggtctactgttaatctcacgatgagcagtatgctatccgatactgctcacgtgggatgaagccaatttggggcataatgtgcatagaggaccgttctcactacttcgtgggctccaaccaggggtaccctagctccccggctgtcttactttcgtgtcgcaacaaaaagtatccatgcagactgttggtaccattataactaatagtcttaagtgcagttcctagctgccaatatccatgctctagcgcgccctgaggttgctgattccaatatcataggatatctagacagccgtgtacagaaatcccacacaatgcactcagatacgcagaaaagtcgtatacctttagatagcaggaagccaaaatgataatgtctctggacgcaaactacacaagcactattagctcaataaccagccacgacagggtttgtccgcagcacggttatactcgtcatcaggtggattgtatcagtcccaatcagcagcactagtatttggaagatagtacgtcagtaacggccactccagtgttatatgcagttagaggagtggagtgaacttgctagcattataggcatggcatgtgccgaactggtggaagggctgcctccaaggtgtgccatggtgttctcgataatgccatatgggcaggacatggctctccgtacgatctagagatgatgctttggtgttagaaagagtcgtctttcaatgtgatctgggaaatcacactattaccaaagcgccgtcctgcacgtcgattccacgccttgtatacggagatggcgatagggattgaagagagtatagcagcaatgattccgatgatagcttcaatggaaatggccataaattttaggatgctgagaggctccggatccctttcagactttgaaagtgctatagtcaaggaaagaattatcggactcggccactgctcgggagatagcgccagatgggtacaggaatgcaataggtgagaacgacagtgccaatatatcactgagtatgaagaacttatactgcttgtggttgaacgataatatgtaagttcagatattcgggagccctgatgggaggacacgatttatacgaggacagctaataccatcattcccgtcctttgtgtctggcattttcagtgggcattatctgacgcgacttgggtgtcattttcagtggccgtttcagtggcttttgacagtctttcgatcctcttactttcattggcagctgtatcctgatagctactaatgaagtacacggctcatctgacacgaacggtatggacgtgtgccttgccaatctgaagagatcacagatcattggaccatcagtatattgctcggatacgtggcaacagaaaaaatcagtatatcctgggatgggcatgaaattagcatgaactcgcgaatcttgggatggagcatgaactagcagatcctccggtgtgcatgaaactcgaacaatcagtatcagttaaatcactaggatacatgcactagtcccaaacgtgccctagttatggtgttgccggagcggctcgatcttattactaccacctttatttcctctatttcctctatttcctctatttcctctatttcctctacttcctctatttcctctacttcctctacttcctctacttcctctacttcctctacttcctctacttcctctacttcctctacttcctctacttcctctacttcctctacttcctctacttcctctacttcctctacttcctctacttcctctacttcctctacttcctctacttcctctacttcctctacttcctctacttcctctacttctactactacctacttctgt

SEQ ID NO: 4040 - DNA, 5631 bp, Emericella nidulans
cgagggtggacgctgagaaagcgaaggatgtcactggactggcaagtggtgaaggtggaccgggcgaggctccacagcgtcatcgaacgggtcgacctgcacttagaggaattgtacgggtacacctgcacttagcggtatgccttcactttcgcgcagcttataagccgtgcccacaatcttttccacaggattttcacttcaattcctctacctaactgtctcttcctcctcagaaagcaatcctctcactcagcgagcctattgatcttacccatacaaccatgacctccaacggtaccaacggcagtgctactgcataccatgcctcgtctactcaagaggccatccaggctgagaacgactttgctgcccacaattaccatcctcttcccgtcgtttttgcgcgcgctcaagggacatccgtttgggatccagaaggccggcactacctcgacttcctctccgcatactccgccgtcaaccaaggtcactgccatcccaagctagttgcggccctcgtcgaccaggcctcccgtctgacgctgagctcgcgggccttctataacgatgtattccctaagtttgccgagatggtcacaaagtactttgggttcgacatggtcctccccatgaacaccggtgcggaggcagtcgagaccggtatcaagatcgcccgcaagtggggttataaggtcaagggcatccccgagaatgaggcgatcatcctcagtgcggaaaacaattttcacggccgaactgtaagtgcgcgccagctctgggctgccgtctttggtgacatgcgactgaccttaccagatggctgccatttctttgtcctccgaccccgagtctagagagaactatggcccgtacgttcccaacatcggctgcaccatcccagggacagaaaagccgatcacctacaacgataaagctgcgctgcgcgaagctttcgagaaggccggctccaacctcgccgccttcctcgtcgagcctatccaaggcgaggcgggtatcatcgtccccgatgacgattatctgcagctggccagatcgctgtgtgaccagcataatgtgctgctgatttgcgatgaaatccagaccggtattgcgcggacaggaaagctgctctgccacgagtggagcggaatcaaaccagatatggttttgctgggcaaagcgatctctggtggcatgtaccccgtgtcctgcgtgctaggacggaaggatgttatgctcacggttgagcccggaacccacggctcaacctacggaggcaaccctcttgcctgcgctgttgccatccgcgctcttgaggttgttcaggaggagaacatggtggaacgcgctgagaagcttggccaggccttccgcagcggcttggaagccatccagaacccgatcattcagacggttcgtggaaagggcctgctcaatgcgattgtcatcgacgagttcaagaccaacggacacactgcatgggatctctgcatgctgatgaaggaaaagggtcttctggtaggtatcaaccctccgttcattcgaccaacgctaactcggccaaggccaaacccacccatcagaacatcatccgtctagcaccgcctctcgtcattaccgaggaagaaatcgcaaaggcgctggaaatcatcaaggccgccgtggctgagctgccgaatctcaagggtgctgcggaagataaggtcgtccctccgccagagaagaaggtgaagattactctcgagaactagacactgtgatgaacgtgactcggtagtagactggaggaaacactccgcaccatcaaccgttcagccagccacttcgccggcattcggggagatgccccgacgggtaaagatcagggagaagagcttgcaactatgatcgcaccctccttgataccctacgccgacaagcctgggggcgttgaggcacatctgtaccatattgttagccgacagaaagtattggcagtttgacgcttggtagaatcatgagttacgataaatagcgtttaatgttattctcctgggatttgataagagaagttgtaaacagaacttggagtagtcccctattcagcaggatctaccccgctgtcaagaaatccctcaacataaccgccaacgagttctagatgcgcaatactccatgaattctcgtatctcacgtcagataggacgaaaccctgtccgccaagcatttaaggcagcccatgcagatcggttgtttgaaaaacaccgaaagatacccagcctcgggatattcctcgcaatgcttaaataggacaagatgccggtgaggctgaccatctgaactacctgcaatcaactcaatcaactgactgactacttttaactacgcattagcctgcaatctacctgccgatccactatccatcaaactcttttcttacaagtaaccaaataacaccatgtccaacccgtttcccatcgacaatctcccctacggcgtcatctcgaccagcgacgacccaaccccgcgctgtgcaacagctctagacaacgacgctatcgacctgagcgctctcgagagagatgggtattttaagactgttcccgggttcgaaacagcggtgttctctcaggtaaacttcgccaacgatggctagaacgtcaactgatgaagtcctcaacagcccacgctgaataccttcgccgcccttcccaagtctacccaccgtcaagtcagggctctcctaacagagcatctcgtggacgtaaacacgcgctcaaaatatgccactcccctcgaaaaagttacaaaccactatccaatggaaacgaagaatttctctgacttctattgttccctggaacatacccaaaacgtacctctatcctctcaattgccccttaccacacgctagatagtgtaggagaaaaagggaaggaaaggaaaaagaaaaagcaaagaaactgacaccgccaaaagtgcagcatgatcatgaatgcccccataagtccaaattggtacgtcattccgagtgtctacaacggccgcacctcgtccctccgcgtcagcgggacccccgtcgtgcgtccaaacggcgtcttcgcaagcaatccttcggaggagccgaaattccagcccgcgcgccttttcgactttgaactagaagtcggcgtgtttctctctcgtcccttcccacccggcgaaattctcgatattagcaacacaccggactatatcttcggtcttgtgattctgaacgactggtctgcgagagatattcaagggtatgaaatgccgcctcttggcccgttccatggtaagggcacggcgacgacgatctctccgtggatcgtcactaccgaggcgctagaggggtgtctgtcagggagtgcgaaggtgcagagcccggcgccgttaacgcatttggcgtggaaagggaagaaggaggaggagacgtgggatgttgagttggaggctagggttgtcagtatgtttgccttccatatactatatcgtctcgcagcgagagggtcaatggttgatgttaacgtgcacagggaacggccaatcttacgtcgtaaccgaaacgaatcttaaagagctctactggacgccctaccagtccctcgctcatctcaccagcgcgggagagggtctcagcacaggtgatattttcggtactgggaccgtaacgagcgcggtacgtgacctcttacctacctaatatctactagtacccttgcttcgattctttgaactaatagctagcagcgaacaaacagcaacggtgaaaatatcggcatagcatgcctcttggagcgcaacttgccgcataataaacttgctagcctcgctgcagcggggatcgtttttctagaagatggagatgaggtcattatggagggctggtgcatcaatcggcagacggggcggaaatttggtttcggagagtgtaagggggttgttcttcctgccctaaaggtgtgattagagtatcacagtctttcggcccccgagagcacatgaggattggaagactcaatgagactcagctacctgctctcaaggacctgggaatatgtgcagatgactctaatatagctagcagcgtttttattgaaatattccctgcacaccaatctagtccacccatcccagtgtcgaacgactagaaaattacaatttgatccatctccccatccacctcttattgacctctttcgcctcatctacgagccctagctccagaagcagctgcacgactccgcgcacagcactctgcagactcgaactaacccaagcatgtgtcggcgcggtgtgttctcccacaaagatcgtattatgctccgtctgatgataagcagggatatacagccgatgctgctccacatccggccgacaccacgccgtcgccgtatgttcatcctgtagccagcagagacgctcgtagtcccctgtatagagatctcttgcctgctcgccgtgaatcgagacgatggcgtcaagaactgtttggacgtgttcttcgtcgctaaagctaacgaaccggtcgctccagtctccgccgcggtagtgcattatcagtcctggccgagactcattatggccatagacagggtaatagagggctccaacagggaggctaggaggctttgagtatccaccaaaaataggacgtgggcctttctcccaaaagcgttcgcggaagagaagggcgaccttgcaggcagatttgaagcgtaggcctgcctcgctgattgcgcgagagagcacagaggagaaggatgggaggtccatgaagcgtgtcatggtgaaggggacagccatgattgtgtagtcgtagtctctggactcgtaggtacggttctgcgtgctggggtaccaggagaggcgggtcttcgtagtattatgaggacctgggattggttctagctttctgatctggcgattgagagtgagtctgctctggacatgcgggaggaaggcgtcagagaggcggttgaagcctccatcgatacagagccagtgagtttcccccaaagactctctacttccgtcaagaccaaggttcgagttatggtgcagttcatcccagaagacgtcatagtctgaatccgtccagatttggtctgtgacgttctcgcttgctttgaagacgtgccgcatcatggcctgctcgctccagtcgtcgagaccctcgtccatagctgtcttgtgggcgcgccagacgtttcgctggatggacttgagggtgtccttgttcttaaggatggcatccatgcgatcttgagtgttggcgtactcggcactcaacatttcaggtgcatcctttaagcttggatctgcctcgatctcaccacgcgtcggaatgcgtccgtcagggtggcggcgggtgccttgagcaatcaattcgttcgcgtgatgctgaatccagggtataaagtcgatcttccacttcggatcgttcttgttcatgtcattgaggatccgggccaattggaaggtcaactcatggtcggtatatctcagcgtctcgttatccgccttgtaggtgacagattagggcagcctcatgggttccatcttcgcccattcgtctgtgccgcaacatatcgtggtcgaacctgccacaacccggcacttgttatg

SEQ ID NO: 4041 - DNA, 3913 bp, Emericella nidulans
ccgagtttttttgagtttttttctatttgcatctgaatatttggcaggattaaagttagtgacggctcagctactctctcgcgatcggcttggatcctcgctaggcaccctcgtgctcctcagtcggcattggcaagagcatgtattcgccggtttcggccagaattgggaaggctttggggcttttcttataggactctctgtaaagcctcaagcggccgaacaactcgtgcctgagttgttcagcttccgcgttctcttgaatctctgtggaaaagatatgagaggaaccaggtagataattggaatctggtatttccgtgtggaaacaccacgggcgttttcagcctcgccataatctcgcgaagtgcgaccgtttccagggccatctctgcatctgaaacgcatttccgggctgccagtcgaatctttccctcgcgcgtcgatgaggatttatcatgatttcttttcgcagacactcgagctcaccatccacaaccaggtgccacgacagttttcatcgcagccgccaaactagtgggctgcctcgtctggtcgtcactgggaagaccgacgcctttgtgcaagccctcagtccattgagtggaagcctgcgatatccttctgtcgcttgatgtgcgagagtcatcgtgtgtcgccaacttattgcttccgggtcgtaatgagggcgacagggtactttgaatggctttgtactagggtgtctcaaagcgtcatttgccgcccacttgcagaggagtacgacctcgtctgattcatcgctctcattcattgcgaatcgcaaatcctttttagattctgctatgtattagtcacttacatgtctagcttgatatgaggacccgttacttggtaaattgacagttcgaacgtttgaagaattgatgggagccagcagggaagctctaggaagaccctggtgttctacttgagaaggggattgggggttgcctgggacggaatcaacttcgctacgcggaatgcacgactgatggggcgcagtgctcgctttctgcgctattaccaaggcctcttgtttcgccaaaggtatacaaggacggggtcggtcataaggaaaaactctagagataatggagacgggggagggacgcctgggatatgatccattcttcaggactgatgggacagggctttcgcttttcgcgctattgatacggcctttgcatacgtcaagagtaaacagggtcggggtcggctctgggaaagagactttagacaaggtgaacagggaataggagagggatctgacttgaggcgattgtttgaaaatgcaatctggggaattttggatccggtttggaatccaggtgcggtggaatctttcgatgttagtgttggtcctccagtggcagcattcgagcttgcgggagaaggtgagaaaggcgtcactatcccagtgctagacatagtctcacattgaaaggcatgcttgccagtatctttacctgagcctaatggggacctgtatttgtttgagaagtgtgcgttgttgaacaagtaatagaggtctgaagatactgtaatgagttaagttctcgaggcatgcaggcttgatataaaagctaagaattttaaggagcccagggactttagatgaagcagcccaagtacgctagtactgttatattttgcagagttagtggtgaagacttgactcctttagagacaatgtgttacagctttaaagtggaactgacaatgtgttaggtagaaactcttgtcaacaaccaatcaaaaattggagaggaagaggtaaagcaagtaacatatagtagatattcaagttaggaatattcctcaagataaaattttctatgattccatgctgaattgatcgtgccgttgggaaagggtttatcgctttcctctcaaaggaatgaacctacattaccatcttcctttcacaacccccgccaagaggtgctcacaacctgtatttctcagcaaaatgttatccatattgagaaaagcgaggctaaaggataaggagatgcgaatcctgatgctgtacaatccactttgaccagaaatcttggggaaggtcgctaatcagcagtagagggctggacaatgcgggcaagacgaccatcgtcaaacgaataatgaaagaagatgtcacgactgtaagcccaacgctgggatttatcatcaaaacaatagattttgaagggtattttctggctgtttaccgtttttgttcataatcactgactgtctctagataccgattgaatatttgtaaggagcccgacagtgtggccacccagccgctaacgcttgcccaggggacgtcggagggcaaaaaacactccgttcatattggaaaaactactttgaaaagacagacactttagtttgggtagtagatgccacggaccgactgagaattggtgattgtcgcgacgaacttgctggtcttttactagaagaagtaagctgatgcccgcccggaaaacttttatcgactggcgttctcgatgagcttaccacaaccgagcagcgtttaatgggcgcgagccttctggtatttctgaacaaaactgatgtggaaggatgtatgacccaagacgaggtcaggaaggtgggttgcttttttttccccattgatctgttcaaggatccggggtctttctgactctccgtgcagaacctcgctttagattcgatcaagactcataagtggactatactgccttgtagcgcgatgacaggggcgaatcttcatgagggtctgaattggattgtgcaggatgcaaaggacaggttattcctatactgagcgtaccatccacacaaccgcacacggtgatatctcaaccatagtggtttgaatcgcctccacacgagaaatgatttgaataacgtataatgagtttatgactgtggatggggaacgaacgatgttgttggattttatataaatttgcttcagggaatctgatattcaattctcttgtggataaatcaacgcgagaatcagtataaatgcgtgaaatgcttcttacacccgtcccctaacctgacatttgacagggttgcgtggtacatagtcttcctgaagacaactacagacagacccagattgaccttcccctagatgaggctattttcatgcactattttggcttaatcagtccctgctctcagtgggattcctgtgatccgtggacccgagttgcaaccaaacaggatcctcttaatggccataacccgatcaaaatagaaatgcgggctctggagcccttctcgtggcacggctagtatgctgactggtgaattcccttgcctagagggcgaaacgtaatcgaccttattactgatacttgtgtcgtcatcacgagtatctcgtggtacgagactgaactccacagcatcagccgagcggcaaacgtaaacagtctaccgtgtgtagaaagatcaaaacaaccgaggcgagaatccgaaacggagcctctgccgagcggaagtctgaaaaatataaagttctagactccagtctgactatatggcaatcctgcagtatcggattgcgtggtgagatatttaagagtcgacagtggggcagcgacgacgacagctgaacttgcttcactctcagggccttaaggctgcaaatggcgaggaaaggcggagaaggcgtgaccattttgtaggatcgtcataacccgactctcagcagaagaacctaaatgccactctgattctcttcctgtattctatgatttccttgctctcttgcagtctatatctttttttcgtccttcttgactctatccctgccccccaaattctccccaccttgcatttcgccttctgcatcccacgtaattcttcggcccgcattgcgatcccttaaccggctgggattttt

SEQ ID NO: 4042 - DNA, 3101 bp, Emericella nidulans
gttttgttattttcgtgaaactgtcccacaggcgattttctttgccctttcatccgtagggttgacgtggtagtgttcttcaaaagatcccagcatagcatcttgcagacttgccccatacccaggttgccctggatatttgtgtctgttgtgatacatatcgctgatttcaatggaaggggtgtgccggtctgtataagaggctttcttcattcatcgaggttccttcctgtaagccggttctccccggcttgggagaattgtctgcaatatatgtgctcctccattgtctaacgtgatttatgaccatcctcgtcatgattaacgctcaaactaatcttggctttagctacgaacaaggctgtgatatccgatgttgttaacgctgagctcattgtggggtggaaagcaatgaaaatcaaataaccaatcacagctcgatccacaatagtcacgtgatactgcatgattttcatgacataattatgcgtattttatccaatgggtcaatcacgagctgttcggacgggattcactgaccgcgactatcaaccaagacagaagcaccaagagaggactgatttggctcagatatctacaatattgcgatgccatccactggatactcttagtcaattcgaggcgctacaagcccagccacagaaggctcagaatctgcattatcgatatggaatggcgttcgtcccctggcccaatgctcccgcaagtgggcttcctgacgatcaaccgcggttacaccattgcccgtgaacggagtatttattgacgaggctaccacacaaataaaccggcctcctgtcccatcgcagaacaccttaattccacaacaaaaagtgacgcggccatgttcatcacttcagcagcggcctttgtttgggcaaacctaaatcccacaaactatatcggtagcgttagtttctgccctgaacgcgatattccagatcttgcggggaaggttgtgctcgttacggggggttagtatcgccaatagatccagtccacgtaagaatttggtgttaataaggggcaggaaatactggtctcgggaaagaaacgatccggcaaatcatcaagcacaatccggagcaggtcttcttggccgcgcggtccgaagaaaaggcgcagaacgcaataagggagcttgagtctacagcccccaatatcaaaatcacctggcttcccctcgacctcgcctctacgaaatcaattcacgatgcagcagagactttcagagcacatgcctcgcgcctcgacatcctgatcctgaacgcaggcgtcatgtcccttccaccaggcgagacagatctcgggcacgagatccagctagggacgaatcatacggggcactttttgctcacgaaattgctgttaccggttctactcgagaccgcgcagaagccggattctgacgttcgcgttatttccctctcttccatcggccataacttagctccagattttgagaccatactccaccaagatgagttgaaaaagtgcaatactaacgcgcggtatggagcatcgaaggccgcaaatatcatctttgctgccgaactggcccgtcgttacccctcgcttacagcggtctctgtgcacccgggcattatcgtgacggagctttatgccgccacgagcgcgagcaacccgatcgctgccttagcagtcaagcttttgggattgatcgcgacgaaagttgagcagggtgcgtggaatcaactctgggctgcggttggtgcaaagaaaggagagctggttaatggggcgtactatactccagttggcatcgtcaagcagaggaaccgctatgtcgttgaccagaagatggggagaaggctctgggagtggacggagacggaactgaagaggggtggggtgaagctctgacgtttttgtttctagcggtagcatggtggatttgttcttggtcgttcaatttggatatttattggacgagatattctgtagaatgatagtagtcgtgacgtgaatggcgacccggactgtggatgggccgggcattcgccacgcaaagtataataccacgagtcctcgaacactccatccttccccgcattattcccactcatgatctcttgagcacggtcgtcagatagaaatacagttaaggatactccgacctgccactcatgcctgaaggtgcgctgatctcgcaacccgaatgctgctgaacctataccaacggtaatagaccacaaggaaggtttcatagagcgcatgctccagccgcatccccatcaccagcgtcgccgcagcagcgttggagaaggagagatagaaaagcctgatcttgctattggactggagcgtcagagcagcactgagagaaacgagcaaggccagaatcaagctgaaagcggcggccagaacgtactccgtccccagcgcaggaactcgcggctgcagcgcctcaaagagtttatgcatagcgaggaggagctggacgacgctgggaagacgtatgcgaagttgatgtaaccagactggtcttgttgcttggtgggcaggtttgaaacctgcatggattcatctggatcctggcatttttgtcttgatgcgatgcgttttcttccgctacagtttgtatgaccaatttcggtctatgctgagatgatatacaatatcttactctgagctaagggaactcttgtagcagacaacttattagctcaaactggtgcttttagaatacgtcaaactattgtggttagtgttgtcaatcaaacccatctatcacaattatggaccctcgctgtttggccttataaggtatatagactgacagcgcaacatgatttggccttggccgctggctgattgtgttgggatttaggttgagggaccacttaacaaaagatcaagttatgggtgcaaataatgagatgtttggaccgttcggagtccgtctttacagctattctgggagaaagaagaaactctggaacaaagtgacatgaaaagaatatcaatatcagcattaacatctcgccaggcgagcttaagttagttgcagcgaagctaattcttatgcaagtcaacaagcagatttttcttcgacgtgg

SEQ ID NO: 4043 - DNA, 2579 bp, Emericella nidulans
  unsure (1)..(2579): unsure at all n locations
cgcagtttcgctactctgttgcgcacatagatctcccgcaccgggtctccctcatgtgccttgactacccactccccgatcccatactcctctggagcgcggcgcaccccacgtcctccgcccccgaggatcagattgcccgggcggtagttcgggtcctttttcatgcggcggattgcagacacatggatctgcgcatcgttcgggatgtcgcgaacttcgccgcacggcagcggccagcggatcggttcccacgatccgtcctcctgcaggtccatgcggcggaagggcagatattccattagtcgccaggtgagcacggaaagaggagataggccgctgttgaatgacaggcagtcgtgcaggagaccctccgtgctcgaggcgtacagggcggccctgaatctctggctggagctagacggctgcgtccagtccatattcgcggcagtgtgcgtactaccctcgccttccttggggtcgtggtcgtgagcggggtcttcgcaccagctcttttggcatttgatatcttgccggatagggctgaattcgccctcaaacttttccagacattcgaattgcttcattttcgcgggatcgaattcgagccctgcatctcgcgcagcctgaaccatccataccaatggcgcgtgactcaatgcccaactttcgcctttgccgagtgtccagcctccgccgatatctgcatgtccgcctgggaaccaaacctcttggatgtcctgctcttggtcatcctcgtcctcggccacccggccttccagcggcacttggagggagatcgcggagtggcaactgattccacttcgcactgaattgaggtcatccgtcgatccgttggccgccggaaccgcaaggctaggcttccgcctgttgggcgagggggagagtgcacggtaccggttttccgggtgaaggctttcgtgagatgcgtgcgcgcctcgatatacagagccagtgtcacttatcccattgaccttgccattggcgtcctgatcatcgttcaggacgatctcgggcacgttgtcgtgctgcttgtctgacttggactcgcggctgaatgtacgatgcagatgctctcgcagatggcggtgacggtggtgagtcctcttctttggtttgacttcagagataagatcctgtcgaaatttggctcgccgctcatcaatacccacagcatgccgaatcactctggccgagcttcgcgctgtgtacgggaacttgctgcgttgcatccaagcagactcaaatctcggtacgctattgaccgtgtcaaacagtcccatgaacttgatcctggtgatcggtcggctgaaagtctcgcgaaacgctttcatgtagcggaagagcttctgcttttctgctctgtcttcctcactgtcgccgcctcgttgctgccatttcgcgaaggtcttccaagcgaagcgggttagttctttgttacctgcttcgagcaagccgatatagtcaagcatttctgtcaaaaagcgcgcgatgtaagctcctcgactgaacccgatgaagtaaatttcatcacgggcgatgtaaaacctcatcagcatcttaaagctgcccttctcatgctcatccatgaaggatcccattgtctagtccttggctttctgctatgctggcatgatgctctgaaagcggttggtgaacgcaagcgtatttgtcgtcacatatgtcccaatgcctggttggtaataatggaactggtgaggctgactgcggtccagcatctttattcggaaacgaatgtcaatacgccagcactcaaagtggtctttacagacttactcgaaagatcttcagcacgttgctgtccgactcatcgcccgcgaacttgttgcctgtgccatcaaagcagagcacgaactgcttgacgggccgggctggcccaaccggtacagcctccataaatggtaaatgctactagcttgggaagatgtcacttcggtgtcgctctgaaagtgtgagagtaataagaaagtttgacagatgggtcaacacgcaaggggccaagaaatgtatgttggccttgggacgggtggaatacttttgtaaccgatccttgggacactctccttatgaggccggatggcggcacatgcacgaggacgtctcgccagaacttgacggactaactcaaggaccggagttctgcgcgaacgtatcgagccttcctggcttgcaaagtcgagttcctgcagccctgtcggtctggactcgcttggaaaataggtgggcaagaggctgagctcagggatcccctgaggcagaaaaagcgacgtttgctcggcttggtccacacctttgaatcatgcccagcacgagaccgagcctgaaagaggggagaaagacaatattaagaaaaggttattttccgtatttctcgcatgaaccgaaaggatcctgtctttgaaatctggagcctgctgattgtcaggcctcagctgcgggaagagcgccattccactagttggtaaactaatatgcgcgatgggccgncgctattnctgcgatgattgctcttacgctactacattcttgtatttgac

SEQ ID NO: 4044 - DNA, 6885 bp, Emericella nidulans
tctcgcgtaggaaaatagaggttgggagcgattggtggatatatattcacgggggatagggcttgcttgtcagaggaagtcttggtgtaggtcgggtcaaacgaatggtagatcaggactgcttacagttcgcatttgaggctttaggcaaggtctcaaatgcttcttcagatcaattggtcaaattgaaagtttcttaggtcatctattactccaggatatatatcaataattattgccctattctgtccttaactattgccttagaactactatcgtatactttgctcaacttaggatcatgcctcaccattcagttcaaaccctttaaagaaagatactcttcccaataatatgatggcaggttctaataaaccggatctgatcatcgtctgttaactgcagtgaggcaaataagctctcagagcgttcaatgggcattcgggatcttcgacgggcgtaaggagagcatgatcagatttctcgacgagcttatcccgcatccgaatcaccatattccgagtcgtcactaccaaatcggaagccgggtaggtaaagacgtcgagctgcggtgtaggtggtacattgggatctttctcagaagcgccgatatctgcagttggctgtttgctcgtttgatgggaccaatcactggccggacctcttgcgatatcatgcatccccctagttgttgtggtgccagtcgggcgagcgcacctggagccagccagcaactcctagccactttatactcgatggatctttttgagatccttaaaagaacagcacacggagagtacaaatgaacactagggttattttagtccattttacaagtaatggcatttgttccctatccatatacttgatctacgcattctaactccattggagctgtccaaaatccaacactacgatagtacactctaagtaatattccaaaaattgcgctatatctagagtgtaatggtatcttcgtattccctatatgtacgcaccctagcctaggttaccatggttcaacttccccagtaatatccaacgacatcgcgcgagcagagagaggcaccacaaccaattctcatggcgatctcctggcaggctcagatattcctgtccttcctgggtggaggcataggatgtttagcagtctttgggatcccatgccggtcgatgcaatttctctggcacgctcagccaaatcacagccgatcctttggaatgtacgtcatcgaccccgcgggaaatcctaccgaggaggaaagctatatcttgcaggtgccgctgcgcgagttgaagcagggaatagatgacgaggagattctagcaaggttctccaaaggattctttgctgggtgggtttttgggccagagagatggatagcgccgtttgtgcaggggattattgaccatcagggtatgttctctacatttcgtctctcgagtgatgaaggaagaagaactgtgctgaaggaagacagtattttccaatgcaagggaagctcctggagatttatgttcacgtccagacgcgtccgaccctgacatatctcgccccaatgccatgtctcagcagcgcctcccgcctctcggtgcatgcctattcggcctatactatcttgttgacacaagcgtttgcagcccaaaatatcgaacgtcaatataccccggatctgctcaaagaccccgaccagagcggagtttcgtggaatacgcaggccgcacgcaaggcagaagccttgcggcctcgcaccggttcgagttggttagggattgtcctgtagcgaacggtgaagcgaagatcacaattatctactcgcatgttaggagtaacccgcgcacgggcggacgggtgtattcaaggccgatgacggcgatgcatgtttgctatgcacatttgctgttcgctgagggggtgagggaggtccttgcttcgcggggttctgcttgaatagtctaggatacccagcaatgagtcaggccaaaataggacatatgagactgggtgtcaaatgttttggtgacctcgagctcttccaaatcgaggggttaagggcgggcattgagatggcgcggacccattgggtgactgagaaggctgtcggttccaacaatcgacgctttggctacttcattgacgacgggctatagattgcttgggaactgacttggccgataggcttcaatgtcagggtggaagcggcatgttgaggaaacagatcttgctgatttggttgctagcaagcagtaagagtcattgaaggaaaagatcacttaatcccgcaatttgcggacttcttagacgcttcgatctatttcgctgtgggactttgaagccagtatcgctccctagagaggggttggactgagtgacatcctgctcgggttggcatcgaagatcgactctcgctcggccacagggacagataagtccacaggataagtcagctcttatacgtagtggttactcgaccatctacacctaggtaatctagggctactcagcccttgtgtcgataatatagaggtatactgcaaagagccatgtggccatgcgaccgacgggggattctgatttactcgaggtgaatttagatggaaaattgtccatagatggtcaccatgcttacgaaatccgcagactacagtattagcaccagaaatctgccgagaaatctccatgatctccttaaatccctcagatcgggtccggactgtacaataggtcttttagccctaagctcggcttttccggagccgtgctggccggttgaaccgttctggtcggtccaaaaagctggacaatgtaataccactaccattaatatctaatatattataaaacaactaagacgtctgaggtccaagctactgcatgctaattacagagtatgcaggctgtggcgctaatagcgcgacaccgtcgccagtaagcttgtcgtctgttcgcgccatcaggatttcgcttaccgatggttgatcctgattccaagtgtgatctgctcaagactagtgaatgtagggagaaggattgaactgcgatcgacggtggttctaggtacagaacttgaaaatagagcctgtcactcagagtttatctgtctagggctgcgggttggcagtcaaagatctatatcaactatcaagtctagatcgaagcgtctctataccccgttattggatatcgtgccccttctcgcactgatgctcaacctcaactgtgatatcaactgttctcataaccccctgctgcttgcccatgacttcctgcgtaaggcgtctcgtactctccgttccctcgctcgagctcgaacggcgtatcatcgtcccaccactttgcgtctcattgccaacattggtagccgaaatctctgttacaacagctgcattagcggcccttggatcgaagagtgaggaatccctttcggagtcctcggctgctcctgcccgagcctcgttccttagacctgccgcgcgatctgctcccactactccggcggaggaggtctggcttatatacgcgcttgtctttgaccttgcgaattttcctgttcctgtgcgtgagagttcgacgccgtcagggagctggatctgggtcgttatcaggcctgaatgcagacccgcaaagatgtggtaaagggtcgggacgcaggctattatgattgaggtgagcatcatcgcttgcccgattacatgccagagtgttgtgtcccctagatatcttggtcagtgacgcggacgagtcgtcatcaagatatgctcacatggaatgtcgtccgagtgcacgaaggaagggaggagagctagatgcgcgattgcgaggccgacaacactgttcgggcatacagtagatgtttagttgataaacgcatcagcacaggagactgggagagtataccatagccgggaggaaaacgagctcaggatcttgactttcttctgcgacgccatctgcacattctgcatcatgacgaacggcaaaatgacaagaattatctcagtaacgatgttgaagactgcgatggggtagagtaacgcgccctgtcgtttgtactgtttagctcattacagaatagagtattatcgtccgtacctctccagcacatcgctcaggggtataacgccacgtttctggcatctggcactgaaaggagatgctgaatagcgcaaatatcgtccatccggcgataaccacggctgctgtggtgcagtattggcggagactgcgactcggtgttaatttccagacgagcagagctgtcgatagtttcgatagcgagaggacaatgatgagaaggagctgagcggcgtatgaatactatgccaggttagcccagtccagtaaaacggtgaggaccgtattcaaccttgctcagacgctggatctggctctcgctgagtccagcctcgtgctttcccagtccattatcgacagccttctgcagaacaacgacctggacgactgagagtgcctcaaatcaagcaatagagagtcaatccctgatcctgtgtgctggactgactgattaaactcaccagagcagcccaaattggggtactgcctgccgtccgccgctgcttaaagtagattgctgaccctgacttcgcgagcacgaagatcacagcgacgatcagaagacagaccgagattagtgtgatgatagggccatggttatcgggcgacagtctctggaatggaggtaggcctcctgcggtggccattgttcgatccagtaattcaccatgaccatgacgcggtcaggaattggaataaaaactggagcaagggccgcagctcttaataaaagaacagaaaaacaaaataatactgtgcccttgtatccctaccaatagttgggtataaatccaacgacggccgccctgcagtcgactccggactccggacattgacacaggtaggcgaccgtaaaaaatgcaactgagggagggcgcagcggctcgtgcatcaattgcaaggcatgatccctacttctactcacattagccgtatgttgggccagtctggaccactctcggccggctctcgtcagacgatgttgcatgctcgcccgagctaaggactagaagatgcagctagaaaggcaccatcgggctgagcgaccggggtgtcaagacggtccgttccatgagtcagtgcagctggatgaagggcttaagttaatctatatccctgtcatgccatgtcgtctccgctagagagaactagagagaagactggggcagaagaaagagaatccgagtaccgagtatttcttttctcgtttttttatccggccgttcccctctcttttcttttcttttttcttcctttcatgtttcgtggccttatgtaattgatcgttgccaacatgcaggaagagatggaaatgaaaggcggaagtgctgtacgattagggccagcagagaatgggcctggtgctggtagcgtggcctatcgccaaaagcagcaattggaggttcgacgcacattctgttacagacaacagactctaacgaacgcagaggtatctcagctttttctcgtcactcgcgttctttgcaacgctgcttgcctcttgggagtccgccggcggcagtttacaggcagggctgctcaacgggggcccggcagctatcgtctacggcattattaatagcacgctgggtaacctggccattgcatgctctctcgccgagctcgcctctgtgtatggtctcaggaagatgctcctagtatggcgctgacagcagccagacaccccacagccggcgcccagtaccactggagctaccatcttgctccacgcttccgtcgcttcatcagcttcttccaaggtaggtagcctctctcttaaacacaggggctcagctaatatttactcctttttctttttcttttttcaggctgggtgaccgtcttctcctggtccgcgctcgtctgcatatcgccctacttcatcggttcccagatccaggggatggtcgctctagcacacccagaatacgaggtcgtgagatggcgcagcacactgctgatgtgggcagtggccttgattcctatcgtgattaacatatttgcacggcgcgtgctgggtgccatcgaggtcgccgcgggcatcatgcacatcgtcttcctgccagtaaccatcgccgtatttgtcattctggcccctcgcaacccgaatgagttcgtctggaatacgtttgtcagtcttggtggctggaaaaatcctggcgtagcatattcggttggtctactgggggtcattacgcccttgtctggtaaccccgcctcctcctttcctgctataccctaaccacacgcgtaagggagtaagctaacagatcctgtccaggcgtcgatggcgtaattcacatggctgaagaagtcaagaacgccaaaacggtcgtcccgcgctctatgatctatggcaccctgatcaacggcatcctcgccttcggctacctcatcgccatcctctactgtatgggtgactatatggaggcactgcagagcccaacaggttaccccattatcacaattgcctaccaagcaacgggctccaaagccgccacgttcgtccttatggctatgggtatgttgccggggtggattgcgctattcaatggtctcgcatctgtgacccgtctagcgtgggcatttgcgcgtgataacggtctgccgttctctgacttctttgcgcgcgtcgacccccgcttcaaaatccctatccggcctcttttactagttgactactgcatctgcctgctctcatcatccagatcggctccagcactgcatgcaacgctatcctctgcttcgcaacttgggtctctacatctactacctgaacgcctggggctgctcgttacaagcgacttaca

SEQ ID NO: 4045 - DNA, 4309 bp, Emericella nidulans
gcactcaggatggttgtctggagcaatgaagtctttttcgtggaactctggtctgaactgcaagaacgcattaatcaaaacaaacacagcggaaaaaatgttgctgggacaatgtccgtcgctgacgtagcatcacgcacatcctcggccatcaacaacacttccggagagatctcccaagacgagacgccggaaggagctctctttgatgagaccgcgtccgcatatcgtcgcctccgacaacgctccgagtcaataatcatatctacgcttgtatccaatgttcggtctgctctaaagtcctactctcgtgcatctaactggtcaacaatctctggccattccgttcccgcaacaggccatctccccccaagcgcggacctcgcacagaccatgcgtgctctatccacatcaatcacattcctctctcgcgcacttggtgtcgccccgctccgtcgcattgttcgccaggtcctcctttccatacagacatatatctggtctaatgtccttctgcgaaacacattctccgcctccggagccgcccagttggcaagtgatatggaccacctctatagcgttgtcgatgcagctctcggccacgcagtgcaggcaggaggctcaaagtttatccttcagaaattaaatgagggtctcctcattctgaaccttgaagcacaaactcccgtggccgaaggtgaagacaaagctcctgctgagtctgcggccgaaaaaggtttaggattgtgggaggttgagaagagactattcaaggataatgagagcgcgagggagacgctagcggagttgggtgttgagactttaactgagtcggaggctaggagtattctggagaaacgcgttgagattgggagctgaattgccttacctagttaatacgaaatttatattctagtggattatataaggagataagtgtgaatgcatcattccgctttgtcatacaatcagtctattttatccgacaatcacgtcctttatggtcaatgtctatgtagaagtacaatcgcaaatcctgctcatacacgatggacaacaggtccatgaccctgctctccaggccttttcttaaccgccgacgccccctctgacagtagtcctttcacgacgcctggcccaacttcctcaatcgctctcacaagcccctcaaccgtctccctcgttgtctggacattaatgacacaccggaagaacttgccatcaccaaccgccttctcatccccgctaggcggcgcataatctaccataaacccgcgccctacaattgcatgcgtgatctgctcagtgaccttgctattagccttcgcgcgttggttctcatccgagacgatgctgtctccgcgagggtgcaagagcttcccgttagggccgtagtaaaagcagacctgcaagcagggagtggggttctggctgacgaggatgaagtccgggtggtcctggattatggttgcgaggtacgcggcagtgtcgcaggcgttatcgatttggcgctcgtagccagctgtgccgtaatatgtccagctgaggaaaagtttaagagagtcggcgcgccggccacattggagggttagatcagcgaggtcccagatttcaggggaatcggagtttaattctgagaatcctccaatgccattttcaactggaactgcgtcttcatcatcgttgttgtggaaaagatagccagcaggaagagtgttggcgcggtggaactggcgcaggtccgaggctagtaggaaggaacaagtcactggaactccaagcatcttgtgaggattgatggcaatactgtttgccttctccgcaccggcaagcttgtgtctttgacgccgggagaaggcgaatgagccgccccaggaaccgtcgatatgcagccacaggttgtattttttacagattgctgcaatgtcatcgaagggatcaaaggatcccaagaccgtagttccggctgttgcattgacataaaaaggagtccgattctcgctcaatgccttctggaccagcttctccagctcagatggaatcatgcgtccttccttatcgattggaactgaccaggccgcgctgcttcccagccctagcatctgagccgctttttcaatgctatagtgcccgtgcgcgctagtgaagaggacaaacttgtagtcaccgttaccgtctgtcttcgtattggggtatagattgttgcgcgcaatgacaatggatgttgtattcgaagcagacccgccctgtacagagattccgccggctcgcggtccattgagcccaaacagcgcacgcagccgcttaccagtatgcttctcgataacggataacgcaggcgagacctggtagacgtggacgtttgtgttcagcgctgcgagtatgagctctgatgcaactccaggcgcattggtcgacgcatacagcttgtctaggaagccttggtgccaggtattgacggagtagcggagcaccttgcgaaggacactgaccaggccggtttggccggtgccttgctccgggagatccaactgcaggatgtcctgcagttcttctggtttcttatagtcaactaacgatgtgccgactagcgcatggtctccgttggttttgttgctcttgttaacgccattttgctgcacttctggaccaagggtatcctcgtctgcggatctaataaaggggattagaagatcttcgactgcactaagcagctgttaaagagactgtcagtattctttttccgtaccgcgcaatgcccatatatgactcacatttcgcacttcgtctgcgcgacttctgggtgacggcgtcgccattgaacgggtagtttatataaaaacttgcagcaatctatagaccataagaatagtaaacaataaagcagaaaaaaaaactaaatgaccagcagagtaatatttaagaataaatcaaaggatgcccctcatgaatagcggggagtgcccttcgggacggcggatccgctggaaattgcgccagaaaccggagccctgacatcatgaaccgagccatagtgttcattaataagatcgactgctcgattttcagaagcacggtaataacgaacgagagctcttgaggcttgagagaaccttgggagagcagttaggatataattggaatgtggaggaggaactaagaaaaaattgcggcctgagcacttacagttgctgccttgtatcttcggatctatactacaaacacctacaatgttcatatattggtcataacatacatattatttcgacataagaagccctcaatcaaggccacctattgcttcgcggccaccgcatttgcaccggtcgcctcactctgtttagcagcatacctggcgcgagccatatcgaggcgcgatttgggtttctcagcagaatcgttcgtaatatctcttcccttcgccttggccgcccattcgccccggcgtctcttgtaaaggtccatcgcccagttcctccataccgcacgtccgacgaaggagtcgcggagagctagttcgttctgggctagctcttgcgccatccgttccttgataaagtagatatccttggttgctggccacaaagcatcaaccacatgggatccactactatcaagcgcaagctcgttcatatgactcgtaaagcgggtagtgaattgtcggcggaactgtggagaagaggcgggcgatgttagggcttgttgtattacgcgcgacgccgttgggtctttgcagatactgagaaggacttcgggagacagtgcgagcagacttgagaatacgagctcgctcagttgccccggagctgtgacgatggtttgtgcgagcaatgagccgtgcagtttttcggcagcagcagagcccgggttggattcacctggcgggccgttcttgtcggacttttctttattatcggccatcgccgtctcaagtcggagcatctgttcgagtctgcgagcaggatccgagtcgtatgaagattcgagagcttttgcaattggctttgtatcaactcctcgggctaaacatctctcgatcaacacttttggcacgattgtccgagagcgttctataaggctgggtatcttgggtacaatctgttccatcacagcatgcaagtcatctcttcctaaacgttcaaggaccctaagcacgacgtagccggcggtctggttccgagcaagagagctcatctggtcgcggaggtaatttctgtagagcgacttgaacatcttccctggcatacatcgtaccattgtttctaggagacgtgaacccacaggatccctttagtgagggtttaattcg

SEQ ID NO: 4046 - DNA, 4443 bp, Emericella nidulans
ccgccggcttcgaacgacaaagaaaagaccggtgataaaaagacaaactctcctgagacaaggcggctgagcattcgttgggactccggcgtagatatgccgcccagcgccaatggctcgaggcggttcgggcccccagaaaaggcccccaggtcgctttctggcaaaggggctatggctgcagttatgtccgggttcgacctcaaggttgggctgccgagcttcagcagaggacgggactctggtcggagtgcttcgaagagaggtacttccctagattcgcaccttccttctgcggcccggagggcgcaatccggctcccccgcgcgacgcttgcccaactctagccttcgctcttcgttgtccgatgcgtcaaaattagtacctgataaaacgaaagaagtcaaacccgaaggtgccgacgataaactccgccaaattcctgcatcccgtcgtgcctctacagaaaccgacgctaggggatctgcgtcggcggacgagcgattgtacgacagtgacgacaacgcatctgagtccagcgaagaggaggaggacgacgacgacgattcttcgagtggtgacgaatccagccccgagagtaatagtgaagagcccaaacgaggtcggaagaagacaactagtcaaggttcgccagtggaagattccaagacagctccggtggacacgggtaagtggttcttgcccacctttgcgcaagtattggttttagggtggctgggctgaccataatgtacagacggcgagccaagtaaacctaaaggcccggagatggtccattcatcaaagaccggcccaatgttgaagacgccagaggtacaaccccagataaatcttgatcctccgtcggcgctcaatacgccctttggatccgacgatgaggcagaactgtcggacatcaagcgtgctcagaaactcagtattcaaatgtcgagtattgacaactcggtccgcaatcggtccatcaggactatcattcgtggagactatattaatatgcaggaggatgccgagggcggccgacgacggcagcgaaagtatctagtcacgacagatcttagcgaagagtcggtctatgccctagagtggacaataggaacgatcttacgagacggtgacacaatgttcgcggtatttgccatgcatgaggaaaccggtacccaaattggcgagggttacaaggcaacagaggatgttgccgctgttgtcggctctcaaacggtagagactctcgagaaatcaccaaacgactcctctaacctcccgcgtgctcttttcagtcggatgggttcaggaactgatagcagacctggttcagttgatgcgcggaggatgtccaaggcggaagcagaacgtgcccatgctgtccagctcatttctcaaacttgtgttcggcttctgcgaaagacgttactgcaagttcgagttgctgttgaggtgatacattgcaagagtcccaagaatatgatcacggaagctggacgtctaataactttcggcatttgataccgtccaaactgacaccttgactttagatacgatgggctggaccctacgctcgtgggcggtggggctaggggaccaggggcgctgaaagggtaagattagtattcgccataacttgtaccttgataaccaactaatatgttcttctagcgtactcttggggtctttttcaaactatctggttcagaattcgtctgttccagttatggttgcgcggaagaaaccaaagaagaaatccaagaacaagacaaatgtacgcctttccaacaatctgacgacgccgaagaagctggcggcggcaagggtagactagctaggcattattctacgacttgttccctattttctacatccgaataccatcatgagtttgatgatctggttggcgcatagactggaccggtgcctatgttaatttgctctgcgcagattttcttgatctgcattcaatagtgtataatataacattaccctaatgagaagaagataatgagacgatgagtttactgtacctcccactactacggaatactggacattgagttgtgctatgatgacacatcacgtggctccatcctctccgccaactcgacagcgaccccaactacgaccatcttccccgacagtgacgggacagtctcaatcagctcccctcttttctctcctactcttgcctttttcttctggctctgtctgttctttgaccggtactcgttccggttcccttcagccatggctgatactctcgaccctcgaatgacttccgtccagccacgcatccgctacaatacaatcggaggcatcaacggccctctagttttcctcgacaatgtccgtgtctcctacccggaagctgtcttttttcttcagcttgcccgataaatcgcatcgtgttcgcaagcctaacagtctgttaaactaggttaaattccccacctacaacgagattgtctccctgacccttcctgatggaaccgaccggtcgggtcaggtctgaaagctcaaggtatgttctcattgcttctctgagtgctgttctgtggttaagggtcttgtgtagctaatcatagcttctgaaaacaggaaaccgagctatcgtccaggtgcgcagtagacgacgcccgcagctcctaagcttgccttacttgccggactactgactgggtcacgacaatcaatctaggtgtttgagggtacttcaggtatcgatgtcaagaaggtacattgcctcggcagctttctatattgttttggagtggaagggaacatcgctgatcttgactactctgctagaccaaagtcgagttcaccaaccatagcttaaagctgggtgtctctgaggacatgctcggtcgtgtcttcgatggttccggtcgtgctattgacaagggtcctaaggtgttggcggaagattacctcgatatcaacggtcagcctattaacccgtactcgagagtgagccagccgatgccaaatcattgaagacgactgtcgctgatagaatgttggataggtgtacccggaagaaatgatttccaccggtatatccgctatcgatacgatgaactccattgcccgtggacagaagatccccatcttctccgcctccggtctcccacacaatgagattgctgctcagatttgtcgtcaggctggcctggtcaagcggccgactaaggatgtccacgacggtcacgaagataacttctccattgtcttcgctgccatgggtgttaacatggaaactagccgttttttcacacgcgatttcgaggagaacggcagtatggaacgagtaaccctcttcctgaacttggcgaatgacccaacgtaagccctactttttatacagtcagagtatccaatggctgattgggtatactacagaattgagcgtatcatcacacctcgtctggcattgaccactgctgagtactatgcgtaccaactggagaagcacgttttggttatcatgactgacctgtcggcctactgtgatgctcttcgtgaagtctcagctgctcgagaagaagtccctggtcgccgtggttaccctggttacatgtacactgacttgtcaaccatttacaaacgtgctggacgagtgcaaggccgaaacggctcgatcacccagatccctattttgaccatgcctaacgacggtaagctaggccaccgtacgcgtacctacaatcactaataacttggtacagatattacacatccaatccccgatctgacaggatatatcactgagggccagattttcatcgatcgtcaactgtacaacaagggcatctaccctccgatcaacgtccttccctctctctcccgtctgatgaagtccgccattggcaaaggtcgtactcgtgacgatcactccgacgtgtccaaccagctgtacgccaagtacgctattggacgagatgctggttcgttcctctttcttatttcatcttaactctcacacaacaattgatcaaactaatccctctcaaaccagccgccatgaaagctgtcgtcggagaagaagccctttcctccgaagacaagctctctctcgagttcctggaaaagttcgaacgtaccttcatcaaccagtccgcatacgagtctcgctccatcttcgaatccctcgacatcgcctggaacctcctccgcatctatcctccccaccttctcaatcgtatccccaagcgtgttctcgacgagttttatgctcgctcaggccgcaaaatccctaataaggatacccgggacaactcggtccctgaacagggacagtctcaaactgcggatttgatcgagacttagataagtagtcctgactagttgattgtggctgtgatattatcgatcgatatccttctcttgcgtcctgccttttgcataagctacactatactatctttccacatc

SEQ ID NO: 4047 - DNA, 3066 bp, Emericella nidulans
tatctcaaacactctaaataccccagaggtgccgaccgagcggagaagagccgactccgcagcgcagccactcactacaaactcgtcgagggcgagaatggcgaggaagaaaagctcatgctaaaagataaagaggtcgtctcagacccccaacagcagtaccagattgcgcagcaggtgcacatggagcagcacgcagggatcaacaagaccactgccgccattgccgtcaagtaccactgggtccggatcaaggagaccgtcagtcgagttattcgagactgtccgcactgcaaggaaacgctgaagaccccaacaccgacttcgaacagcgctgccgagacaccgatggatacggatgagcagcaggaggcacatcagcgtaaacgatcggtccaagaaactccagctcacacccatatcgacgcccacatgtcacaagccgaacccctccaaacacctcagctcatccatcaaacccaaaccacaatccacccaggccatcaacatcagcatcagaacccgttcacaacaccgcattcttctatcctccaaggccatgtcggctcgcttagcgactacacagccgtcccgcttgacccgcaaatcatgaatctgcatcaaatcccacgctttcaaacgcaggaaacctcaatggctgacccgtatggacatacccatcctcatcagcaacaacacccacatccgcactcattccatgaaagcgtagggaacgtccgccatgtcgcgccgaacgaataccgcatgctagtagatgatcccgccgaggacgcgggcacgctgggccttgtacattcgcaggcgagcgatgtgcaccacgagcagatgatgaagtatcaatatgtggggcatggagacgacgagcttgacttcacataacctaccgatcctattttaatttatttctctactgcactgcactgagacggcgttttgatcctatttgtttcaagattccattattgtcaagccataacttgccgggtagaatatagaacagcggcaggaaagcatcagagggagaactgactgacacaataccataattgaaagtgctagattgattacaactttcccttttcgttctctccctgtggctgcttactacccttccccttcacaccaaacaagtaagctgccaccttacgtatctggatctcctctgacccctccgtaatacgatatcttctgaaatgccggtagatgtgctcgaaggggtaatgtcttgagtagccgtcgccgccatgaatctaaactcgcaacaacttggtcagcgcgtttattcacagccaatagagactcagaaggagagtacgtacctgaatcgcccggtctgccgcctgacacgccaaccgattggcccagtaattgcacatggcaacctccccgctcaactccttttcaatccggacccagggcacatccttaccgcccgtcttctcacactcagacacaatatcgtccatccgcacgctcgtgcgcagaatcagcagccttaacatctcgacttgggtcatgagctccacaactgggaactgaatgccctggtgctcagacaacttccgcccctcgccccagatggttctcgaattcgcacgctcaatcgccctgtcaagacagtattttgcggcgccgcacgaactcgccgcttgtcggatgcggttctcatgaacgaacgtctgcgcaattgcgaggccgttatccagcttccctaggatggcgctgtgggggacaaagacgccattcagggtcacagtcgcatggtccgtcggcatattgaacgtccactcgtagctcgtaacctcgatccctttggtgtgggctgggacaaggaacgctgttataccgcgcgccgatcccgattcaccgctcgtccgcgcgaagatgatcatatgcgtacagtggtgcgcccccgtctgccatttcttggccccgttgatctcccatccttccacaccgtcactgttgcgcttgcgctgggcaacggtcgacatgaacgtcgcgtcgctaccgtgatcgggttcggtgaggccgaatgtcgttcggaattcaccgcagagtcgggcgggtatcagtgtgcgtttctgttcctcggacccgaaatggtgcaacatgaacaggtcgggaaaattgccgactatgctgtgctcattctgcaggtcgtttgcgagcccaggccgcctccgtagacagggtgcgaggccagatggaagcgaattgcggacatataaaggtttgtacgggggtgcgatgtcccgccgtagatcttggggagggcgaagcggtagaatccagcggcgtcagcgaggacacgggctttgtctgaaggaagtcaggggtgcaattttggtaatggaggggtggtgcgcacttaggagctcctcccattctttgcgcggcaggccgcctttttcccagtttgttcgggcatactcgcggcggtggtcgaagaagcggttgttgtcgtcttggtgctggagggggaggatggtggagcggatgaaggagtcgagggaggcgagatgggcgaccaggtcaggaggatattcgaaattcattttgcccttgcttacagttaaggaacccaatggaacgactataccaagtatacaactgaatatatgtagtgtataccccgcaccccgcattagtacggcgccccagcctcggctccggcgactcggcccgttgcgtgcaaccctggagcggggccttcatctagccacttgcggcttgctgatgggatggaactcagttcagactctacaaaagggtttaaatggacacccattagattgtttgagtaaaggctgtgccggtcaccacgttcacagtctgcatggccacaagcttcgccccgctcagcgccgatgcggtcaacggagacggcacttacgaccaccaatacgttgaagaatgctaggctcaagtctcgcggcttccgaacgcagtgctactgagggacatactcagaatcgaatgaaggaagtatttatacaaggcaatcctagaaaatgaaaggcagcgctgccaaatagcgtagta

SEQ ID NO: 4048 - DNA, 895 bp, Emericella nidulans
tgtcgtcccagatctcggatgagtcattaaacttttgtaggttgtacatttagacgtgtggaagggtataaagctggttgtatcgagtaaaacgtgaaaatccaaacgcctcagctaatgcaggagttctcaaagttcgagatatcatcatgcgaaggagtttcgaaaatgcgactgaatggtggatgtgatgggtgcgtgttttcttctgaaccgtttgcaactccttctgcctttcgaaccacttccttcaacgctcgggttaccacgccggctcggacaacaaggtcacggagagactgcgtatcgaatggaagtttctttgaccttgggaggtgggtgtcgatacttgtgggattctgggtaaggcgttgctgatagatcagatcaagcacggagtttgcttttgtggagaatactgtctgctccggtcccggagacgttgtcggacggaggctagagttttctgaaagcgaggccctccatgaatctccactaacgcgtttccaagggtcatttatctgggaggattcgccttcagactcatcaaagctgaaagttagtgatgatggcgacctgggaggggattcattgtggtcgtcatcgtcgagggttgctagatcaacgatcccttcagcttctttccaaagttcatttgacggaccccgaacaatgtccagaaagctggcttgatgcctcaagcgtttcaattcttccaccaacagagttagctcttgaacctgaccatattggccgtgaagactggcttgacgttccatgaaccgttgaggtactattacgcttcgaccacttacatttttgtttgggtgatggttttactcaatggattttggccttggccttgtttcgaacttaagttcctggccagacttaa

SEQ ID NO: 4049 - DNA, 4867 bp, Emericella nidulans
  unsure (1)..(4867): unsure at all n locations
gtgactatcacgaacccttccgctgcgacttcagaggatactatcctatcttctcagggagatgccggatatcaaacctttgcggaggcccaagaaactgagaccgggtccggtgaatctacactcacagatgggcgatctcaggactacgaacagaaatttgaaaatggggatgcccagtccccaacgttcttccagatcgcaaaacagccccgggtcgtcatctcttcgtttggtcttcttgtccaaggcctcttattctccgctttcgatgccgtacgtacgcttcattcccttggcaatcctaaagttttcgcattctaataaactagacaatacccatcttcgtcgaaacaacattcaactggacacccctaggcgcaggcctcgccttcctcccatcggctctaacagcgctatttgagccattcttcggtacgtattctcttttttatcaaccccagtcctacccccaatccgcgataccatcagtgttgacgcaggaaaggctatatatccgacaaacaaggcccacgactcccagcattcacttccttcttcattctccctttccctctcatgtccctcgccttcgtcaccacaaactcccccgccatgatctccctcctcctaaccctcctaaccctaatcggtctactgatcaactttgcaacaccggctctcttcgttgaaacacaggatgtccttgtgcggctacaacagtcagtgcgctccccgctcctctccacccaagatcgaacccagacccaaatgaagcgggatgagagccaaagtcggaaacagagccaagtcaaaggcatagctcgagcgttcggcatacaaacgatggcacagttcctgggcatgctcttaggctcattgtggggagggtttgtagagtggcggttcggctggaagaccatggtttattcgctgggtgtgctgtgttttgctacaagctggatgatgttagggcttggagaagatgtgggtgggtacgggacgaagaacggggccgtggatgcggaagctggtacagataccgacggccctgacagggtgtcttggtttaggaggatggatttgcgaactcgaacgatctggggaaacatgaagaggggctggaatgggatcccggtacttggtaggcaggttaactctggggcacaaactgtagatggagacactgagagggaaggacttttggcgggaagtgggagggagtaagttggtagctatattgtcccttgtctcatctcctttctgtacctgtaggcagtaaaggagttatgtaacatcagtccaagccaaatggaacggggatgagcctaagacacaagagtgaatagtaatgtatttgcatctatattttttttaagacatagttagatacagtcatacaggaataactgatcaaagccagagcaagtcaactccgatgtctcatatacaggtaggctctgtttttttagggatcagcgcgaacagcacaatcaccaagtcaatcattcacaaaggaaacgaacgaaacctcaaaccaagcaaagcaacgaaagaaaatagcagccgaagcaggctataagccaacgcccccaaatgccgagcttcgaacgcccaatccagccagccagtccaaacacataaaagcaggaactttattttatcaatagagaatcatcccatccaaccccgtcccaaactgaaccgctcagcaaaaaagcaaaccatgtaattgtaaggcaggcaatcacagactcaactgatcaaaactgccgactcttccactccctcctaaccgtccaccacccttagtcaccattccaagccgatagaacctctcctctccggccgcggtccttcccccaatataccatttctcgggtcccagagcatcgcgaaacccgcccgatccgctagaactgtcgcttccgcgccgctgacggtcgctatttctaatggggatgggcgttgaggaggaagttggcggcgaggaaggagatgaataggaatcggttgcggagttgtttaggtgtgattgcgagtttaacggtgctgcgcggctgtgagagtgtggtcttgagggctgatggtggtggctgtgatggtggtggtagtgggagggcgaggagaccgtctcagatgatgatggggcattggttgggactgtggatggcgaggcggaagaggatgaggacgatgaagatgaagaaggagaggatgtggtttttgtagctattgctcgagcgccctgtgaaatctgagatggggagagcgacgatgagccggtggcggattgagagccggcagttgatgctttgtaggttgactgcgcgcggaacgcagcgaggaagtttgccaagaaaggccggttggtggacattctgacctggattgtcggcctatggactccagggggagagaggagagtaggatgatggtagtttgaggcttaaaccagtcagtgtggggatgcttggacgatcaaagccggctcgaaatcgtgatattatcaggagacgaggataccggtattggtgcggatggtgcggatggtgcggatatttgcagttgttattgggaataataactgtcggtttggcgcaggttgctagggattagagatggagaggagaggaggcacgccgggtagtctagtacaggcgatggtgatgacttcaggagttgaatgaaggtgggaaaagttatcgcgagctctccgattcgacccgcgggcgaccaccaatcagagggtgctgatatctccgtgcaccggtgacgtcgtttcaaaccccacgttgactccagtttgaatctccaggttcgatggtctccagactccatagtttgcagtagtacgcagtagatggacagggtatttattctttaaagcccccaactgagccaaagaggggtcaggcgttggcgtagggaattctcgggactcggatgaaaggctggcaataatacatcctactatgattatagaatagatagatggcttgcaggacagatctataatgtatctcttattctctcgaatttcgctctatattctagtttttggccttcttggcattttctcaccagagccctgccggaaccgtgcaaacaacaggactgtaaaatgaaacacagacgtatggaacctcgagcaaacagggtgcatatcagagcagagcaaacagaaagccgactgcatctctgtcggggatgttgcactcccagacataaacgtatgtacataaatgtatgtatccggttaagagacatggggccgtgacagtaaagatacgcaaacatcggcttgtaacggacgcagaacgcaagagacaacagcaactctccgaggttgcaagtagccatatccgaccaagacatacagacctacttacatcgttttgaacggaaaagaacatgtggttgaaacggccgtaaatttatgcaaataacgcccgaacacacatgtggatcggaatcgatagtcgacagaagccttccgcgagaaagagatcctttggccgtatttggaagagaaaaacgagaggaaccagaatcgcagacacaagaaacatgcccgagtctatagttggacgccggataaaccacaccccgtaccatcggccactcatgataccgcactcgccgttggaaaatgctgaaacgattttttgacaagctgaagaaaatcaaacaaacttggccagatacccacggatagagaaatcgttttcgtaactgaatgttgctgggaaatcgaagaaaaatatcatgttgagagtatgcatgctggtctgaccccgttgagtattccgacctcttcgtaacgtactcggaaatcgcagcgtctttggttgtagaaacaggaaagcgtaaatctatttttgacgaataagaactcaagcggagtaaaatacaggacacgcggtgacccccgaatgtcgatttaattcgcatctattgtctggcgggctgaacggtgcctattgttgatcagtgactgtttgtgagcggagttagagactaggtagtccttaccgtcgccactcatagtcgaagccagatagagaccgttcattccactctcttgaccagcggtagtggtggggtaatactttcgctcggtctcgacatgagcgtggatgggctcttgaccaccaggcatagactgggagaacatgtagccctcgggagcttgaggttggaacatagacgtccagtcaagctcaccggggtggccgggatgtcctggcatcacagggcgcttggggtcttgaacaaccggttgttttacctgctcgatgtttcggtcaatattcaactggtggccagaagggtcagcacccggctgcacgagatacgggctctgcttgggagcttgtggccaaggggctccttgatgcggccggccgccgggaaacgcgtcttcaggctgaccacggcccatcccgttgacggatgacattgggaagcccatagtcctggtgatccgcgtaccctggcccggccggagctagtccattgccgttgacggctccctcgccgtaagtcgtgcccgggatgccactgggaggcgggacgggactactgacttcatcctggacaggtttacaagattcgcgcagcttgttgtgggacccttacagcgcattgngtgcgacagtgcgtgctccgtgggttacacgctgatgacaatttggaagacgttaagattactggagagaggtgcttgaaaaacaacatgacgccgtaccatgttaaagaagagagtagaactgccacctggtcaactgaaactaccgtacaatgcctgatactgcataaaaaattttaattgggaagaattctttgtcttgccggaaaaattttc

SEQ ID NO: 4050 - DNA, 6757 bp, Emericella nidulans
gtggatggatgaaaggagagctttgtcgtcggggttgggaggattctcaggactgagactaagcctatttttgccgagtgccagcatcctccgaacccgccctagtgcgctcacgggacaccccaagaaaaagacctcctcgggtcaaaattgatttaaccaactcatgtctttgctaaactataaattctatagagaaagttacatttaactctgttctccatcgacctttctacatactttctcccagagacacgtgctgtggtaatgggcgggatgtttgtctggccggacagctggcaatcccgttacctttctggtcaccgtgtttgtatttttcggatctccggatatttgtagcttagtcattcgttgctataaccaccacaactaccgtcaccggcattctgcttgaccatcatgcttccttttatacataggtaatactaccggtaatatggcctgttgaagtacattggcagttaccaaatgtcttttcctatgtccagctgcgcgagtacatttgcgcacgagaaggtcgccggttccgtccaaggtttcaagctcgccaagtttcgccaggtttacatcaccactgccaactaccagccctgactcaatacgaagtacgacccacttatcactgatgccgcagtcgtgaatgatgccgcaaaagggcgccttgtaccagctctcttctgtcttgacgccgttgcgtcgatggtgtacacgacgatgtcgcaagagccgtcattgccgtttcccccagcctgtggagataagtcagactcacttcaacatatgagaacagaagtttgacgatatacctcgtaaccgtagcacaccatctcgccggtcttggggtcaaacttcggatgcgccgtaaaggtcggactcagtacctgtccctcgaaatcatagcgcccaatcgtctccaacgagaccggatccatggcatacggcggcccatcctccttcgtggcaagcagcattccccgccagaagaagatattcgtgttggccgccgtgcggatcacccccttgacggcctcattatccgtgtacgggttgcggtacttcccaaacagcgcgcggccggcctgaccctcagcctggaaccgatccgtgcgcacataccgctgcttgaagtgcgcggtactgtttgttatgcggatggcagttacattgccgtcgccattgaagtggatgtcggactcatagatgggtggaaagcgatggtcaggctgcacgcggaagaaggtcccgtcgatgtcggcgggaatctgccctgtgatttgtagattctcaacatcaccttcgatgcgcgaggggctgttgaagccagtgaaggtctcggtagtagggaactgtagggtttcgctggatttgacgccgttggtatagttggcggttgggctgagcgactcggctagttcgaatatgtgtgccattgtttgttctcttgagttgcagttagctgatgcttcctttcctatacattgctagagctaggtatctgtctagccagtcgtatatagccgcccaggctgcctagagtcggctaatcgcctccgaatccggagcgaggacatgcctagacaccatgtcggagacaagcagccgatggctgatcagtttggctaccgacaattcgcagggtaatcagtaaattcagaattactattgttagcaatgctagtaaacaatttgattgggatggtaaaacattaagaataaaaagctgtaaaataattaaagagaaattttctatttttctcgaaatatatcttatcttaatcactagaacaataactgtcataaggtctcattctatacatactctaagttaatttcgattttccagatatttcgaaggaaaaaaaaaaaaataaaaaaaaaaataaaaaaaattattaaggcaataagttgttatccaggtgctgtgctctgtttgtgccctttcctgcaggacaggcggcctctctggaagtttctgcggttagcgatcagatatctaggtttagaatatgcttgatgagtctgatatttacaactccacagggaactatcgtactagtagcgtaagccgtatgaaccggactttggctaagcttcccacatttcgtctatggacagcattctctagtcatcatatgtattcactagctagtgaagaatcaccatcacaactgagaaatggtattcattctgttgctgggacagatcagaaaagactatcgtatcatacttctttcaggagcgacaacaaaatagcattaacattatcatatatactccaggctaccgaatataccacgccaggtccttcttctggacatcgcgaagtgacaagccccttcccagataagcgaaacggttctgggtctcgtatgtaaactcgaagtcctgtagtcgaggctctgcgatgctctccaagaaatgattcagcgagccacaccatggcccaacgatcctgccgtctgaggttccacctttgtacctgtaattcatggtggttagcttatctctcgagacaaggacagcgacacgcttcagggttaggaggccagcttaccagctgttgcagctaccggagaaggtcagcagtttcatgacggcgtccttgtgctcgttgaactcagtcgtcgcttgctggctgaccacaacagctttgaccccctcgctctggatcttcctggcaaacgtgagggcgaattgaagttggttttcgattgcgggcattagcgagccgttggagatgggcgtgtttggaccaaccaccactgacactagtcaatatcagttgaacagagtaggagagtaaaacgcactgaaatagtttggcatatcaggaacagcgcaggtcagatacgcctcggcacccgtctgagcccatctctttcccaaatccaccccattgcgtccgatgagcgggaatggaggcacgtaggaggtgtcatagcctgtggctgcgatgatcacatccgcagcatacagtttcccatcggctgtgacgaccccctcaggagtgacttcctggattcgagttcggacaacctccacgttcggctcctgcaatgcttcgaggtagccgtcaccaggggtcactctacaagttctatgatcagcttcgagccttcctttcactgtcagtgctgctacataccgacgacaacccacgtcgaagtctgggataagcttcttcctgagatcagggtccatcttggagagcctctcacgcattgcccgtttccactatctgcctcgacgccttctgctcctgcgagcccttgtagaagtttgggaaccgcgaattgagcgcctggtcgatctgcttgcggtattgccgcaggtagtcggggtcgttgcgaaatttctccttttcctcttcggtgtatgctgttgctcggcctgcagaggcgagatggccggcgaactggggcgcaatccaggtaggggagcggttgaagctgatgagggacttgaccactagcaagcgcagtgtgagcaatgattcttaacgttgaataaagaagtcaaactgtccttaccaggctgaatcgtaggcaccacctggattgcagaggacccggcgccgatgaccgcgactctcttatctgtcaaatccaggtcttgcggataccgggctgtatggacgagggtgccgttgaaggagtgcagacccgggatatcaggccatttccacttactatgtaacgtttatcctgttagcaaaatgtctgcggacattctaaggctgcaccactcacttcaacaccccggcacagttgatcaccacctccgccgagtcctcaaagacctggccgctggccagatcctcaatcttcactgtccatctgccctgcgcctcattccatgtggcgcccactacctggtggcggaactttgttgttctgtacactccatattcctccgctctgtcgcgataaaatctccagatctcctcagcgccagcatatctgttcctagctattagcaaacacaaacgagaggaattctaagtttgaaggccttacactcgcgaccattctggattccccgcccatggatacgtatacgagtgtgcggggatatcgcacgagcatccgggataccgcgactcgaaccacgtcccgccgacgtcctcgttcttctcgtagatctggtactcgacattttccaactcgcgtactttgtatgcgaacgcgatgcccgagatgccggcaccaataacaatgatccgaatccggcgtcgctggtggatgtattgatccttaacaaagtactgctcttgtgtgccgagggaccccatctttgcggtcactggtcggtgacgatgatagagagcttcaggttattgatacagatgatatggagatatcttttatttgtcactggccgctgctatacatgacttaagtatacacgttctgataagcggacatgaggtgttctctacggcggactgatgcagccgggcttgtgggggcgggaatatgcctccgatgattgattcccaggcctttgagctattggagtcgatgctggggatgtttcctgctacttaccttcgtggagtaaattgactttcatggaagggatgccttaccacaagaccctcctgtgctagatagcagcttgggcattccttaaagataatggatatgagtgaagcaagcagcgtttctgcacctactacgctggtattttgatacgaagttcgagtctataactgatgaaaatgtacatgagcatcattgcggcatatagtaagcagattcggcggctcaaatgacagattattccattgaaacgtgtaaatagtctatgtaattgtatgcgactacttttcaaaaacaatcctattcctcaaaaccccaatcggcttaacctctaccccgacaacgtcaccatctgccaacgaacgcttcggatcctggaaccagcccacgcccgccggcgtccccgtcatgatggccgtccccgcggggatcgtcgtcccctccgagaggaacgccagcagctcgtcaatcgggaagataaaatcaaaggggctgtcttggacgacgcggccattcacccgcgtcgtgatgcggctcgcggggttggacggctcgaacacggatggatgaacgaggcgcgggccaagaggggcgaaattgtcgtagccctttgcgtgtgtatattgtccaccgcaggcgcgctgaaacatgcgtgctgtgagatcgttgccgatagtgtagccgaggatgtgagacgtggacgaggcagctggcacggatttgatcgtgttgcgcaggacaatggtcagttcgccctggaagtgagaacggactcgcgtcagtattatgcttcccagtgagaggagagattgtaggatgaacctcgaagtcagggaatgcgttctgcgcctgcactgggaagggtatgtcgctgtccgggttggccagggccggaggggccttgtaccacatgggcgggcattgtgggatggccagctggtaggacggactgattagccttgggactttaaaaagaattgtttttatctcaccgatgcctcgttggcgtggttgcggtagttgagaccaacgcagatgatattgatcccagttaccggaactggagcgaggagctggtcctgttactatgggcatcataccgctgaacagggatatgcttgcctcttcgacagtgacatgggtgctctgctcgtctgcctctaaggcttcgatggttgggaaccctctcagagtgaggccagcagagggcgtctgttccaggctaagctgggcccagtatatatttttgtcggtggctttaaagcggatcaaactctcccagggagccatctgtagtatctcgtgggatctcttgagttggtatgagaagtatttgattttttttttctcaggtacagaggggtgagccagatggcacttttcattatgaaattggagctggtatatcggccccatcgttccgacacatggcgatggccagctccaagatggtcccagaacatgtacaatcgactagcaatgagtacagcagtttatactgtcaatctaacgcggcttgagtatatcatcgacacggcgtgatcccgtcctcttcttccatccgccatcactacacccctcctttaagccaacaaaaccaccaacaaaaacaatcataactctatagcgtcagctattacgccaccatgactgatctcaaagtcacgccggggcgcattcctctgcccatccgcaacggacccgcgaaaatccagctcaaccggattagccacgtctaccactcccatcccgacctcgacgcattcaacgcattcgccaaggactttgggtttatcgaagattcccgcgacgagaagagtaagacgatatactaccgcggatacggcagagacaagtgcgtatatgtcgccagcgagagccacgatggcggccgccatttcggcggcgttgcctttattgcggagacggaagaggattttctcagagcgtctaggcttgctgcggcgacgacaccggtgagggagtataccggtcctggcggcggcaagatcgtaacagtggagtcgccgtctgggacaaaggtccacgtactttgggggggcaggagcgcccagtcccagcaaggcagacactctacgggggggcataggagggtatacactgtcttgcgaagtcggaaggggggtatggcaattacagtattacggccaatctgtctagaggctagggattca

SEQ ID NO: 4051 - DNA, 5976 bp, Emericella nidulans
agaactccacacgcatgttaactaaactcaaccttgacatatcctttttccgagatcctggccccgttcgtgtttgcttctcggtcttattatcgtactacggaaaatctacctagctacgtacctcgcttcggtaggccggtggctgttcgatctcaatcgcaagaatgacgcactgggaacgtttcagtgcagtaaggagacagttagggccgagaatgattactcaacttcgagaaaagcagtaaactggcacaagactggacacaaacgcacggacgtggcactattggctacgtatgcaccacatgtacactgaattttctctttctagaaaggatacgactctgcttcgtttactaataatcaggctgtgagttttcaagtcagcgggtctaggtaagatgaatttgatagagaagttgcaccgcgtaaacctatatgcgatcacgctggataaaagcccgagctacgaagtcattcataacagcttggccacttcgacataaaccttctgtagtctttgagccacaattttactgagcatgcaattcagtgcgatgagatcactctgtatcctatgttgtttctctttacccgcttccgccacttggcaggacggactggatgctattcctgtgtatcagattcggcacagttctcactccctattagtggcgcaggcttcaaaacaaacgtattttatctgtctccactcctttttggtattgttagttaagcgctcaggcatggatgctattgcgcgcacagtggtgctcgcaggttgagccgagttgtcttaccggcaccgtcctacgagatgagcatcatagtgtgttcataaaagctggtggacaaactagtctgtgattaggctaacaactatgtgacccaccataaccatggtgtctgtatacctccagtgtactagcagcctagctatccgaagttggctatactatattcctcaggatatcagccagcaaccgattatagctacctcattggtggactagggaaaaaagagaccggtttatgcagttgatccagatttatagcccgccagtatgttgtatctgcactgctagactgtatggaacactctgtgacagagatagttggtatatgacactattagctcgattcggtacgtacgggatcctgtccatcattgaatgggccaacccctgcgctgtagtgatcctgccattgcacgatatgctataccatactgtgccatattaaaatatcaatggcttgattccacgttcagctgggacaagaggcatttcttgaagctctttgtaaatgttcactagtaaattcactatgactgcatggcagcagatatcaattctgctctcagctcgtagtaatgaagtgaacaaatccgccgcggaatgcagggagcagcaggtagtgtaggtagtaacaggtctcaatacagctagagacacgcctaatctcactcactccagtatctaggtgactaggcccgaggtatctcccaatactgcgaggtctgacaagggtgtctggctctgattttagcagtattgcgctgctacatagaaggcccgtcgactatctcctaccataaccttgagacaggcgcatgaggaccggccgatggcttggtcaatagggacggtccagagagcttgcgctacggctgtgtagtaacattgttgctactacgagtcctccctcaaaactctgcataggctaccctaacctgagtttctatgctggttgttgggtgtaacagtttgatacttggcttatctgttggtgaagatgtaaatcatgtcggcaagcaactcacaaaaagaggtggattttcaatatcgaactatctgcgttttctctcctagctactcaacacccaatccagttgacactaaagcgcagcagcaatagtaccaacagtcatctaggaaggaggagcaccggtaggagcagagccaccaggagcggagccaccagggccgtcagaaccgccaccaaagccgccagagttttcattctcgacaccaccatcctcagtcaagtaagcagcgggggtgacagaggtgctctggctcgagtcgatgaccacgttgatccaggcaaagataccatcagtaacatcttcaccgagaaggacatactcgacaaaagggtcgatatcatcgttgagctcctgtaagaggatactgtcgtccgcgttgagggtgagctcctgggtgttggagctgtagacgtccgttgcctcgacgagcgaaatgaggtcctggtcgaagaagatctggccgacgtgagacgaggtggtcgtgtacaggccttcaagggtgtcgttggcgttggccgtcgtgtcggctgggtgggaaagcacgtgaatgtgggttgtgcggccggtgtagtggccagggaagatggtctcgaactcggcgacacccgaatcgtcagtctgctggattccacggaggaaagtcgcgtctaagttggtctcatcggaggagtcgccgttgccgctggccacaacgcccgagtagacgccggtagcattgcagtgccagaagtcgaggtagacgtccgggacgggttctaagcatgttagttatagcgtaggaagcctacacagggacatcttaccgcaggtctcggagtcgagaagctggatgtccaggtagagaggcacacccggctggtcctcgacgaggttctggcggatcagttcaccactgacgtctgcactggtgttagcatgggctctgtcttattcttcgtaagaagcatacagtaggggccctgcgtgacatcctcagcaaggacgcaagagccacccgacgcgaagaggacggacgggtcggtggaaaggtcgaccgtcaggttggactcgtggctggtggtcaagggggtggtgtcccgggccttgagcagagggcccgagaggccacgggccttacggatcttctgcagcgaggcgtcacggcgagcaacgctcgcggcttcgacaccgcgggcctgcagctgggttgcgcactgggacagaccacgggcacggacagacttcaaggcagcagcacgctcagcggcttcagccttgacatcgtgaccggggtgggcgaagacgacggtggcaagaccgacggcgccagtgagaagagtagagaggtagaccatcttgatcgattgataggcaagagagagtattgagatttgttggatgattcttcgagtcgtccagagggcgaaggaagacctcctttatatgtctcgagggctcctatccgatggacgaacagagcaaggcaccaacaataccaccgtagacagcgtcctttcaatctattgcaatattgcaccggaattaatcacggcggaccccactgtcacaccgttcagccgcggacgttcaggaacaccccctggggaacgcgagacgcacgtagaacggccagcgcctgagtggcctcagccacatgcacgctaaaaacatgcttgtttggaatatggggtatgtcctgtcgatctctccactgacgactctctctcagtgttcactggctggtcattcgcccttccattcgtagtcaaagagacgaaacacggctacacagttggaccgttgcacacttggatatactcttgggggaccaagttcagatcctgacgggcagtcaactccccatcacatgcacacatcttgagattagtttcgttatcagtatcattgcgctgcattagccaccggagagacactacgatgaaacgtcaatttactggtgcgtagtaattgcccgtcccccatttgctatacccctggcgtcacggcctcactaacgagtccccaagacgggcacagacagcatagtccacagtacgcgcatcctgcttggcagtctcgtcgtccgccccagtttccgccgctggtgattcgtacaattggccatatcgaaattagaagctcggaagactcggaattagcaagccctaacagcccgccaaggctctggatcgacagctgcttgcccagatagtcgagtccacctgccttggccgcgtaggaagaccgctcggcaggtccattaagcttgctgatttgggcttgttccgagccctggtgcgtgacaaattgacgatctcccataacgaacagccaactaaggtacttgggttgcaaatgcgataagaatcggctctgggattcttctgtacatgccgagcgccgaggttgcttgtcctgggcattttataccttgcaagttttctgcatagacgaacttgcctggcagggccgtagtctgtccttgtggacggctcaggaattgttgcctccatgtagacccaataggtcttttcgtaaatgggatgtcgagtttttcagtctcggatctacgatctggaaaattccgatctggctccgatcttcaaatttatactgatattaactgacaaatagagtaatgcgagttttgggtgttgtttattagtttctgaaccagcagatattggaccagcagacactccagaacactccggaacgctccagtatacaggacctgaacggaggacaaaccatatctgaaactgaacggagcgaagtcatgccagagctcgcagagtcgggttgattactggtaatgcggacatttctttgtccctgtttgcattagtagtggatatacgtgtcgtctccagccctgccagcatgacgcctcagcatactccaccaatacatgcaggcccgggccagcctttgcctgcaaggctcgagggagagcagccatcgagctcaaggacagcccactcaggtaggagacgttctcatctactgcacccatctgcggatgctgggatactgggcttgcagtcgctggtacctagacgcgagctgcaggtaggatatgtggatacgatgcgtagtccttcaaggttaggtctgttatacagtgcttaacggactatcctctggacgaagcgaaacggtggtctcagcctagcccaagtatatgagggatgatgtatatcgtctttgcccgggtcttgccggtagagatttgcagcgagcagcaaaggatatcgaatcaaacgagcaaaagttttggatctagttacgtatcatgatccgcttgtcggtgagcgcaacttcgaatgacattagtaaacccagcagttaggataatctacagtacccagagcagagagcaaacacagccggagacggattgacccctatctctaagccgatcctggattaaactcatggacgttgcttaagcagaatatcataaagtagtccatgacaaaaggctgctgggccttttactcagtgcatggagtcccaggggctcctagagtcacgctagaaagctcccaccaatgaccgcaggcaagggaaaattcgctagacaggagagcctgggacccatcccacctccaccgggctttatttgagactcctgtgggaggacgaaagctgtggcgcgcgttggtgcgccttccgtagtctaggtgccgactgctccgtgtccggcctctgtaccgtactggaaaatcttgacaatataataaaggcaagatgcaactagtggaatttgggcagcatccccgtgctttcctccacgatatagtgctgatctagctcttcgactggggacgtgtcgcctgctcctgcaggatccggcgccggctcggtccctccgcattgaagaagaatggatagcagctggacggcttctgcgccactcatgtttgattccctttgctaaaacagttcggaggctttcattcatttccggcgctgatacagtcaagattaagactctagcaatgctggggggcagcttaagcggtgtacgtcatcaagcatacattgccatcagaatcggtgaagctggttgaactcaacaattatgactgtgactgtttcaagctagtcattggatggtataggctggctgaagagagagggtcgccttacatacagaagga

SEQ ID NO: 4052 - DNA, 4755 bp, Emericella nidulans
gacctgccctgatcaatgcaataattcctacccaactcggctaatattcggcactttacatggccttccagaaaaacttccccggtagagccaacagatcagggtaaatgtctccttattctttgctatagtgctttaatataatatatatagcctcttctatattttgcaaaggaccctacaatctagaaatctgtaaaaagaggttttttcgcgtttgtcctagagtcatgcattgttctattatcccactggaacttactgtatactcgaccatgatgtccgccaggtaaccaccacagaataagctagtgactgtctccagctagtagattgagggagcctcagaagtagcgccgctgagttattcgaggtctgaaagcacaacgccctgcgtctattggccgatcatatacttcgaaattcgcgtagtatggttcggtggaagtcttacagagcagagtgcatgagtcgtactctccaaaattggatgaactcaagttcgttattcgtctcgatctcgccacactaagcagaagcactttggtcccatcgcacctggataatcccacccgtagtcttagtaacttagcataaagcatcttggctttaatcattacccggacagcggagaatactatcaggtcagcacctttagaaacccctgggatgattcataatcatgatggaatgggcgactgcctataatagaaggtggaaatgctcagaatctgctatcaggaaaccaacagacaaagtcaggaaggtaagcatttctgcctactccaacctacgcagatttttatggtgcctgtgtcacttatccatccgcaataattatcatataaaattccgaacgcatcttcgaaaaatgacaggtgacaaaatcgaattacgattgtcaaattcatggcaggcatcccacttgggcaagctgggagattcattatcttgcttgatctttgaacacgaaaattgaatgccttcatttacaaatatatctgaagacatgtactccagatatggatatgacgatattcaaaaagtgttggtggagctgagggtcacatgacaatgagacgactttctttccatgctttgagctttgagaccccgccagcggttcgttgaccgacggcttgatcgcatggactaaactagcgggttgttgatgctgaaccagctctgaaggatgattcaactgagcgtctgattcattgagatgagataaccgcatatacctctaggattgacgctgctatgaacagaagcgaggcgcgaacaccatataaatgttgtgcaccgcggaaatattcaccaacctgaggaatatagtttctcactgaagtgaatgaatacgaacaagctgaaaagcgacaagctggctatggattctgaatacccgcctttaccgtcatccaaagctttcaatgcttcgcttcaaagcatatcactttctgatggcgaaggtaatactcaagtactttctggatcagagacgccgacttctatgaccagtggacgaggacaaggatcctcatattcaagtacgcaagtcattgttcacagcggcgaccttatcctgcaatatacgtccttgaagcatgccgagaccacacatacccgctggagagtgtctagtgaaagcttgatgcagagtagtccttactttcgtgctctactggatcctgacaagttttccgagggtagaaatctcgtgaaacagagggaactgcacaagcttgacgtaaataccactgtcagcggagacgttgctgggttttcaggaaatcctagctctgaccaggacgcgctcccaactttgcgattgccagatgatcacttgccaccacgctttgggccagacaatattgggctttttctcaaagttctgtctttcaattcgttcacggaggcagagagggaaagcttcgaagcagaagtcagagctcaaaagccgtcgttcattgctggattgatagaaatagccgatgccttcaactcccctgaaactgtccgggaatgccttgaacgggcctgttacactcttgggaaaccaaagctgccatttaccaagttcaccgcctccatgctgaaactaaacgaaaatcgtattcggcaatctatattcatagcaaagtttttaaaccaccaaaccgtcttcaagatgctcacgcatgctctggttgttgggggatccaggttctgggttaatggaatcgagcctccggcacctgatagtcccggttggcactatctctcagatggcctcgaaggtatgatccatgatcacttaacatagtataacccactaacccgtatcagaggaactctactaccgccgccaaagtgtcctaaacactgtcaccgacctgcaagcccacttccttcgcatctatggtgcgctcggagagcccacgcccccgagcaaacccggcacacttccccttcccaacccgtcaccagcatcccggcaataccaatgccgttgcggcctcggcaactccagcgcctgtgacatcttccaccttggacagatgacgcgtttcttttccctccgcacaaaaaccatcttcatcggctctaccctcctagacccagacttcaacccagatatcgaaaacgcagtcattgaaggggaagtaggaacacgccctaccgacatcacatccgtaatctcgctcctcaaacaatgcccagactatcagattgattctaaccatatggcctgcggtattcgtcgccgctttcttcccgctttggattgtattgagggctttgttggcgacgagagggggctcctaggcgtgaacctgagttactggcgtaaagaaggaaatgatgagagacgcggaggggaaagcaactggccccatttccagggttcctgggcaaaccgagcccatcgtagggctctcctggttgaaatccgcttgtccaggattatggggataccgcttatgtcgccggggagttcagctgcagagtatcgcgaggaggatgcgcggctactttttacagcgaagaagaggaattgggaggcttgagtggcttgccgttaacttcaagtcgccgggaactgcgggtttgtagggttgtgaggatagatacatagagaggtttgtggctgtaaatgtagttgcgctagacatattagataccccttccatagacatgcgctcataagcgaagcgaaacatatacagtgtgttgtctagaattgagggcagcgatgctcgcctttttctgtacagagaagacttcacggcttgctagtaaaaatcctggtatagtatcaggcaggaaacaccacgacgggagactgaacccatatacaacttacgtagtcttcgatgaaggacaatcattaccatgtatactggaaagtaaagatagaataaactcgagcgtgcgcaaacctatcaacttgatcaatctggagcaataggcaaaagaattagagcgctttctcggccggacaagggcggcaaaaatacagagcaaaaaacaaaagaaatcgagagcgggaaggttagaaatgctgctcccaagagtcagccatagttgtgaaagtgtccattgtagagtggtgcattgttaactcattagactgaagagtcctgtcgttattaagaatgaacgattcgttatattcttgacggaagaacccttggggttccagcatgtccggagctgaagggtggacaaattgaggatccggtattatgtaggggttgggggtgtcttgcacttcgctggccggtgacacgctagacgaacttatcccacttgtcatttgattgcctgatggcatatctgcgtaaggttgagttgcaggaccgggtgatggagcggacgacaaatccttgaagggagcgtcctgagcctccattccctcgtgcttcaattcggtatcctgcagttcctggcacttcgcttccacgtcttctcgagttgtcccatcaagattttccctgatgatgttctgggcctagcctcaagtgagtaaatggtcaactatgacagcaagggtcaatcaaacatgtgctttagtaccacggctcactagctcctcgaccggaacaccgtacttagagctcagcccgctcatcgcgttctcgaggatctcgacccgtttgacaagctcggccatgtgcctgtataagattcagctagtgttagcatataacggcaccgctctcgaacggagctcacagcaagggcgcacttcttcgtcttttcccttttcccatcagtgtagttgcagggtaccgaagtaccaatgcaattcctacaaccagctttctctcctgtgcacttcgttttcttctgcctgcaagcttcacaggcccggctgacatgctgtcggtgagaccgttttggatcgtagcgcggttcgcctcccgttcccagccgtttgattgctactcttgcattgggggtaactgacggtacgtttacgcacatggaagcgaatgagttgggcttgaagagacacgaagggtgagttctgctgccttgtagttggactttgacacaacatacactgcgagactcgccattcagataattcgaaagaagtcctccacccaccgtgctcatggtgccaaaaagccaaaaaagggactgaagcaaactgcaaagcggcatcaggttgtttagaaccgggctcaatatccgtcacgacagggcggcttggcgagagcataccttgaaaagtgaatgtagtgcttgagtcccaatggaacgataata

SEQ ID NO: 4053 - DNA, 4473 bp, Emericella nidulans
atgattgttagagacttggcgatggtgatatgccaggtgcgctcgttcatgcgccctgagttccacgactagaacaccgaaccggctcccgcaattaggtatgggggacatgtaaggaccagagtcactgtggtgttaaaaccgagcgtctcgacggcggtagggaagaagtttttgaatccattcgcagctaaatgcatatgttgcatgaaggcgaatagccagagccgaggatcagacgcggcttcttttagacctctcatggtactcgattgctggcgtgcacctacagtatcagcaacgatccgctcgtaggcaagtttccgctgatcaggagacagccatcgtgtatggcgttgatcgtcggggagggtgaaaacggagagcaccgcgacgacaaaggtcaccgtgccctgcagaatgaacagccattgccaacccttgacacccctcacgttgtccataccatgaaagaccccggcagcgatgaggccggcaaaggcagtggcgagaatatttccagtatagagaatggagatccgggtggctatctctttgcggttgtagaaaatcgacagcatgtaaagagcgcctgatttgtcagcggtagatcaaaagtgcgttactgatagaataatcggtacctgcatagaatggggcctctggagtaagtcagcggaaaaaggatcgatttcaatctcaatcatgggtacacgtagagggtaccataccggttatacctaggaagaatcttgtgagcagtaagcccttgaagtcctttgccagggcagtcagtgcactgactgcagcccatagggccatgaatccagccatgtaccacgaaggtctgactctagtcaggatcatgtctgttgttgccagtcagtgatacggaagccaagcgaaagaggattgtacgcactactcgggatctgccccaagatatatcccacaaacaggatagaaacacaagtttgatattcggacgaggataagttcaggtcctcttccagatcgttgagacgcgccaaagcaatggcattgcggtccaggtagttcaaccagaacatcagccagagcgttggcattatccacatgtcgagcttccgcacgaggctgatctcaacaggatcggttttctcctgggcaccagagtagtctgcctctggtctgaagacgggtttctcgtcgaagactgccgcgtcttcgtcgtggtggctcgtcacattgtcgtccgcgacggagtcttcttttcccttctcaggagctgacattgttgataatcctaagacgattgaagtataagacgtaagaacaaatagtagagaccctaatattgaagatcgagataagagggcatttcaccccggtcgattggaagcttttataccagccatatccaggcgtatgaagcagggaggtagatgtaacgccagacccttctccgccctgtcacccccagatttgattaatagagttttccagtttgaattgatagggcctgtgcgggggtggcgcctgtaaagtgcgtagaagtcaaaccttctttatagtcttagagttgttggtgcgtatctgccttccttctggtgcactctgacagcgacccgtatacatcttacatgttttatatagtatataaaattcagccataacacgatcagcagaaacgtggtggaactactgaagtccatagtccaggaggtctcctacctgttaaacagtacgataatgccaatgctccctccttcagctacaaaggtcatgaaggcgcacagccaagagctgtactttatggctgatccagtcctaagagcagataagccgctttgactcaacccagctaaacgggatacggtggtccagaaggcaatcggcaattctgcatatggtgcaagaaagtgctgcctgatcgatctgccgatctacagagctgccaccgttctccatctggtgcttggaagacaccactggcagagtcaatcatgagctactctagtctagcttgctgagcaccaattgctgtcgacgccggacaatcctgacttacccatcccgcctctaagtctagtatgttcgccacggagacagctccagtcacctcagctccactgcgtgttctagatactattgcacaagagattggcaaagggaagacagaaaacaaaactataccgaatgggatgtcaattggaagagtgtatatggagcacaatcgggcaggagttccacgagaggtaggcatacgtagaagattcgtcctcttttcaccggggtcgttgagcaacagcactcaggggtaaagaaacaaacctccttggcagagaggagtgagaatgtcactgtctctgtttgacgtagggcgaagggcaacttactatgcctcccatcgtctcgctgtcgaggcgtgggtactatggtctcatgagggctcggctgagattccttccgagcgaagaaaggctagtaaatgcgaaaacaaagcacggtgcccagatgacgaccggctgaacccacccccggagtcagaacggagtcgatttgctggatgaaccattatcctgaccgtgtctgcgtcatcagaaccgggaggattcaacccatgctggcttcaccgctaataagagccattttgcgggaatatgtgaagccagcaatcaggtctacctaagtttctacagtcctaccctatcaccatggtcaaaattgcactcctcggtgctgccggccagatcggcacaccactgagccttctctgcaaggcagtaagatcccagacggtattccttccgatagcccggcacgcacgctaacgtcagctgtctcagagtgacctctttgctgagattagcctgtacgatattgtgcatgtgccaggtattgccacggacctgatgcacattgacactagggcaagggtgacgggtcatctgccggacgactctggtctcaagaaggccctcactggcgccgatattgtcgtggtaactgccggtattgcgaggaagcctggaatgaccagagatggtaggttcatgcagcagtctacgagtgtgtgaccggttattgacgcgagaaacagatctattcaaggtagatttctaccaccctttctatttttccttctccctctccattctcctttttgtctattaatttttcttcgtgaagaagaaaggattgtacgacttatatctaaccagcgcagacaaacgcgagtatcatccgggacatctttgccgaaattgcagcgacatgcccgaacgcagtaagctgtgtagtcactaacccggtcaactccacactccccgttgcagcggaaacgctcaagaaggcaggtgtcttcgagccaactcgtctgttcggtataacgacgcttgacgtcgtgcgcgcctcaacctttgccgcacacgccttggacagcaacagcgacccaaaagccttcaaggtacctgtcatcggtggccatagcggcgcaacaatcctgccactctacagtcaagcggagcctccggtgaacctggataaggagaccctggctgcagtcatccaccgtgagtacacactactgtctacaccatctctcttgttcttcaaaagtcccatgcttacctaacccctaaaccaggtgtgcaattcggcggtgacgagattgtcaagtccaaacagggcgcgggtagcgcaacaacatgcatggcgtacgccggcttccggttcgtcaaagccattgtcgctgccatgaacggtgaatccgtaacagaggaggcctacgtctacctccccggtattgcagggggccaggaaattgcacaggagctgggcgttgattacttcgccctcaaggtcaccttgggccgcacaggcgctaaccaggtcttgcccattggggagatatctgagaacgagagtacactgctgaaggttgctatcaatgatttgaaggccaacatcgtcactggggtgtcattcatggcggcttgactggtatagaggataatgggcaacacaggagttctttgtagtacatcttagcaagcagtcctcttcatcaaagtcgtccagtgttcaatttcacttcatagcgcgtagtgtgctctatagcgggaatagtcacagctgcttgatggccggtcttgcgtgaaaagtgacactccttaaggataaaccaaccaaccagcggcaaatatcctggaaaccaagcctgggtgcttactcgagcaacagccctggtgctcgacttttaaatgcgcaagatgcctcttttgttgtctggttgactactcccagctacatttggaggaaggagacgaggcaagagcaagactgttgtttgtctacgacttcaccattcaatctaacgaatttgaaatagtaagacatccggtacgccgagaaagcaaagaggtcaatactatgaatgcatgatgtgcgactattagtgaaatgtaggctacagagaatgcgcattacaga

SEQ ID NO: 4054 - DNA, 3547 bp, Emericella nidulans
tcttaccgctggatcttgagtgcgacgacattttggatgatgagatggacgaggatatgggagacgacgctaacccaatggctgcgctgcttgcctcggctagggctcgggcggcggagtatgagggtagtgagagcgatgaagatcaggatcagatggacgaggacgacgagatggaaggcatgagcgaggacgacgaagttgcagatgaagatggtgtgcctgcgcttgttgccgcgggcaaagaaacttcaaggcgagcattcgacaaagtatttaagaaggtcgttgaggcggcggatgtcattctttacgtgctggatgcgcgtgaccctgaaggcacacggtcaaaagaagttgagcgggaaattatggctgcagacggtggacaaaagcggctcatcctcatcctcaacaagatcgatctcgttcccccgcccgtgctaaaaaactggctcattcacctgcgccgctacttccccaccctcccacttaaggcctccaatggtgctggcaacgctcacagctttgaccacaagcaactctccatcaaaggcacatcggagacccttttccgcgcactgaagacgtacgcgcagaacaagggtcttaagcgcgccatctccgtcggcgtcatcggctaccctaacgtcggcaagtcctccgtcattaacgcccttacagcccgcatgaacaagggttccagcaacgcctgtccgacaggcgccgaggccggcgtcaccaccaacctccgcgaggtcaagcttgacagcaagctgaagctcatcgattcccctggaattgtcttccccaacactagcgagaagaagggcaagaagaagcaagatgatcaagctcgcctcatcctcctcaacgctattcctcctaaacacatcgaagaccctatccctgctgttaacctcctcctcaagcgcctttcctcctcggaaggcctccttcaaaaactcctccaggtttatggtattcccacgctctactcgggtacctccaccacggatcggacaaacgacttccttatccaggttgcccgcaagcgcggacggttgggtaagcgcggtgtgccaaatctcgaggccgctgctatgacggtcatcaatgactggcgcgacggacggattcagggctgggccacgcctccagtcctgaaagtcgtcgacacaacagcggacggcgctactggggatgccaacaactcggcagccgcgccaggtgtcgacacgagacaagtcgtttctgagtgggcagcggagttcaagatcgagggattatggggtgatggaaatgcagaggacgaggctatggaggagtgaagtctcatacttctcagttctttttctttcctgtcgttcgttttttgtcacgttgtgtcatgtcatggtcatgggataccagacggcgttttagggtaaagccaaaatagattcctgcctagtccttactgcggtcgtcctgtctagtcgagtcgaatcaactaagcgcgtttgacgatattacaagtccgtcattggtattacatttatgtgcctaatcccctgacttagaatagaacttctgcatcccttttcgggttactttttaggcgctaggtagggagctatgctctgagtgatattctgcattgtcttctgttatattgcttctgattatgccggtgctcgttgcttccagaggtactccacatacctgaacagtagaatctaacctccgaagctagacgtttcaagcatatcttctcatgaggtctcttcaagtccgtgtgctgcatatactcgtgcgcagctggtgcattgtatgcatgtagtttgtcttacctgtggcgtttcattagcataatttgtctttcgtctctggggcaatcactgtaacatgctgcaaagccagttcatttgcagatactagctacgtcctcaaaggcccgctttgatccaggcatttctttctctatattagagaaaggcgtggcgtattaagaagcctgtagattgctctaggagggccacccagctgcgacatccatcccattccagattccgtctccaacttaactcaatggcaggttcaaataagtctttacatagacttttggaaacttcgtggtcatcttgatccatgcacttcgaccgcatccaaaaacgagagagtcttgttttgggctgtttcctgatggtagctgtacgtgtgctccctgacatagctgctgggttaacggctaacattggggcttaccgaattctgaaagaatctctcagaacaaacccttgagccttggacaacccgttctgagttactttagcccatgcccgccgtctatttgccggaaatctttgagcggtgcatcatgcaccgccagctgaggttggctgcttccagagcgcctctaggacactccttggcttggttgggaagatacgtggcgttgtgtctaccatctaccttgagctcatgaagctgaacctccgtttgatagtttcgaggtttgtcgaagatcatttctcttccaatcgcacgcatcagagcattgagccatgcactaggagacgttagtttgtgtagtagcagtttctgcacaggtctatgaaagattgtacgaacgactagagtacagagcatgaacttccgaaaatgctgtaagcctcatttatttgaaggttcgctaggctcctggtttttccctcacagttctgtggccatctggaccctgggctatgagtaggttgatgttcttggcctccagcgggcggttctggagctttggttgagggtgaatattgttgctccgtaggacgatcagcggtctctctttctcggaactattgagggtccttttacccctagctggctcactggtgacttttgaatgttcaagttggccgtttgctggtgaagttggtaacaaaaaactgaccatcggtagctaatttatattcgtgtcaggggctgcaattccctgtcggtattgggtcaataatggcaaacagaacgaatgattgcgtgaacacagatccaaaaattcaaggtttttaatgccccagtctatcaaccgatcgaacggcccctattgagtcaagcggcgctgaaggtcggacaaaagcacagttctgaacaaggacacagatgctaacaaaatgatgcttttcaacggatagattagtattagcagcagcaacagctgattatgtacattagaacaggacgtcgtggtgctcgtaacaagcatatatacagtacaacaccgtgactgttgagccaaaagcagtcagccgaatcaaaagcaagatgcaaatgcaaacaccaaacaccggcatccggggatatatatagcctcttcaatccaatccaatgtatgtgcagattccagagcagagcagagcaggccaaaagcaaacagcaaaagacagatgtagatgggagggggcggattaatcaggtgtaggtatgggtattatggtagtgtacatttagttccgaccaaggaggttcttgaacacattgcgttcagtgaggatctcctgctgaagacggcgag

SEQ ID NO: 4055 - DNA, 5582 bp, Emericella nidulans
aagggcaacgatccgctgtagatgagcgagaacccccatgtttcaccttgttattcggtggtggacgggtggggagagcgaggaacgttttatgcagatgcgaggagaatccggttgtgctgccaaaactgcagtagtaagagtcagcattgtcccagaagaaataccaaaaaaaaaaaaaaaaaaaaaaaaaaaagtgcaaacgatatacttacctctgtaccccgtagtccaccttgcgccgcagacgatgagcctttctggcccagtcgcctcgtagtccgatcatctcgagttcgtcaaaaggaaaatcaacactgagacttgcaagcgactcgattgttacgtcactattgctcttattcgtgatacttgcactgcgtaccacggtatcatacttcggaaagaccgtatacttcaactccgcggccaagtcgttatatggatcaaccaaccgtacaattagcgtggtcgcatcatgagcatccccaaagacccctggtagtccagacgcagagacttcctttcctggaacgatttcatgctcccgataccgaaacgccgagactgtatgcccttcagcctgccggatcctaaacgcaggtacccgaaagtctcctctgccttgatcagggaactcgcgccgtacgcggtctggcatccctgtccacccatcaacgatgggctcaggatcgacggggatagggccgctgattgagccgccgaaatggtcggaccgcaagtcggcggagggctcatcgacgtggaactggtaggagagtgtggtaccgttgagggcaaaagttgtgccagtgacctgcactggctctaagacatatctggctttggaattggtcattttggaggggatgtggaggttggctgatcgagactttggagaagtaggtatagtggatttatactgataggatcgcatggtgggctggcactaaccgaaaacgacacgggaatggtccgagggcgcatacgacaagcatatttatttgcgtatatatgattggcatcgtatagaatactcaaatgagtgcatgacgagtcagaacctgtatgtgagatgacgaaataaaaaccgtctaattaaaaccccgttggttgggcggggcagacaacatgatataaggatataaacctcgttctatacatctgaagggtagatcatagcaactagtagcaagcatctagaacaaatctaggagaacggcacctattattggcagtacaggtgcgggaagacaagccgcgaaggtagaatgtctcactaagaatccggttacagcggagttaaaaatctgcctgcttgagtaagagaggcaggtcagtactttcaatcgtctagacagaagctggtcaatacgtgttgagacaaggtacaatgccagcatggacggaaaacctacccatcaacactccttgcaatagcgatactcgatcaaagccttgtcggcgtcgggactccacgctgacgagatcagacggccttcgtcgagatgagagtcttaaaatgccagttgttaaagcgtcaatgctgataaagactattgtatggatcctgtggatgcatcttcgacaatctggtcctgctcgcggcactaattgagggcttctgttctcgccgcaaaccaaacccagcgcttggctgtgggctgctgttttatacagccgcgagctttgtatataaaacatgcttaagacaactgacaatccctgctagtgatggtacaactgtacactgaccgtactaaatcttgcaaatgggctggtcgtcagcgcgttcgagctgcagccgtgggctactagacatgtcactttgagtcacttgtttttctcgcccataaacgcccttacagttgtttgttctattgctctaggcaggctggtgggtgggctattcttctgactgtgcgaatgcatcctggttcaggggttatggttctcaccaatataagataaaaatagacgtatatgattaaagagagcgagtaataaataaatctcagaaaagccaaaagcaaaaagaagaaaaaaacaaatagaagaaaataaagtcgcgtagtatcacgtagctccctacagggagcgatttacccgtctcgaaagcagttatctaaggaactcctgaactggaagctctcttgcaagcaagtccaaacagtccagctggttcaatgagagccttaggcgtttttatagacgacagcttctcgctgactttgccgtaaagtattgagaggatttccctctaacggtcgtgatatattgtggcctggaatagagatattgacagattgctttctcatctggaaggtcatggtttcaatcagcatgtgccaacattgggaattggtagggtagaaacgagcgcagaccgggacccctgcgatgaggagaaagattggatcaggcactttttgaggagataccgggcctggatgtttggtatttagaggatggccctggaatcccaatggacgaaaaattcagaggaaccacggcagtgacaggatccaaagcccgttgtacaaaaactgggcttgccatggcatgattgtcacccggctgagtgtagccgggttccacgagcactcgtaagaaagtctggcgcttcacgctgttctttgggaaggaaacatctaaccaaactgctaaaatgcggtgttttacaactctttccactcctcatgtaactggacgccgactgctactgtgagagcactcttccctatcgagaaagccatgtggaacaagtgtaaggaacatggcctggcttgtgggccgaaggtcaagaccaggttgagccagatcagagttgttgaatgaaggtttcaaggtcgttgacaaaattctgcaagttctacatcacttcctggcttatggatgagtcagtggttgacggcttggatccttggatagtggtattgtattttacctagtaggttcatggtggaatcgtacaaatgctacattcagagatagcatactggaccaggccactatactgatacctgcgctagatctgctttctttcagcgctctggaacagctatcatttatgtttagatatagtcacagtatttgcatatttcctgaccagccctaactctcacaagatcggatattttcgaaggctgatagcaatgtagataagataaacagataagattagtgataccttacaggcatcaacgcatcgaccttcctttcctgtcaatggccagaccagtgaagaaggtccttccgtatgcaagcaccgcgaagacacataaaacacataagactcgaacagaatcagagcgttgcctctacagataagcatcgtctcaaacaagatggcggacctcttcgtcgacctcgttgcgccaaacggtactcactactcacaacccacaggactctttatcaacaacgccttcgttgcgtccagtggccagacaatcacctcactcgacccagcgttggttcacctgccataatcagtttgaatgatgactaacgcaaaggtaggacggacaaaccgatcgctaccgtccatgctgccagcgccgaagatgtcgaccgcgcagtgatcgcagccagagcggctctggtgcacccatcgtggaagaagttgccgggcaccgagcgtggccagctcatggctcgtctggccgatcttatggagaaaaacaaagagctgtttgcgaccatagacgcttgggacaacggtagggctagccagttttacgctttctcctcttttccctcttttccgtttctcaagtactctcactcactgagaagtcaggcaaaccgtaccacatcgcgctcagcgaggatctcgtggaggcgatcgggactattcgatactacagcggctgggcggataagacgtttggacagacaatcagcacgacgccagcgaagtttgcatataccatccgacagcctgttggtgtagttggccagatcatcccgtggaactatcctctctccatggcctgctggaagctagggccggcgctcgcttgcgggaacacggtcgtgctcaagcctgctgaacagacaccgctgagcgtccttgtgttgggcagcctgatcaaggaggctggctttccacccggggttgtgaatattgtgaatgggtatggtcgcgacgcggagcggctctagcaggccacccgctcatcgacaaaattgcgtttacggggtcgaccgtaacagcacgcgagatcatgaagctcgatggggagactgtgtagaacataaccatagatactggcggaaaatcaccccttagggagttacctggcgctgacctggagcatgctgttaagtggtcgcactttggtatcatgtccaaccagggacagatgtgcaccgccacttcccgaatctacgtccatcaagatatattccagctgttcctgtccaaattcaaggccgcggttgagacgacttccaaaatcggcgaccaatgggacgaatctacctttcaggggccgcagattacacgcgcccagtacgaccggatcctttcctatatcgagaccgcgaagaaaggcggtatggccgtagtcaccggcggctcagcacatgcgccttcgagcgagaagaacaaggacggctatttcatccaaccgactgtgttcaccggcaccgatgactcgcatgctatcgtccgtgaagaggtctttggcccggttgtggtgatcctacccttcgcgtccgaagaggaagccatcaggcgtgcaaatgacacaacatacggacttggggcggcagttttcacgtgcgatctggaacgtgcgcatcgtgttgctgctgagatagaagctggcatggtctgggtcaacagcagtcaggactgtgatccccgggtgccttttgggggcgtcaagcagagcggtattgggcgtgaactgggcgaggcgggcctggaggcttatacacaggttaaggcctgtgcatgtgaacatgggcaacaagctttagaacagaacaaagcgacggtacggttcagacaatgccagtgaacattgaacgtgcatattactcatgagaatagtgtcatagctgcgccttatatatctcggatctgctttagatgaggagcgcttcggacagtgctttcattctaaaagacaatttatagactacaaattaatccatggggcatgccgatttagaataagagagaaggcagtacaatgcatcgggccttaacctagacataagaatttgatacgcgccacgcctcaaccaaagaagaatgcctgctggacaataatgcgtcgagtccactcttgcttgggaagaggtgtaatcttcagcttcggacgtcaggtccaataacggagctacgcattgcccacgagatctttatccaaaacagctctaccggcgtccacagcccataatggaccagtattccatatcttgcctgtggctgctcttgaagcggaacagctgaggtttgcggtatgggttcaaacaggaaggcgattccgatacgatagtttaaactagctgcagataacgttggtgcaagtgagccgggcttgataaatagggtaaaagccggttat

SEQ ID NO: 4056 - DNA, 2441 bp, Emericella nidulans
cgtccaagcaacacataataggtcactagacacctttactctttcgtttgtacaatactgcatccgcatcactaccatagtcaggaacctttggtcgcaaacctagctctgacaggtgactccaaatcctatcatgccgcttctcccagcgtttccgtcgttcctcgagttcttctcctgatgggcgccatttgctctttaggattcttcgaatagcttcgggggacactttgaattcctccgcaaggacaggagtcgtgaattggtcaggcgcgatatgatgcaaatgacgaattccctccattgcgtcaggagagagctttttaggcggtgcccatccagtcggaaatttccttttcagagcctctttctggatctgccatggttccttttctttaggtggcttcggtgcattgcttgccgtggtttccttcgctgacttcttgatatttttcttattctcatgatcgcttgcttgcttttcgttggacgtcttcgtatttgttttcgttcggcgtgcagagcctgagttatctgcgcttgtagctttagaggctggattgctcgagctagtatctgaagctgttgacttatcggcggtaagagaaggctcgctcgggctagtcactcgatcatcgggtttctgggcggaagggacaggaatcgagtcaatggaaacagtggtgatagtccgtgtgcttctgagacggtggcgaagagatgatcggttcagggaccgtactgacgagtttcgaatctgtggagcgacctcgaaagcgaatatagattgaagaacggtggggagcgagatcatcgccgacttagggcagatagaaggcatgacgggcttgtgaactatatgggagtgacttgttcttggacgagattttagagataagacctctcggcgtggccgatcgctgccttaaggcagaataataccacgtgaccatgctgctggcgtcgtggatttttgaccaatcgtactaaagaactccagatcttcagaaacgcagagctaataactgaccaaagtagatgtgctcgagagccagaaagacggccagaaagcccggtctgctgcgctacactgacatgtaagtataaaagagtgcaggtacagcatccaccgcgccaatccgctgtcgaatcataatgcttaggtatggttgagcacacaacttacccgatttactgttctactgcgggccgtcaataggatatgttgcgactgttaaggctatcattattggcacttaggagtaatgttagtttcactgagctaggtccttgtctgcagtggagctaccccacaaaagttcgaccccgcagccccgagtgtttgggaaagtcggaatgtgtggagcacttagcagtgagttaactccccaagtagtttcgtcccgaaccgtctgcatactgacgtccaaaatcacgacagatatgccatgtccaaggtattattgtgactacttcttctgacttccaaagccttgatatccccataggcagagtggacgcacgaatgattacgacgcgcgctgcccacctcgcatcagctctaatattgcactaacaaagctccgcagctcgcatttgtcgatatattacgtccttcaaagtagtatgtttaggggcttatcacggactattcgatcaaaggaaagcgtatcatcccttcaatatgccatcaaagcgagctatcactgtatgcctcagtcagctatacgagcaccctttacaaactcatatatccgcaatccaataacacaatctgcatctctggtcctgcgtcggctgaactatgttcggctgactgagaacgtcaagcgaggattggcataacctagggttgagacgacttcccgagataccgacactaatggcccacggtgtccggtttctaagaccattggcgatgtctatgggttcgtctttccaggaactagagtcttcaacaatatattgtctccagatgaccgcatcggccaaattcagatcctgggtgatcggcctgagtgtactcagccaacgctcgagcggactgcaggagtacggaggtttaatctggtactctgtgatgagtgatggctggagcagagaccctactggctctatgcaacctattgcgtgtacctgggatcggcggaaaagcgtttaggatagtcacggtataaagggtccaacccagtccaggggcagcaactgatacctgaaagttcaggcagcaatacacaagttgggcgattggcgtctccaccatacattttccttggacttcaaacattcctgcattctctaggacccgttcaagggaacaaggtatgaatgcatacgtcttcatcaccatctcaggcacttcaaggtcagtgcattcagagcaagttaatcacttcctgcttccagcctcctcattcactgccaagtccagtagttcataa

SEQ ID NO: 4057 - DNA, 1796 bp, Emericella nidulans
acaggtcattgaagaaagactaagggcaaagagagagtccaagcctgctgctcactgatgcatagaaatctcactgcttacctactttccttagtccagcgtagattgcaatataggagaatagaagccatcttcaagaaattgactctcgtgaatgattactgctccagtcctagacgccttgtggtagcttgcgcgtctctaacgaatgacgattggtagtacatatatccccactcccactatgcggagtaggcttagggtatggctacaaatcggaagacccattagcggcctgatcgaccggggggtggcggcttttgatggaggctatcggaaattccagcccgaaagcgcgcgttgtatcagagccaaggtaatatgcgctagttcctgtgtcagcttactggaacatttgcatccggcgtaggcttacagatatccccgttcctgggaagcagtacggtcaatatcggcctgatattccttaaacaacagctcctgatcggcagatagcctgcgacttgcacttatccactttgtttcctttgctcatgcgtgggcgaaggtcgacaatcactgatgagtttctgatctgacagccctcgatctccagtaaatgccgccctttcgaggtctttgtgtactatggctactctcaattaccaagtgtacatgcctcgcagaatcctgatattcaaaacagcgatgtcagaaaggtgcgtgccacagttttcacgccagccacagaaaaacttacccaaatgcccattggcttgccagaactttcgtagcaggctgttcatccatctcgacgtatgaacctgacctgcagatatgggagcgacgtattcagttgggactgcttgggttacagcgtgtcacaacacggattgagagaaaagataaactgatgttggctcgcttacaggcagttcctcgattgtttttggaaggtgagtgagcccgtaacccagcatcagcgttcatttgctcggtcatggccctcgacaactcaggtcgaacgctgactctgtcgccttcgaattgaatcacatgccgctaacctgaataggatctcccagctcggtccaaagcagcgtgtccgaccctggggaccacttcccctctaacctcgaaagcagctcacgtaccgatcactcgcagagattacaaaataatacttgccacccgccagtcagcagaagataacggcgatagacatgatgagaaaatgccttggagatgtgagagaaggaagcgctccagattccgctctgtgacgacacgagacgaatcaaacgagcgtcaaattacggtctacttcctcgattaccttctatatctcacaacgctgctgcaagagtcatgctggaagattgtgcaccctgcctatgggctcgatttgaaacacttcgatgatgaagctgccgacccgagaacagagcgtcatgcagtattttcgaccgggctgcgtgtttccgacgattataccacaaagaaatggaacattgggttgggaagcctacaatgaggatttcgaccgccatctccatctttctccttacctgcccgataatgcgtgggtcaatcggtactatagcccgaaaagcacaggccgtgccgagtcttgcaacgaagcttggttctcggacaggttagcctcgagtgctcaaaacggagtggctctacagcgtgcaaataattgctgcctttgatcgacaaacaacggctgggctcaggtcaactccgctgcaggcaagccggcactcgtcccactcagtatagagctaatc

SEQ ID NO: 4058 - DNA, 644 bp, Emericella nidulans
ggtacagtctcggcgtcggtgcactgccctttctctcgattggggtcggagtcgttcttgggtcagcatatattttctactttacccgcacccggatccgtcagacattcgtgtcgacggggcgaattagaccagaagaccgtctgtacccgatgatccctggagcgttcttgctcccgctcggccagttctggttcgcgtggacgtcttttccatccatctctccatggccgcagattctggcgggtgtgccgattggcgcggggattcagattatctatctccaggggctggcatatctcgttgatgtttaccttgtgaatgcgaactctgccatttcggcgaacgcgatcgtgaggtatgttctcctagcactagcatatcatgaggagaagagaaggctgataggaagcagatcaactgtggcggcgggattcactatgtttgcgacgcccatgtaccatcgactaggtgtaggttatctacaatggcatctctcccccagtacgttaatgaggtactgtaggtccgttgcgcgtcctcgctgctaggcttcctaggcgtggccttcattccaatcccgattgttttctacatctacggcgagagggtccgcaagttgagtcggtattcgcctactctgt

SEQ ID NO: 4059 - DNA, 2627 bp, Emericella nidulans
gctaacgcgtacgcgcagcaatccacgcggatcagctcgcacctcacctcggtcaatctcacctgggaccgtgtgcagctcgtcgtctttttcgtacaagaaacagcgctttcgattctctatatcttcaagacgcgcacttttctccgcggccgctctaccgtgcgctggtccattccggaacccagcgtcgacggcagcgccggcgtcgcatgcccagcctccacgctaaccgcgcaccgagcaatgaagaacgaggagaaggcggttctctggcaattgatctacgcgaacactctcatcatcgcactcgatatcacgctactgggtatccagagcgccggaccgcggctgttccatctccagggcgcattcaagccgtgcgtctacgggatcaagctgaagctcgagtttgttattctgaataggctaagggatattgcgacgaggcccgttggcggtgccatcggcaactggaactcggacggaatctacctcggcgaggggagtgggagttccaactctcagagccacgggcattctcagcggaatagtcatggatacgggtcgggcttggggcatctggcgccaaaggcctggcgggcttcgtacaggagagaggctagtgatgaggtgcagttggtcgatagatagatacggtcgtttcctcatcattgattgatagcgaatggaatatcttgtatagtcatggcagctttgagttttggtcgtgagacccctcagccaatgcgcgtagagacactacgatcccatcagcaggacaagatcgcaggagcaacaaggccgaaaaggatgattagtgtttcgagccgcgcgcaagagcacgattctggagaactaagtatttggcacagacagcacaatactaccaggtacaatgctaacccggatgtatgtacaatgtagactcaccccctcctggattttttcttgtttctagaacgcaatcgctcaacgacatacctctacacactcgattctttaatctccgcggatggaataaggagcagtggactgattctggcatcaaatttccgttagacgtatagccgcctgcataaatcccgcccccacgtattctgtaagacctttcctgatctctacctgtccagcctcatccttcaggagaatccaaagccatctgacttgcagcattacgtcgcattgcatgattaacatgcatgtaagcatttagcgtcggttttctggccgcgccccgcatggctagactgcccagtgccattcaagtctaggcgacctctcacaatatatcgcgcatggtccttgtgaccccggcaatccaacacgtcttgcagtacctgggcaaggtctgctactgactctccgcgtcaagacgtatcagaccggccctttgcttgcctcatgtagctccatgcagaacagggttcttttcccggctattccatcggcttgactggatcctgatgtttagttcctggtagcataatctgtagtcagtatacggtcagccaccatagttctcggcccgtatatgctagcttgttgccgcttgagttagtgggtgtaagagcaccagggtttagcatagcttccggccccagtacgcgattgaccgattgcaggcataacggccgaaaggaggattcttagccttgtgtgagttatgaaagatgcagcctggactgggcagttcaacggtctagacttgtgggccgattgtccgtatgttgtttcttatctcattaacatttagcgatgatggttcgggtcggacacgggagcaagcaagtataaatcctctatctgtttttctgtcactggcggctctgagaagacaggcatcgtgttatggaattcttatgtgcaacgggggcaggcctagatgtttgacacaagaacgaatccaacgtcgcaaaactaatgccctggagccttgaggtgcatatagacaaatactggattgaaatgacgtttatggtatggcatatagatgcgtttatatgttctctccaacctcagtcgagggcgcatcaagatctggccttgttctacatatatgccttgacagatcgctggctgttctgaactgagtatagtccgtgtacgaagaagtgactggcctccttgaatgaaggactacacctggtagctccccaatcagtacatttcccaacactgcccaccaccggcaacaagccgattaaacagtacattccttcctctcacccccgtgagatgatagctcctttctaccccgtcctcatccttgacgagaacaaccaatccctccgttgacccctcgccccctgccgcaagctgcacaatcaacttccccttccacccaagcccctctgtctttctcagttctctaatatccgccactggaacacggaaaagcacattctcacccttctggctatcaatcctaagatcatcctggatcttcgccgcattcttggatgtgaagtacaggatcggatgttcattatccgagaaatcaagaactgccgttccacgcttccgttcgaatttggcttcgaacgtaaatggtccgccgtggaggtggtgagaagacggcggtccaagcgcgagtacgcttagatgctgaaaagtgagattcctgt

SEQ ID NO: 4060 - DNA, 3841 bp, Emericella nidulans
  unsure (1)..(3841): unsure at all n locations
ggctctcagccttgcctggcgtggggagtcggatgatgagttttctgatgataagcagctgggcccggatttctttcgtattgccaagtggatgtacgacatcaacgacacgaacaatatccagcggttcccggtgaatgcatacattgattcgcccgatcttcgtgtcgacaaggtcgttttccgggtgaagtctaactggggtgccaacgagacttgcatctaccgcttgaagctccatggaaagttgtgatcgacaggactcctcggttccatttttagaagctacctgtatagctatcttttatctgaccagatctagctcgttaagtgagcaattctgatcgctagtcagtttgcaagcgcagcctcgcccacgagtacttctcaccggcgtctgtcactgccgatccagtcggcttatacgcatacattcatctgaggcgggagtttggcgttggaggacgatatcccggattggcttggttttggttccattcttaagtgtatataagactagtcctgttggtgcacatatacatttttgatatcttttcaactcagttcttacctgttgaatgatgacggccgctagtactgccactggactccacagcatgctggtgagaaggcatgccgaccagagtcatttcagacgctaacacctccaccctgtctattatctcgctagatatttctatcagggctaagggtggtatataagctgtccagttactaaaacgctggtcccatgtgtagacatatctagtagtgagatatggatatggatatggatatcgaagcgatggcaattaagccgttctggagtaacttggctaactatcatacagcatggtagtatctaccacgcaggcccatttgccggaatttcagtgcaagtttcgaacagagggaaatggcaaaagaaatggcaagatccaatgatgcctttgctcaggtagcattactttgtttcgatttcgttagagcattattattatccatgtaccgtcaccttaagatattgaagttcgacctttatccaccgtcatagaaaaacatctcattatctcatcaccatttcacaagtcactccgctcatcaaccgtcaacggccccttcttgaccatgattgtcagcacctcatacagcacatccgcagcagccatagttgtcagttccgcattggtatcataagctggcgcaacttccacaatatccgccccaatgaggttcaacccatcaagccctcgaatcaaagtcctcagctccctagtactccatcccccggtctcgggcgttcctgttgcgggcgcaaatgcgggatcaatggtgtcaatgtcgatggacaggtagatcggggtggaggggtcgttccctacgcggtcgcggatcttcttgatgataccctcggtcccaatagtgtcgatttcacgtgcctccacgatctcgaatccgacatatccatcattttcgtagtcggaaggtccggacagcgttgtgcggattccggcgtggatgtttgtgtcgtttcggaggaggccttccattgcggcgtggtagaagtatgtcccatggtttatggaggcgacttcgctgggggagccaccgaagactttaggtttccaggtgtcactgcaatgggtcagaaatcttcatctagtctggagaggggatggactgttgataggggagggattcatacagatgcgagtcgaaatggatgacagtcacagggccataagccttgttgatactgcgcacagaggcagcgtaatggtatggtctcctcccaaagttatgatacgggggagtgtcttgcctgcgcgcgagagaccgtactcgttggcggaggtgtagggcttgcgcatgaggaggctgttgtgcccttcctcaatctgctggatcgcccaggcgttatcgtacctgcggcagtcagcacatacatcttctggtattgacatcggactgagggaggcgtacgaagtgacagggatatcaccacaatctaggaccttaaggtcattgctgaacgggtttgcctgaagggggacattgtagccgccgctgcacaaacaacgttagctccgcattgttcccgtttccttggatctgggagatctgaatatcctgaacagaagagctaatccaaggagcaagggagacgcactaaagattcaaccgcctgcttccctgtcggattccactgggcccaaacctcgctccaggtctgtaagaagttcccgtgtcaaagggcgctccgatgaacgcaatatggaatctctgatattcgctcgcgagccaacaaaagtagtgcagacgtcctaaggtcgagataccggagaagacagagtcggcctagcatcatgtctgtcagatgtcggaccagggatagaggatatgctgtgagagtgcacgatacctgggtgccgccgtcaccgggcagagtgttgtaccagagcttttgcaaggggcccgtcagggagtctggtggctgctgtgggcagcggccaccgatgagagggagagggcgagcaggctcacagggacgagcatgttgagtgcttcctaaggatgagggtgggttacgggatagcttgaaatgaggggatggctatttatgtatgcacccatacattggggctccccattccaaagccgagatcgggtatgctatctcttctaacgatacatggacttgggatagacgattggtctcatctcatcatcaaccctcacggatgcatacccacagtacggcacaactgcagactgttctctcccccgaccttcttaatcgaggcgatatcctgagatactcgggctgaatggattcttctccgcatgataagactcttttcatcctgctttcttcattttgttttcttatcctgcactcataatcctggcactgatagatccactacggcggcacgcggttcttttctcccggccttccgaataagagcaatagggcgagaatgcaagcatctggtcgaaatcctcgtactgataagcactctacgtccgcggagtaaagaatgacgtttggaagccagcttcgttgaatagaagtatatccgtcccaaaaaggaagttcgggagagaccctaggtgggatgccgaggctaagtgtattgtctccccccagttcttggccagactaatagcgatctgcttccttatcaagctttaaagagttaaaaatgacacgatcaatttgtcttgccttgtccttgctccttatcagtatccctaaaagtctctggatctagaccatgggatttcccgtcaccgaatcccatttatcgatcttacattgacgatttcatcatagttctgctagcctgctatccccgcagtctagtcctcggaaagatagaaaaagtaaaaagtaatgtatggcatggttgagggtcccgataccggccaaattatgccagtgcaggccttccttgtctgaaatggtgcactcaactgcagtttaacttatcagtacagggtaaactgtcgtggcaccatagaagagtaacgcggttattgaaatgttcagcactagactacaacctcccttcctcttcctctgcataagcagcctcatccatcctcttaaatgccttcctcacttccttgtcaaagtcgctggctgcaacaatcacccactccaacgctcccaccaggtagagcgccacacactggccaacccatagccccttcaatccccacccatgaaacgccaaatacacgcctagtggcagcgcgccgcatagtagctgacgatgttgacagcggttcaacatgctgncgcccataccttgaagacttcaccgcaggacccgtt

SEQ ID NO: 4061 - DNA, 3154 bp, Emericella nidulans
tggccggtgtctcgtacctctcactcgttcctattgcgagcccttcccagccccgtaaggtaggcttgcttgccggtctcatacagaccccgggttcggattcggattcgggtccgggttcgagtttctggaacattatgagaagcttcaagatttgcattgcccaacgagtcggctcctagtgatgacactggagttcgagcaggcatcaatgttctatacgagctgtccatatgcggcggagcacatacgcagatctggatgagcacatggctgagctcaatcggtcactaacactaaaccttacccaagccaccgcaggcaactgatctcgtttcaaggtggtctcaaacgggccccaaatatataaaaagggtgctgagtaccgcggcttggaactctttccgtctaagatacctatcaatcacctctacttcggttacaattcttctctcctgcaatgaactcgatcctaccgtggtcattagtgctcctggcactgggattcgctgaatgtgttctcagcaacccgcgtcaaaatgcctccatagcagctatcgggactgtcaatctgcagacaggtgtggattgtgagtgcagccagctggcttcgtcctatccagaccaaatcctcttcccgaacttggcggattacaccacccagacaatccagatgtccgggcaggccttagcccggcatgtatctttcttcccagctcagctgaccaggtacctgatgcgattggtctattcttcaaatgcggtgcccagtttgctgtgcgcggcggcggacatatgaatgcaagtacctcgtttgcttagactttgttgcaagttacgctggctgacgaaacgtacaatagtatcccggctcaaacaatattgatggaggtgtcctattggccctcaacagcatgaaggactacaaagttgacaatgaagccatcaccgtcagccctgaatgacctggtacgacgtgttctctgccctggaaccatacggccgcgttgccataggtggccggcttaagaccatcggggtcccaggcctgacgcttatcggcggcatctcctacttcagcaataagtacgggtttgccatggacaatgtggtcaaatacgaggttgttctgggcaacggtacaaagatcacagctgtgccacgtcgcaacccgacctcttctgaaccctcaagggcggcgccaacaacttcgtcgtagtgacaagattccgactacagacatactcgatgcccatatcagcacaacaatccagcagttcaacgagacgggcatatacgatttcgtccgggcctcgtgcaacctggttctcgccgacgatgacgcttcgacagcggctggggttatcttgaccatcacctacaacgtaaccacttccagggcctcagcagtcattctcggtgtgcaggagggcataatcagtcctccgccgcggattcgcaaactttattgccattcctggaacctccaaggctcacaacgtcaccacctccaaacaatgggttcgaatcttgactctcctaagcaaatgttccggtacgttccactgcttctgcttctcctcctctctacctaccggagggagaattgtgccacatacttaccctaccagtatcgtgttcggccatcactccatgttcgagacctggaaagcagcggtggcgcagatcgccgacatccagggcctgtacccaaccttcgtgtcaacctgtcccccgccagcgccgcttctgtggcaaagaccaaccagatcggtaatacctggggtgtttttgaggagccgctcatctgtaagtgccgttcgtttccttatgtcaataccctttcaccctgagcattgattaacatttccatagggtggcaagtcaccactggatgggatagagccgaggacagccttcgcgtcgaggcttgggtccgtcacctggtagagcatctgcatgcaaacaacaagcgcaacaatctggcaagagagtttatctacatgggtgacgcaggcgaatggcaggatccctttgtcgggtttccggctgagaacgtgcagcgcatgagggacattcggcagatttatgacccatcgggcacgttttcacggctgaattggggcggctttaagcttggttactgagggcgaactagatctccacgttggggcctgcatgtccatacggggaaattctatatgggaggggcagtggactggatttgtcttgaggtttttgcattagacactatgtagcatcggctcctcagctggtttctcagatagaaagagtgcgtcgaatcttttgacgttctcgtatcactctttcgacatacaacctactatgatttatactagtacctggttaccctatccaccacagtaatagggcagagggcattgaatgtcctctgcttctcggaaattccaaaatatatacgacgatcagacatgtcgatatactcgagatttgctcgcataatgcagctagcttttgccctgaatatgtgattaccactcccagaatggggtttctgaattgctacaggtcatatcacactattttgcgaaagatcttcaagcgtttgatcaaaaactactagagtcccattaggatccaagtacagaccttgtcaaggttaatgaccctaaaccagctgcctaatccgaagagacatagtgatactcttatttgaatccttttggaatggcaacaaagataggctaaaaaggtagggtttatgcatgaaaatgcatattatttcgcatttaagccctactttgtagttataatttctcttcaaacggacaaacccaactgttccatcgccactgcggccagccttgttatcggtccagtaacaaaggagaactgcgatgggatgcgtccccagttttcatcaccaatcattcggtgaggaacaccggcgaaaacccccttaccaggggggagtgggcccttaaggggcgaagtttgggaccccagcccttggattgggttccagggggttgcatttgggtttcccatttagggaaaggttaagggaagggggcttttggtgtattttaaagggaaggggttccggggtttttgggaaaattcttaaagaaggaaaggagaaaaaaggctccgggggggcatactttttgcc

SEQ ID NO: 4062 - DNA, 3672 bp, Emericella nidulans
gatgtcaatctatgaaccgggcttccagcgctgccaaatcccaacagcaaatttgcagccttttaggtagcctcggtgacgaaataagcaggccgtcctttttgcgtcaggttggtgaatcagggttgagataatcacatgcctgccgatagctctaggtgtcacgggcccaatgacgttatttcaccgacctcctcggatgattgtcccatcccaggattcaaagctaggcgcgtccttttggaaaggatttttttttcctactctcgcatcatacgttgagcttgaagttggtgctttcgccggaagaagctgattgttagtcgagcaacatgtcagaagacgattatgaactggtatgactgcttgaggttcaatgtctgaacttttttttggctaactttctgcaacttgaactttttaggatgcttatcaactgtatcttaaatatgaagagagtccgccaaaagaagattggagaaaagtggcgcttcgaggaccggcgttaccaaccatagggaatgctgttgctggtgccgttggcgctgcagcgtcgaaccttgccacttatccgttaagccttatcattgcgagattgcaaacccagaagcgacggggacggagagcaagcgatgaacagaaacacgaagatggtgatgagtatgctgggatagtggatgcagcgcggaaaatatactcgaaggagggcatcagcggtctttattctggccttgtgcaggacacgctcaaaagtgtgcttgatgcgtttttgttcttcttagcgtacgagttttttaggcagcggaggattgctgcgaggtacggttcgcagcgcaaatcaaggcataaggtattgcctgttcttgatgaattggctgtcggagtgctggctggggcgttttccaaattcttcacgacgcctttatcgaacatcgtggcccggaaacagacgtcgaagacttcagctagctcgtcgcaaattgcgtcaaagattctctcggagaagggtattgcagggttctggtccgggtactccgcctcgcttatcctcacgttgaatccgtccatcaccttcttcctcaacgggattctgaaatccgttcttcgccggagcaagggggctccttcgtctgcagccgtcaagttcttgattgccgctctcagcaagtcagcagcgtcctcgatcacataccctttttcaatggcaaagactcgttcccaagtatcgggttctagttcgagatccaaagatgaaggaacaaacgcgagtgatgacaatgattcagatgagatcttctttgtgccatcgatcatatctagcgtcatcaccatagctcgaactgagggggtctctgagttgtacgccggcctccgcggagaagtactcaaagggttcttctcccatggattcacaatgcttgcaaaagatgctgtctactctggaattgtccgggcttattatctcattctcattctgagcagacggtatcctagccctgaggaactgcttgaagcggcccgagaacgggctgaagaatatgctgaggcagctcgagaaggcgcaaaggatcttgcagagaaggcgaagagtaacacagaagaaatactggacagccacactggcagtgcagcagtcgacatgacatctaatactaatccggttaatgttgacgcgctgggatcaaatgaaacggcggagttggtcggtgattatgtggaggacgaggcgagagagtggaagagcctgtatcattggttctgggagaaggagaaatttggtaaatagtgatcattataatctatatctagaagcgtggggtgtttagcaggtcgtgaacttttgttgagaatatatcagttttatgcatctaagtatacctacctggcttatgaaagttatgcatttgatgtaatgatctgcgccctacggaaaccccatgaatcgatgatgcggcggtggaaccgatcgagtcgatctagtgggactctcgctccagccgaccacacccagtcaaccacggttttcccctcttccaggcctcttccactcgcttctaccctgttgtccacattttctccatgtcgccagagccgcaaggtgctcctggtttgggagacttagaaaaagaactgacatgctctgtaagtatactctttgaaagcctcaacgccagcttcaaggcaagagggcgggcttcggcattcagccctgttatcttgcaggctattgcccccttgcatctattgaacaatcctgtcccctgatttcattgtttatctcgaacctggaggccgattctatttctcgaatgtgccctgctgaccactacgctagatttgcacagaattgctatttcagccgctcaccctccttgattgccttcataccttctgcggatcatgtttgaaagaatggttctacactcaagcaagtcgtcgaccgtccaccactactcctcgatatacctgcccatcatgccgtgcgagagttcgcgagactcgtccaaatgccaccgtgacgacactcttagagatggtgctgaccgccaatcctgagcgtgccaagccagctgctgaacgagcagagattgaaaagcgatataaacatggggagtcggttttcccgcctgtaacgtcctcagacatcagctcggcgggttctgacgaagaagaccagaggatcttggaggaggttcgtcagctgagtctacaggacaatcggagtcgaacgcaggcgacgggccatcggtcgcggcagtcatcacgaactcgtcggacggattctgctgattttaatgggcagagagaagatggtcgctctcggcgacggcgggatgaagagcgggcggcacgacgagaacgcacagcacgaactacggggcgggcagaggacgctagggaacggacgaggagaatcgaacaccaatcgagtctacgatctctgttaagcttatccgatactgaaactatggaggaggagattttacggcagatttttgaggaaggattgttggacgatatcgacttggataatctggaacctgggcaggaagaagagctcagcgagcgtattgctgatgcttaccgccggaggcatatgctgcgcacccgctcacagcggcgtcaagatacctcagaaccaccgcaggcacagagacaaactaatttccgcgcagggcctacgcagagttcgcaagaaacctctagcagccctgctacgccgaggtcaccactgctcgagccacccgcatcgcgcccaggaccatcaaaccatcaaagacatctttcagagcaagggagcaaccggcgaaggaggacttcaccggtgccatacaacccggcttcatcatccgacgttacgctgggccctgctcagagatcatctagtgacataatcccagatcgtcctcgcaactcgcattcacgccccccgccatccggatctgttgcgacacggtctcgacgcgctagttcgtctggtcaaagcgtccctcacattctgatcggggatcggaataggccctctagtaataatcgtactagaccatctatcaactctccaagacctacgacctcaacacggaatccctcagagaatccaagctctttgcggccgcggaatggaacatctgagatctcaacgaacagctctgtagtcgctgaagttaacgg

SEQ ID NO: 4063 - DNA, 2167 bp, Emericella nidulans
tacaacctagtttgttcccaggtggaagacaaatctacctatctcctctccgcgaggactttggcacagcagcggtagggacatgtgagcaagagggtctagcagggaatccatatgtctttttttggctatatacaggaccaggtctgtgagggcggtttttacctggcccaggcccgggctcatagcaactcagatgtatgccacggatattctgctttggccttgcgtattgttaagatgttatcctgttatgggtaaccgggctccgatgctgactcaagattacatgattcctgatgatcggccctaagatcagctaagtactgattatttttctttccctatgtacctgcctttatctcactgtgatatcagtcttctgctgccggtttcatactgcttcaaaattgaaattgcttctcacgcagagccaggatactttacaggaatgtcatcatagaaagagttgataagaggtggtgcttaagaaaattgatattaatggggttattgtgcttggtagggcagttacctgctcgggttagagaggcctcccaggagccaagttcagaggccgactggagagaccgactggggagtctgatcgcagagcccgatcgcagagcccgaccgaccactcgtacagattaggactccaccttggactaggacagactccacagtaggatcaactagagactgggcacccagtacggtgtgaggaccagccaggaataggaccggacatagtaaggatctgctgactgttgatctggcagcaaacagtaccgcacggtccgagtaaagaccgattacaaagtaggcacagactttagggtagggatcttggaaaaatcaaatcttgttaaggatcagacactgcttaggtcaactcgtaaggtgttgttcctctgataggcggcgaagtatacaggctatttagtggatctaaattgaagcccctgggcggcctctctgaagcagcccgtccaccatactcaatactgacctttttcagaaactatagttctcttaactgtaaccttccaatagatattgccactctgcatagtaattcaggtacagcactgataacctgcccttctggcagtgacaaccgcctttgatttttgattttcaaataaatccgcaaatagtcgtttactttaccatctcctgcttgttgccaatatatggagaaaccaaggatgacaagcacatgatccatcctccgactgccgagcccatttgtatcacctttcactgaccgcaaaagcagaagtggtgcatgacaataatccaaaatagcccatctgccccctgtagagagttgatcgccttctcgtcggtggcgtgtgcagctaatataaagtcatctctaatattgtagtcttaaaggactatctttggctagggaacggtactgcgtggcttgtcacagcagaggtcactgtgcggtctgaacatgctctataggaaccaagagaggtggtccctcagtttcttccagtaagccggccaattcttgagctctccggattggcttgtatactcagagtaggccaagtgaacggtaactaattgaaccgcgggtcaccgagggtgctaggcttgctgatcctccagaacacatggggtttggggtggatggcaataaacggataatttaacccaaccacagtaaccaaataacccaaatgtgcaaattcttacctgattgaatagggatctgcttatcgaaaatcattacagttccgaaatacagtagtatagagtatttgatataaatacggcaataaaatactataattaatttctaattcatgccaagccgtgcgtgcgcaaatcccaggaactttgtcagaatcaattatccactgatgtgtttccccacgcagatgacgagaatatgccaagacagagtagtcctcttcctgttgattttcgcatggctgtaccagatgccggataaccgggcgcgggacttgcggcgccaagagctgatcgtgcttattctctttacaatctttgcggtggtgccgaatcaccgttatcaggagtggattccccaggcttggccccggcatattgtatgggggatatactgctacctggatcttggatgccccccatattattcagcacagctggcggccgttactag

SEQ ID NO: 4064 - DNA, 2423 bp, Emericella nidulans
tggcccatgtcagcagagtcgaggtctcgtggggtggaacgtgctccctcacactgtggagcgcgaaatgttgctcacatcgtcctcattaatcccagtccgaacaccaatcagagctccactatcttatatataccagggataatcgagagagcttcccccatattttggaacaaacatgcaatagactaaagaagtggttcagggcagcgagtgggcacctcggtatagctgttggtctgatctttccactgctctgtatcttccctagtctaaggttaacttagataatgcgatgagttagattcagatgtgccgcttattgatctgtgtagtaggaaaatacagcctgctgctgctccttattagatgtaaatgacacgtgacctacaaagccctcatcgccttcaggtatgtccctgaagatagtgctgcagtatggtgaggttaagatggctgccattggaactggtaggctttgctactactagtagaaatatcgaggtggtctcagccttacagctctattttgggtattttgaggaagctatcctatcaaactatatacaaagaaaagagcctagcttaacaaagtccccaagcgtaccaaagctggagctgcactaagtccagctagttaatctaatacatacaaaggtgtaggtacctgtttattctctccttcaactcatcacgactctagaactccgcgtgtcgacctgaccaccacacccgacaagagtctcacccgattccaggccctcgctcgactcattcgcgccttcgtccagcgcccccagcttcctcttcaccctctctgcaacattctcactctcaactgccggcgccacatgaatctgccagtccctagtccagtggcgtgggccgtaaaccttcgtccatggcacaagcgtcccctcgtcataagacgcgtgcgtctcctgctggtccaagagtccctcgcgctttccggtgttaacaaattcaataaactcttgtatccggcgcacgtataataaaacgccctcgtgcgcatctaccgctgcacctgttgcccagttaagtagcagtggctggaggaccggcgcatctgtgcagctagcgtggcttgtgccgagactcgtcatgaaccacgctgcaccggtacgctgtaaacaggtccgcacaaggtcacgcacgacttcaaagtgcggcctgcccatgaacaaactgaacttccggctccagctgtgcgagtggataaccagcaggggcacgccaatgtcatcgttcagcggcccgctcgctttccctggatcgagagcgatgcagcccgcgagcggaataggcagggcctgactcagatctgcagtgggacggcatgcttgtagcacgcccgtcgccccgtatgagtggccaactagtatcacacgctcaatgtccagcctccccttccagcctgcaagatagacgccctcgcggcgcgcattgtggcggaatacagtctgcccgtcgcctgcgttgagcatgcgcagcacccgcaccacttcctccatctcggcctgtcgaaaggaaagctgcgcgcgctgcagctccgcctcgtcaagcggcgggtcgtgatgcaggtgtttcgctgcaaagtgcagtacgctgcgtaggcggcgggcgcccgggcgtgcctgaccgtggccttgtccggtcggactgccatccgacgctacgactgtccctttgcgcccgccgccacgacgaaccacgctgccaggtccactgccgtcacgatgctcgagagcggctaccacgtaccctcgcgacgcgagctcgccacatagctgtgtgtaatccgtccgtgatgccgccacgccatggctgaaaacgataaccggataccgatgatgagtgtcagtcggagactcgcccagtttatcggcagagctcgggtcccgcaacgggatgtcgacgtcggccgggatgcgcacgctgccggcaagggcccagagcatgaaagcgaacacgcgatcgacgagccaattcgaggcgttgacgaagcgcgcgaatccctcaccgcgcagtcgaatgggctctatcagccatggatgtcgagatctggtggcgacggcgtctggagcggctgggtagtagagagtgaagaggacggtgtcgagctgaaaggcggcctggccgtctgaaaggtggatggagggatggacgatacgtccgtcacatggggcctcgatgtcaattgcaccaacccgatatggcccactatatggagggaacttgctggagagggatggcattatttttccaggtactctcgaagggcagagacggtcgaccatcttgaccatctttggatggttgcatgtgagacgatgtgacgtcattaatctggttcacctgtatccagccactaggctcaattaggattagctgccaaattc

SEQ ID NO: 4065 - DNA, 4037 bp, Emericella nidulans
gcgataattgttgcgcagggttctgggatgcaccgcaggtaagctcgctttgcgatcatagtaggtcccaagagtactgaccgcagtagcgtggaattttcgcaactcagcaagcccgacaagtgtgtgttgaaagcggatatggtggacactcttcactcgagaccgatccgtagctgttgccctgggacgtccaatttgcatcaacactgacgatgcggacgttgagatgctgacagaggaggattttgttgaagacgaaatcgacattgcagctgaatacccgccggaccctgttcacgtgcagtttttcttgcagtacgtgaagctctgcgagattatgggtcttgtcctgtcgcagcaatattcggtggcgtccaagtcacggcgaatgaatgcaatggatctcacccattccgacatggcgcttgcggactggcttcagaattgtcccagagaggtctgctggcagcgacaaaggcatcatttctgggcagctcttcttcacgcgaactactagtgagtgtatcattagacccaaggttggtcctccgccactgacattgatagcaccacgctttgcttgttgcaccgagctcatatgccaccggcatcatcggtcccaagtagttaccgagtcgaagagatggcgtacccgtcacgcactatcgccttccaggctgctggaataatcacatccatagttgagaacttgcagactcataacgagatttcgttacacgcttgcgttcatgtacgatggccctacagcataaacacgatctgccgctaacgatgagcagtgtttacagtcttttctcggctctgatcatgcacgtataccagatgcggtcatcggtgccctcgatcgtggccacctgccaggagagaatcaacatttgtatgcaggcgctcaaggatgtctccaaggtctggctcgtggcgaagatggtgcacactttgttcgagtcgatcttaggtaacaagttactggaagagcgtcttcaaaaagcggctggaaagaggcaccagcgggttaagcctgactcgaaccattctaatcagcacttgccgtcaagaaggccggatcctcctccaaagcgcaagttcgatgatatggacctcgctctacccaatggaggacctacgccaccagtttcgtacgagcgatctcgcccccagaccccagcagctaccccttctagagagcttccccaatccaccatgtccataccccaaacttcgcctactgctgccaaggatggtctgcctggggctggaaactcgcgcgcaaacacccgaccgacgacgccatttaacgctcagttctcgctacctgcaactcctcctgatttgttccttgtcacacgcacttcgcctaatctttcaccttctctctgggagaactttcagccagatcaactgttccccgacggcaccgctatcttcccagaacttacctcccctcaaaacacgactgttgatccacagcttcagatgcagtcgcaattacatacccacgatatggttcagcagcaaatgccgcctcggacttctctagcaggaacacagggaagccctgagattctgtccagcatgcctcctgcgatcggcatgcaaggccaaccgcaacagatgtacggaatggaccctcagcagtcttggcagatgccaggactcgaccctacagttgctggcgctatggataatgcaagccaagacgataattggagcagtagctcacgcagtggccctactgctccgacaacactcaacgtggaggattggtagagtaccgcctgtcaacaacgaaatcctgcacatactgactttattctaggttccaattcttcggtattaatggcagcttcggcgaaatggcagtttaattggttggcaatatagcatgttccgatttgtttcagtgctctcttaaataaacgcgggtacggcatggtcgctggattcggtggtattgaccttcacaggcgttccgtgaaccggatgcaatggatggtgtttatgggtcttgcttctcgctgggaacgtctaggacttgttcttgataccgtgggtgccgtggcagcgtacaggggcctttgtaatgtgcgtatgaaagttgacggcagattgaagtgattcgtcccaacgactctatatagaaagtcgctctagcccaggtactctatcaatcacgtgatatctataataggtttagctgaatgacgacatcgcagcctgtgttgggtgagccaatcagcgggagtggatgcgtatgactaaattcccggagatggagtaacgagatcggtgagccttgaggatgactctttggggcaaaatatcaattgacacgactttctctcctgattttgtacatatccctgttcctcaattatcggtgctttttgaggaattgtccgactcgctcatatcttcccatcctaccctcagtgaggattctcctttgactaaatctcgccttccttccgccactccgctttctccccgcagcgatgtcggcttccagtacactgaaaaaagcattccctcaggtcgacgctgagggccataatctgcccccttcacctgccccttcgagtcctcatggcagcaggcgctacaacatcgcaactgagcttgtctcctcacatctacgtacatcaagcgcgccgcaaaggacatgccgagagcctctgaacgaaggccgtgggtgtcgcgagttagctacttttctgatctttactttgcaacctttggcgattttaccgacggcctggctttttcttgagtagggaatataccttttggaatgcatttgagtttcaacgtatacatcatataaccatccgggagaatccatatataagtctggaccctatagcacctcttgtcgcagcccgtagatgtcagtttgatctgaatgctagtagtgttatctcacgccgcctaaagattctggataagatgcccgttgatctaaacagggatatcatcactaaatagcttctcagtacacgatatgagtacttgctgatctatcgccactggaagactgaaatacggtgtgaagctggcaagtgcagctgagacatagctttagtcattccgattgttgaatcatccaacacccttctaagcaacaccattgtgcagttaactcgatcctagtacttgacatgctcttgtagatgcatctggacctaaggcaggagagctcgaaagcacgtaacatccctagtgttcattgcagacacctggacagagatgcgttgtataccaagagcaagcactagaaactgtcagttgcagtaaaaatatatgcgctaacctctatgcagtctatatgcaatctatatacagtctatagcaatctatatgcggtctacgacaaatttcagcgcgcgatgccttgacacaaatgataaacaagtaatggaaaattcacagatttgcacccaacctcaccctgtacacacaacctctgcctctgctttcgatggagcgtcccatccaagcgaaactataagccaacagctcaaaccataaagcatttgccagaagggctgatggatcaccctactctgccttcttcgacgccttggttctcaacttcatcaaggcaaacaccaacgcgtacccactgatagcaaagatcacacagatacccgcatctctccagccgtagtagtagtgcttgatgttcagcgtcgtcaagaagtcactcccatcgcgaaattggcacaccctgcagtcagacgtcgcctctggattcgcgaggttaatcgcccaaccagaaccagtgacgtagtccttgagatattcggcacaggtcccgttcacaggatcaaagcgcgcgtactcatcatcattgcaaatgacattgttgccccagataccgaaggtcagcatgccagaaacaacatagttgaaagggttgaggtagtacagccagtacttaaaaaagacgttcatctgggtgtatgggacgaagacgccgcagaagagagccagtatagagaagatcaatgggtggt

SEQ ID NO: 4066 - DNA, 7296 bp, Emericella nidulans
ttagtatgtattatcagaggatggattgcagactacgagtatcatgtattgagcatctattgtacgggtcagtggaagaattgctgcggttctctatttcctggtcgcttgactactggttagatctcatgcataaatcttccgctatttcgtcgagatgtacctggtgaccaatatatatataattggaggcaaacaacgcatccagaatcgctacttcgtttcgaagaatgggaaagcgtgtcacttttatctagacctttgaatatgcgattcaagctaccgacgacaataagagtcagattcatttagctgtgcgtagacccaggtcatggctcctcatggaccaacggggatcataatgctgaaagtaactatatctgagccgcttagtatttgaataggcttagcaggtcagcctggtcgatatctttgttatttaatgctttgtaacctatttgctccagagatatagatagggaacatgcgggatataccgactcggaagagattttggtaattcaatgacacgatcactgatagtagtatcaatctagccggtgagaatcaatagtttaatataacgctgtgcagcatacgtaagcacgcggcacactttaatccacgtgtatctagatgcgcgcgaggcagtatgcacatggaggggccaattcaagccaaagagtctatgtcgtaccgtagtatgtagacaatcgaatgagccgaatgttatataaaaaccccgcaaactagcgaagtaatctccggagtcctggcagacttatgggaccaaagatgacaataggaaacacggcgcatggaccaagcccgttgccacgataactccaagtcccaatcccaatacgtactggcaacggaggggcttcgaaagcttgttcaaatgccgaatatacgctcgcggaaatgatggacgatgctgcggactgagtggatagcgatcttcgtggtcgagggcctcgagtcttgcactaaattgttcttcatttaatatttgtagtcaggagccaaaaaagtgcctctacggagatccaagtcgtcaagttcatcaatactgcctgagatgcttgcggcaagccgtgctacttacacctgtggtacggagagtcatatagaaagacacgtaactagtttgtagttgtcaacctggatatatcatatcagtgttattatgttagtttagcccgtatcatctttgcaaagacagtgccccttcagatcgctgacgccttgatttcggttgacattgaaagtctgcatgggtttattaggcggcgcttgcagcccactgttcctgatgcataagtctgactaagcttaggttagatcatcctgcataagtacttaggactcctctgtcactattcagccttgatctgagttgcgagcaaacatgctgattgccaatcatcgagtcgtcggaaaccacggctcgcacgtctgttgcacgactaggatccaatcttctgtgattgagactgtgtcggcactgtgtctgccgcctgtattgttctgaccagaattcagaatcgaatttcagaatggctaaatacggggtagatttcgtacagatacaataccgaccttgcagaggagaagaggctcggcttttataccctgcaacgttggagcagaaccggctgctaaggcccacataacctgcataagaccggggctcctcacaggctgctttgtttcagaaaacgctggggttaagggcgaaatgccagaactcaaccgagttcgcttgactcattgcctgttcatgaagaaacatccatgatccgcttacctgcgagcagattctggggctagttcccgagtgccgccaaacccattactatcgtcatctgtgtgcgcagggaccaagccatgtttcagcttaacaaatgttccacagatgttattcttgcagcatctcaaacgagattgtattgatcgcaactgtgtggctgatgtcatgcacacagtcgagtttaatataattatctagacggggacggaatcgaagttgggggagtaatgaaaaggccagtcaaattcaatatgattggcttgccccttaagcggaaggacaaggaagtcaattctccacagcagagcctcgaatcaagctctgattggctgtactcgtgcatgtgctaatttcggcactgccaagctcaggaacagacggcagtgtccatcagttgccagttagggacagagggggctcacgatagttggcgagaacgcggtcttggtaacgatggccagagtccagacgtggtcccagggcaccgtgaagctgatctgatggactcgagaaaaatttgcagatgatatgcctaatttgagcgccaaatgtcgctaatcgcatcctctgggatctcccgaacggcgaaaatggaaaaacaaacaaactacagtgggtggccacgtcgcccccccacttgcgactgcaaataatcagcgatgtacgcatggttccatgggtagtgctgctgaagataatctgggttatacctaccatggtaagccgccagtgttcctggctcaaccacggacagacgcgttgttgactgaaccgtggcaggtactgtcaggggcagccaaaatggcgttctcctgccattctctgtcgtagtatcaagtactccgtaagggaaataggattgacatgacaggccttaagaccaagaccatgtctcgaatctcgcagtggaacccctgaattaactggccagggttagcgggggcgtgctgattgtcattcgccgtctgccggggccgcacgcaacgccgctctgagcctaccgactgactctttccccctggcctctctgggctctggccaattcagtcccttctcgctccattaaggttcgctctcctttccctaaaacctcccttcctccttcttcctctttagcctccctctccctctcttcagagcgcttctctccaaaaccccccggctgtcgtccgtcatcgagttttcctgtccgaccagagagacttgtttctctgcgcacattcttttggaaacctcctttcttttctgaataccgctccttcgcatatcggcttcctatccgcattctttcgccccgtcgaatctcggtcccttccgcctgtcatttcaattcgtgtacagcactatattcggaacgaacgcgcgaccgggttgccgtcaatcgatgtacgtcaatcttttccagattccagtaatatatcctcgtgcatttttgtccactgagtcgctggttctagcggctgccgacactcgactccacacccatttgtgttccccccctggaccatcgcaagcacattgacctgcgggtgatattgggattgtcagaagagaagttggattactgactgcattcagcgaattgattagatatattgtcatttccgcgatctatacaagatgaagtactctttcgccctcaccctggccaccgctgggtccatggctgctgccgcccagcaccagcacggtcaccaccaccaacacagcaagcgtgaagtcgtcacggttgatggtcccactgtcgtcaaatacatgcttgataaccaactcatcagcgccgagaaagtgtgcgagggtatcaccgacggcaccttggcctgggctaacggccagcctccttctgatccttgccaggcttcctcgaccaccagcactgaagcctacacccctactgctaccgctgcgaagttcattgagactgaggcctcttcctctactgcgacctctacatccactaccgtgagcgtgccctcgagcaccacttctcagccggccgccagctcctccagtgcttccactgccactggattggatgctcccttccccgatggtgagcttgactgcagcactttcccctcggactacggtgccgtgcctctcgactaccttggtcttgacggctggtctggtatccagtatgtgaccctggttggcgagattataagcgacatcatcaccgccgtcaccggtgacagctgcactagcggagccatgtgctcgtacgcttgcccacctggttaccagaagtctcagtggccctctacccagggctccactggccagtccgttggtggtcttcagtgcaagttcggcaagctgtacctgaccaaccctgacctttccgacaagctttgcattaagggtgttggtggtgtcaaggccaagaacactctgagcgaccacgttgctgtgtgccgtactgactatcctggtgagtgatacccgtcagcaaatgcgagttgtgcttatggctaaccataaacaggaaccgaatctgagactatccccatcagccttaacagtggcgagaccaaggaagtgacttgccctgatggtgccacctactacaagtgggagggcaagaccacttctgctcagtactatgtcaaccctgccggtacctcgcaggaggagggttgccaatggggtgatggcagcaagcccatcggcaactgggccccgatcaaccttggtgttggcgagaacaacggcaaatggctttctatcttccagaactctcccaccaccaccgagaagctcgactttaacatcaagatccagggtgacaaccttagcggttcctgcaaatacgaagatggctccttcatctctgacactggctccaacgactctggctgcacggtaagctttcatgatctgattcgtccactgaaactgaggctaaattatttacaggtgcaagttatgtccggtgacgctaccttcgtcttctactagactggttgagggcccgttctcgttatcggtgcgctcagtgttggatgaccctatacgttcaggcaaacctgcaaatagaatacctttcgtgcctgttcgctattgattatgtccgccttcatcttgcattcttgtatcttagtatattgtcccatatgatttgaaaccgttattgctcattttctctcccattctctctccgcggggcttggggtgtatgtgcttaattattttctgctggcaagtaacattgacttcctcttttcatgtataccctggacatcgtctttgatataggaggttatttgcaacttgtacttcgcaaaccgtcaataagttgttcattgcttgttgatgattcgctgcagtagttcgttcgtaaaagagggaaaacacctaactttaggtttgctacattaggttacaggagacctcgaacgttcaagctggtggcttcaagatctcgaagccttagaagtgggtctaccatgagccttgaaatgacgacatacggaatgttaagtactgcgtagtatagaatgaatgcaatggctggcattggggctagcgcctgtctttgccgaggactgcatcggaggatttatgatcatttattggcgagcagcctcattctcgccccggggcgtcggatttttagattggctggttttgaccggtaacttacctcagtcacagcgcgtcgcgtcggtaaatctatacagcccgtgacaatcacagccggcactactgtactatcgacaaggcatagcccaacagaaacctggcgtacttgattgtacataacagaattaatgatgttcccgcactttcctagcctaggctcggcttgcaagaatagagaccagaaactgccttttttttttttatgcaaagggataatatgaagccaatcacaaacccaatttatttatgcagcggcacatggcgctaactatgcacggaccatgctcaagaaacgcgcacacgtgatttggcgtgagtcacgggatctcgaaccagaaaacgcgagatctgactcgacgcgcttgctaagctctacaggatacccaaattgtaaaaaaggagcgtaggtggtggccatttcaaaaaattgtctctactattctgttctatcatatacatgcagtgaaatgcatagttcctgatggtcacgctgtgggatgcgcgaggtgaaggtggagcagggccggcgcctatcgaacgcgtctcgatttctcgaggttgtaagcgtgcatttccgcgctgccagttccgccagggcattctcattccactacgcaccaactctctccttttttaacccccagtgctcttttcgttcctttccgtagattcgttctcgtgtcttactccccaacctcctagtcgccatttcgcggagggaagcttcagggctcttcctttttcgtcttcaccagtaccagctttccgtcctgtctctccctctggtttcttttccctctcgtgaaagaaaagagcccctgccgttgcctcgacgcgaataattgaacctcttactcttcttacgttagagctgctcaggaataacagttcgcgcttcagacgtgtcattcacaaatggagtcgtctcccccgaggagctgttcggttgctcctgtggcaggtgtgaagcgtccagcgtccttgttgcccgcgtttgagccattgagctcgtctccgtctcttcctcgaccacagaaacgtgtagcacgcgacgatgaccgtgccatttcaacttatcccacccccgtcccgacgtcgtcgacccatatcatgtcgtcctcgcctccaaggatgccaacatcatctcgccgtaacctgacctcaacactctcagaacgagcccctctctctacagttcctacgttgatgctccccgaaaccggcgagccaattatgatgggacggtccagcctttcatgtcagtaccagcttgctgccaaccgcatgatctcgagggtgcacgtcaaggccacctacaaaccggctcctaacccgttcgaccgagatagggtggagataatgtgcctagggtggaatggacttaaacttcactgccaaggaaagacgtatacgctggccaagggaaagacgttcacgtcggacatcaaggacgctgatatcatgatcgatgtttccgagagccgcgttttggtccaatggccgcgtggtgataggaaggaagacgtgtcgaccgactcggagcaaacctgggaggagacaacgccaacgcgcaagaagcaaactcaccgcagcctgcaggatagtccaggtgctgaacgccagcgcctcgcgtccccggtctccccatctcccgctgtcaagtccatgatccctccgtcgtctccactattcactccgactcgctctcgtaacgcggttgtcgtgtatgaagatgaagcttcacctgttcgcctccttcactcggatgacgcgttgaagccgtcttccagtgttgcatctcttttgcagagctcgcaatctagtgatctaagtgacct

SEQ ID NO: 4067 - DNA, 3650 bp, Emericella nidulans
ctgatatactccatgtgaggggaggtatatgctgaccaggacttgcatggcccctagtgtgtgttctgatgatgccccagtggaaccagcggggggacgtgcacccaggccaccagtatggggtggaggtttattgacatagagcgcgtgagcctctgtgtgatcatgtcaatagcgtgctcgttcgcgctggaaatgcatgaatcacctagattgctcgtcccccaggggcgaactgaagatgcagtggccgctttaataacattagctttaagaacagggctgattataatgcagaccctagccagttctgctgcctgttatgatcagatctcagtacggacgtggcttgaagagatatcctctatcaaggagcttttcctgggacaacggaacctccatcttatgagctgtttgttcttgctttgggctctcgttgggatatggtacactaccctttcttccctgattcatctgaattacttcctaatatgggtatccagctacccccctcttcaacgtcttcctcccgtaatacctcgcttcgcacgatgcaaatctcggcaacggcagcaactatcaaacataccgggacctagttctctccagtgtagcaggaatcttcggtccattgctcagcgcatacctcgtccgggttcgcaaactcggcgaccgaggcacactttttataaaaagctgcatctgcgcagttttcgccggtctatttacacaagttcgaacagatgcgcagagcatcggtttctcgtgcatgattaatttctggcttaatgctttgtatgcggttatatattcgtaagcctatcctgccgagcgttcggtatctgtatgctgatcttgcattgcctaccagatatactccctcatccttagaaacgaaacaccccgaagttggatgcgggttgcttatggcttgtggaagactggtctccatctctgcgccgtttattgcaacgtttggggatgttacgtcgggcgtaccgctctgggtttcttgtgctatgtacgtgtgtatggggctgttagggcttgccttaccgctgcttgaatgattctattggagctggaaatgcccttgaacaagtggattcaagtcactgaaagcttctctgctggtgggatgtctgctgagatactaaatgctgagcacttagggctagagtatgaggttggtgagaagaggtcttgggtaagaccataatacactttcggcgagtttatacttggaaatagcgacgctacctattccaaaaccaggagcagtatccgagcatgaagcattgatatgagcttacttgatggtcatgtattacgccagacatttccccaagcacgtcttctgtcacgtcattatttagggcagtatttagagccgccaagcgcgcagctcaggctacaatatctccatcaagatttagcagcgggctagcgtcttgtcaaaactggcatctgccaatggccgctgatatcgcgatatttagcaagcatagcacatggcctgggcgttacccacagtgggggaaaactccacctgcagaaaggagtctagatagcggcgatatccgaagctgcatataaggagcagctgtcgatacaagagcatcaagtatcgcaaactagatcaatcaagatgggacactctccagtgactgtcaaagccgatgctgacccagagcaaaactcggaccagctagtccagaaaccagtttcacgcttgacgcgatggtatcgtagcgctctgttcaacgtgatcatagtcgggttgatctcgttcacacaaccagggatctggaacgctctcaatagtacgccctcaccctgattcagggctactgccgatgctaataagacagacaccggtgccggcggccaacagaagccctacctggttaatggcgccaacagtctgaccttcggtatcatggtctttggctgtccgttgttctctattctcgccaatcgctacggccttcggcgggttcttatcctcggtacactaggatacgcgccgtactcagcaagcctgtatgtcaacaatcgctacggcacggagtggttcgtcctctttgggggcgccacttgcgggatcgcggcttctgcactatggtcgagtgagggagcaatcgcgttagggtatggaggtgttagagatcgaggcaagaatagtaagctcctccctttttttcccccctacgtatattctcctggagcggacatgtgctgatggagacagctggcatatggcttggactgcgcgaactgggccaactcatcggctcctcaatccagctctccctgaatgtcaaggacggcgagcgcggtaaggttgggtactcgacgtaccttgtcttgattgcgctccaatgcttgggactcccactcgcccttctcatctcgcacccttcaaaggttatccggtccgatggctcaagcattcccgacccgacgagacagaaagctgtcctcggcgagttccgcaaactctgggctcaggtcaagaagaagcacatccttctgttgataccaatactggttggattcaactggaacagtacataccaggggatctatctgaccaactacttcagcgtgcgcgcgcgcactctaggctccctgacttcgggcatctcgccacggccgccaatatgttttggggctggttctttgacacacaatacttgagccggcccaaactggccaggatcacatggttcacctttgccactatgatgcttgccctatttggatggcagttcggcaacgagaaactgtacgatgatacgcagccaaccattgactgggcgcagtcaaacttcggtcgacgattcgcagtcaacgtgctcttgcgattcatgaacgagtctcactttttgtttgtttattggatccttggtgtcttcaacgacgatctggagacgttgaccttgacggtcgggattgcgcgctgctttgagagcgtaggatcttgtcttgcctttggaatcggtgctgcgaaagtctcgcctatggtaaatctgattgttgcctttgtcatgttcgttctctgtatcccctcgacctcctgggtagtgttcatggtgccggagcatccagagactacgcccaaggatgatgagagttcccaggagccgcgtcggtagttgataatccccagagccagacgtcatagaataccatcagtgataagtctctcattcttgattgaagaaactacctgtatcgcgcaacgcaaaggctaacagctcttttgctggcattggtttgaggctttgcagactcgccacaagcgcaatgttattcactagtacagccctaactcggccgttgcctcaacgttcaatctcagtaataatcttggacatgcctattctctgctgatatacagcatctcattttctgcgaccttatgcagctacattacgaggatcaagcaacagcacccatgatgccaaagaataaaactggaacgaagcaacaaccacaacctggatgcggctttgtgcctgaggcaattacggagctccgccatgtcacgtgcttggcgctcgtatacaaccgcagcatagccttgaggcttcgcttcaaaccacaaaatgctaacgccatcattaaacataaagcatccgcacaaa

SEQ ID NO: 4068 - DNA, 1796 bp, Emericella nidulans
agacacctcaccgaccagctcctcaagaatggaaagcatacaattaccgcaatcactcgacccgaaagtaccaacagaattcccgatggagtcaaacttgcgcgtgtggattacagtagtgatgacgatagcgccctcgtcgaggtcctcaaaggccaacaagtgctgcttatcaccatgaacgtgatggcgccgcgcgatacagtcgtgaaaatcatccgcgccgcagccaaagctggggttcgttatatcgagccgaactggtacggccacgacgccgcgaacgatgcgctttgcagagatagtatgctaacggagaaccgagaccgcgccattgaggagatcaagaagctcggtgtaagtgcgtacttgctcctcgtctgcaacttctggtatgagttcagtctcggaggagggaccgatcggttcgggttcaacttcgcgaagaggacatttacgatattcgataacggggatgttgcgattaatacgacgacctggcctcagtgtggccgcgcgattgcgagtctgttgagtctgaaggaactgcccgaagacgagagtgacaccagccctacgctctcacagttcacgaatcggggcacttacgtgtcgagtttcagactcacgcagcgagatatgtttaaaagcgtcaagcgtgttacgggaactgctgatagtgagtggaaaatcacacgagaattatctctggtgcggttcaaagaaggccaagaagcattgaaagtccatgactggaaggcatttccgaagatgctgtatagccgaatgttctttcccaatggggacggtgactatgaatcgagactgggacttgacaatgctgtgcttgatcttcctgttgaagaattggatgaagccaccaaggaggggattcggatggggttggcgggtgaagtgcctttctcccattaagaaatgagcgtactcaagtggcaataccgccgcaacccggttctgggacgggattaccctgccagttaagctcttgagaagtttcctgatgtcagtataacccaaatgcagagatttcaaacttgctcttaaggttcacgaaagattgaaggaggaagatgaagcaacctacgatcagaggcggcgcaatcaagattgtatctttccagggaacctaaggccgtacaaggtatgcccacctgcaggtgtcacatcgaatatttgagtccgtttaagacctgacctgaagatgaagttgctggcctttcagtagaagaggatgttgtctgccgtgttgacactgtgacctctccagacttgccgcacaatttagagcttgttgagcatcggtgcttcactactagcggttcatgctattgctattccgcttcagcactcctgagctcctctgctcgacaatatgatatatatagaccttcaggagtaactcgaagacgagtgcaaataccagcggttacctacagtatcgtgtacttggaggttcctcaactggtcatggaagaccgctataacgcctggataaagtcaaaatgcgcgtgagtacatggtgtatatcaatgttccgggctgggacggcaagaggcgagcaactcatgggctctcaggttcacgatatggtctttttgttgtgagggaggagtcaaagaagcagctgtagaaatcggtacttcctttgtaaacgctagcggcactattgagtgtgcgcatgtgagactcatatataggcttcattcattcgtagaaaaccttcgcgttggatgagatgcaggggacgagggtagtttggttgcctctaagcattt

SEQ ID NO: 4069 - DNA, 3244 bp, Emericella nidulans
atcaccgttacgcggcgagtgaacgcttggtactcgcgcttcagccgcgaggtcatcctaagcggaacatgctagttaacaccaaagctggttgacgatatgaaatcaaggacaggaatgaacggaccatatggttgcacatggcgacgaagaggtcaaagaacagtttgcctcccttttccatctccatctgcatcgtgccgcttcgcttgaaagtcgacctgcttcggatgatgagggcaagatagtgagctcggagtttagattcatggtcgggagtgttggcgtaggcgtagcgcgcacttgcgaggatagtgctacactgaatgccggtgtgaaggccctgcttgacgagggataggcgcttcaggtgttcgaggccgtacttgttagcggcgcaactttttaccaggtatggtacgtcagtgactgtgatggacagatacaatgtaatatggcacatactagacagcagtgtctctcaatatttctgcgcctgcagccggatgaaagagcgtagctccatcggtctgtccgtcctcaagtttagggttctccagttcccatgtattgtgtttctcattttggaccagccgcgggtagtaatctcctctgtagaggtattcgagaatgcatgagaatacctccggttgttcttctggcaatgatatccgccggctgcttgatgggttcagcgatcgggctcgggaacatgcggttgcgaaaaaaggcgacacgcagaggatttctttgtgagcggcgaaaagtcgtctgtcagagccaacactgatggtgatgacggaggaagaggtagagctgattattgcagagactcagtgattcggacgatatccgggcgcaattgagttgtcttacctgccatcaggcggacttgctggagttcggcgccttacggggcctctcgatgcaactgaagcatcgcgagcatgtcgtctggaccgagaagccttcgaggtaccatatctggaagaaaagttgtttttgtgggattgatggtttcgcctggtcgggaggagttgttagagtagttttgagcctgcttggaagggtggatgggagcagaaagaaacagaaaaatgctgagttgaagaattaaggggcatctaggtaaatcaatggcagggaagttggtaaaacgcaggccttaccattacccttaccctgttagtatggaaaggtatcgcagcgtatggagaagcttctggttaggcaccgctagatgaatttgacgacggatggtgcaggtactggtcgaattcgaccgggcaagaatctgtcgccataaacggcgtcagtcgtttgtttgagctagaagtagttttcctctcgcatctcagtgatttatgcttggtggtgagttgaagacgcgcatttggtgtatttcacgcgtaaagtggtttcccaaaacacgaaacagccacgtaatcatgtgactctaacgtccaatcatatttcaagctaaagggatgtgtgtgggccggcagtccatcatcgttgattgatcattcttggtttgaaaacattcgtgatcagtcacttctaaggccagggtcagatggataggttataagttattcctgatgcgccaaggatgtgtcttgctacattgcaaagagaggagagccatggccaattggattctgctgacggcgctccatgcggcggccaacaacagtcaactcgtcatgcacatccccgtgcctgtatccaagtgataagattgataagtggaaatgttcatgaatatatgctaagaaaaacatgcgcctaaccatatcccagcccagaatgcgccgccgctgaaaacgccctttgtatacaaactcaacgctgtctgatatggcggagaatcctgctcatgatacaccagccagaccggaatccctgtcttaaagaaacactttcttggcttcccgaggatgactctcgttagggcagtatggacacttgaatcttgtgcccttgcagagtcgtttgagcgactcttccgcaatcacatgaccgcagggcatcatcatgggcggatttgcgtcggtcgtctgttctttcgaaacaggacacacaaaaatagaatggaataggtaggacggcggaagtggaatctcgacctgataatcacattagtcaagagccaaacccgctaactttatctcaacataccggtagttcgtgctctgtagtccactcggtccgtttggctttcatgatggtctgcaacttcaatagtgtaggtagagctatcgcaccggcagtcgcagcaatatagagcggcgaatcaggggacagtcctagtaatgcacagaactctcgagtgaaagaatgtgatacatcagaccatgcagacggattgttgaagatgtttttgtaaggagagtcaggcagattagggctgaaagccatcgctcccattagctgctggatttctcgcatgtatctgggaaagaaagcttgaaattcgcgcctggcatactccagtgctgcttgtcgtccttcaggagtaggtccgcgctgctcttggccaccatgaaagagccaaacgaactgtagtctgcataattcaaattcgaggttgcttcctctcgcctctagtgccaccttgttctcctcctttctcgaccactctatagctggcagcaagacattatactattcgagttcgtgaagtatacggtacatgttgtggaatacgacgcggactttgcttgaaggcactccaccaatgttcaagagcgcggaagatacatccatattatcggagtgaaagctctgacagatttctgcagacctttatcgggctacctttgacagagaagccgaacccacggagaactgtgctttagggagtaagtgcatggcgatggcccggatgattaggtggtccatggaccagaggacatcgtgctacgaagctcggaagacgctaacattaagagcttgggaattatgtcagccctgggaacaatgtacactgtagatgctacctatctaggccttgatgcttgctagcccgtggaagttctctagtggcatgatggatcaagcaattgacgggattgaatcggcaagtatccggtttattgacaaaggttcaggcgacccaacattgggccacctaaaataaacgcaccacccgggattttgccctggacgatagctatgtccgacattaagctcgccataatctacagcgctgttttgaaacctgggaaaaggtgccccgatt

SEQ ID NO: 4070 - DNA, 4050 bp, Emericella nidulans
atgtatctactttaggaaatccgctctagccccgccggcgcacgggccagcaccagggggctcgtcatgtgatggggcggattaccgtgtcgaggcgcgtcccgctccaataatcgcatttgcggccagtagtgtcggtcgttgccagttttgcttttgtttcgcaggtcatgctgatgctgaggactcttatcgtctgtcttggggttcaatttactaatagcggaattctgccagcttgacatttctttctctgacactctcaaaaatctctcttcccgactattctaaactgatcccagcaatcagcaaaatcagaaaaatgttacggtggtttgtgaccccggtaactcaatggcttctggaccctaataaccatgcttatcgctccccaggtaccaggctaagctcgcaaagcagcccattctcacagccagtgttaccagcgctgtatgtccttataatgacctgacagccgccaaccttactttctctttcgttttcaatgctgctggaaactgtagctaaccccttgcccctttaaggtgcttttcggcgctggtgatgctttagcgcagcaggcagttgagcgcagaggcctcgagaagcatgatttcgccagaacagggcgtatgactttttacggtggtggtgagttaatactgtgttattacatcatgtcgatctgttcctgttcgctcgtcatattacatgtttttagctaacgccgatcaagctgtctttggaccggtcgccacgctttggtttcggtttttgcagcgcaacatcgctttaaataatccgaaagcaacaattattgctcgtgtagcggctgatcaatgtctctttgcgccggctcatcttaccttcttcctgtcgtcaatggccatcatggaaggcacagatcctgtggcgaagtggaagcagagtttcgtcccaggctacaaagctaatctcgcggtttggcctttagtccagggcattaactttgcttttgtgcccctggagctgcgtgtgctcgtagtcaatgttataagcttgggtacttaccgttcttctccgtctcacccaacattgctgacttgtccatcaggttggaactgcgttctgagcgtgattaacagcggcggtaaatagtctgactacttcgtcttggaggattatgcttggtgataccctttataccgccgtgccttggcttgggcatatgcggatgctttctttcttctctttacttctcgcttcaccccttttggatctcggtgggtggtttaattgttcctgctagagggatgctcgactagagctgtgggaaaagcgagcttgatagatttctcatggcttttcagattaccgctatagaccagggcttactaaaatataatagaactatttattctttaaaatctttacttcaagttccttttcctcccataagaagactcctggcctttactttccacctattagttactccagcttctccatgttcttagggttttttaagcagccaataagattcctgatcaagtgagccgcccaaaaaggaaaagcggaacagctgcggcaatcttcaaaaaaggatcggaagaaacctcaccataactgcagtgtcctaacactaacatatccatatcgtgttttctgcctggagcagttgttcaacttccctgtggctttgcgcgttcacggcctccttcctctcatcttcatctggactgctccttccctaacggccgtcacaacacaaattttcctctcccccaccgaaaccgctcgccttcaacgcccatttactctcaaggcaaactcaccgctcgaaagccatcgcatttcgaaatacccgcagtttcatcttcattcagtcaatatggccgccgtcgcagagaatgctcccccggtgacgaacgagaacacggcccctcctgccgttgcagttgaagagaagaccgagaaggccaacggcgacatcgtcacggtcttccacgacccagagaacttcaacgtaaagcatcccctgatgcacgaatggactctttggttcacaaagcctcctagtggaaaggtagagcgcgcctccctccgaccgcgcaaagtctttcgcttacgttggcttatattagggcgacaactggaacgatctgctgaaggaggttgtgaccttcaactctgtagaggaattctggggcatttatgtatgtcgattctgtctgattttccaaactcgcgtctccctaatggctctctttgcttagaacaacataactccgacctctgaactaggccttaaggcagactaccaccttttcaagaaaggtgttcgccccgagtgggaagacccgcagaacaagcacggcggcaagtggtcattctcgttcaaggataagcgatcggtccctattgatgatctttggctgcacgcacagctggcggccatcggcgaaaccctcgagaatgatggcgataatgaagtcatgggtgtcgttgtgaacgtgcgtaagggtttttaccgtgtcggtctctggacacggactgttggcaaaacccttcccggtgacaagagcggacgcacacccgctcagggtaaggaagtgcttgagtcaatcggccgccgcttcaaggaagtactccgtcttggtccaaatgacagtgttgaattctcgggacacacggatagcgcccacagtggcagcacaagagccaaggccaaatacactgtttaagaaatgcggcagacggtgctttcatgaatcatgagttctgaatcgcttcaagacatgaaattacggagcaaccttttaacatgggcgtgactgatgaatgggttgaatcacgaggaacggatctaccgatgtccacacccgcgaaaccctctcgattcgctgatgatgactttgctagtagacaccagctttttacctttttcatgctttatttttgacgagtctataccacttatattggagttctatttatggggctgaagaaagcaaagcgctgcgagttcacatcacaaaagcgaaggcgggatcatgaatccagtaatctatatcagtactcagtgtcaatctactatcagtatacgtagtacttccatacccttccaaagggagatctagcaacattatatttcggatttcgtaacaagcaagatggtgagggcttcccgaggagctgacgctaattggcgattattacgcgtaggccatccaatgcgattaagtggtctaagtaaaataacgtgcgaaaatactctactacgtatgaacataattcgtcataaatcttgtactgagttgtctccggttagagtccagttggtgcttgtgtttacctggtgtatgtccataccgcccatcacaaaaatatatattctttggcctttgaaaagtaagccatttttctacgttgcctaagcctgacataacgccgtacttccacatctcttcgacttttgtaccatcttccatctcagatagagtgtggtaactgagacacagaagcctccctagtggcacacaacattgcctactcccgaactactatcattgtcgagattgtcctgatagtattcctaattgctgggaagagtaaggacatggtgcagcagaaggtgcaccaggatattcctcagctgctgcgtaaaggattggtaggacttgctgttgtcgagggagatgtgtcaagatttgagctctaggtttcgcagaaggatttaattactcgtaactgtggccctgtattctattaacggccaaagagatttggcatgtattttgacactgcttgacatcaatgatactcggtaagaccatgaacaaccagctataggtaggcgtcggctgctggaactctatgacacttctcagggaatccgaaatggcctctacagtatattcaatttggttgttactgaaagtagaccggatttacttaacaaatgtatgaactagcttgtatttcggcggcctgaagtgagaggtgtgtagttctttcttgtgtttctcaacagttatcagccatctttcttctctatcctctccagatgat

SEQ ID NO: 4071 - DNA, 4293 bp, Emericella nidulans
ttcctgatgagttataggtcgcggagtttgggaggaagactttgcctggtagaagcgaggctagttcggtgcacggtgaggaagatacggatagggcatatgggagtgagacgagagcgaatatggctaccagggactttaaacggggcgacatgatggatggcttcattggcaagggtttctgctacagggccctggagcgggcacttgcacgtacctttatacccagaaaagtcagtcctgaatagaatgtcagcagaatatacaaggtcggttaggactactccatgtagtgaggatacgaagctagcataagcactaatggcgttggccctgcatttctgtgacaaatgcacagcaccatgtgcaccgagtgatgatgactgcaggcaagcggcttagggctacagggagtaccataattagcactccccgttcatgccgatcaactctaggtgaagactctgcatgcaaaacgcactgaccgttgtctgacacgtttcagccaccttaccagtgccatcaacacgtggtaatcagcagcaattgaagaacccttgaataacgtaatcggtaagcgagggagacccctccacccgactctgggtcttaccaccaaagaaaaacccaatctgaaacattaagcaagcatttctatataagatctacatgcgacaggattcaggcactgcaactatttatgcccaatgtttttggcagtcaaatgcaccgtggggggtagtaaggaatgtcaaatgattcgtcactttcaaaacaccgagaaacctcaatattgccggacgaggcacaattaaggactatctcaaggtaactcattaggtctagttatgggtctccctctttcaatccaatgccgccattaatacatcaccaaaagctccccgctcttcgtcttctttggtatggcgttggatatcgacggcctccatctcttgtcccctgctacccaacttcagaattgaagataaccaaaactcctggagactttgagtctgcattaggacggagaggcagttgcagtaacggcagctcgattcgcagattcttttcttatatctcatcttccctgccgcccctccgatcttggcaagtgtcaaagaatatttatctacaattcacgccaactgctggcttctcgacagaggtttacttaggggtcactgcagaactcccacaagtggctcgtaagagccccatcgcccagagcccgttttttaactttcccttttccccatctctgctccattcatggagcttcactataggacaatgtcttcctgagtaacgactaacacacctcgttatggaaggcgttctatatggatactagcgggagttcttgggcatgtttctgtcatgactagattcgagaggtcaattcctgttgtcggcttgagtccttgtgcgtaggactagcaaacgtaaattctccagccctatggtttggggcagctctatcagctgacgtctgtacgaagtcttctctcgcaaacaaatcgcccttgtgggctccctgttacgatgctgggctcttatctacagcgggtgcgcgaaataatgactttctgtacacatcatcgaacaataggtgtggcaccctttcagtgacaggtatgtattctcctatcaaacttattatgccgttcctgctaattgaatttgagcagaccactttatggcaccagaacgcagccggcaagccagctgatgattgttgatatggtcagttgcgagggtcaaattacgcatttgttaaatgctaaggtatgcaactcgagagaaagtaaatttctctcgcgatacaacgacttatgtggtggtgtttatctcgaggcgggaccaatgtctgtacaatgtcaatgtatacatctacaattaccagtgttgtatgtctattgctacagtgggctaaagacgccatatccacatgtaacgcagagtgatctggagagctttcaggagcggctcctagctagttgactcggtatgtaaggatgcccttccccctagagtatatgtcttgggcgccgccttgatacgcttgaatatgtttagaggaacaagacccctaatacacaagctctgtgactttgaaggcaagcatgaagcgtgcttatccttgcagtttggacctcagacaagtacaatacagcaagccgtaaatacccctcttgtacctctctagattccaccgtttttcctagatataggttgctttatctgcttcttttctgtataatattcttctctctcactggcttgaacgcattttttatgcctccatccctagtgagtaaacaacgttctctcacacctcatattcccgtaccaggggtcttatctgaccctctgtagcaacgcaacctatataacgctcaccgcagcatgaaattcacttgcgcagaaaagtgggacgtctgcgttaccaaaaagaaagagggtaagaccgccaaacggctggttctacatacgggtgtcattctataaacaattttctagtattttcattttcatattctctaatgagtttcgagcctgctgctcatgacaggtttcgattttaatctctgtcggtatacgctcgtagtcaggttagcaaacgggtgtcgtaacacgcgaacagcttcctatggaacaataatatcagcactggtcgcctttcatgtccagtaaagtagcggcatctcaagcaaatattctcatatgaggtgtatacgaagtatctactgcgcacttagttgagaaactagggcgaaaatatattctcactagttcacgcacttaaaaccctcgcgccgattgatgcgaagcttgtattaacacagaatatgctagaaccacagcacaacccacacgctcatataaggtactatacagtttagtgaatgaaagaatccatcagcgacagagccattttcgtagatggcagaggggtaacctgttgcgcagaaattattttagaaactcattaccttataagtttggcatacataggacaaaagaaaacggtactattcaacaacgagtcgcgtggtctaatggttatgatttcccgttcacattgaagtgagcattactactactagtagaataccgggaaggttcccggttcgatcccgggcgcgactagtttttttgaatttattttcaatcgccccaccacctacataggtgctggttttggcgaccaaagcccctcatgctgccttgaggaagctcgtggaattttacctcgacatagttagtcactgtattggcagagctacctatttttccaagacttaattcatatgtacccagcccgtcaaggcaggctacttcttcgttctcggttccccctagaaaccctagacacgttaatgctaccccatacgttcgtgcgaatcacctagtggccgggtcagtatagcggccatagatcgacccaacaagaaacaaagcttgcttatcgtttacggctgtgctgctggacgataggatggtgacctttgagctctcgtcggccatcggacgtccgacgttatcaggatcgggcgtccgctatcactattctgtatggagctatgatggatgagagcccttatcagcggcaccatcaagcgttcttataagccatacgccgtcgaacgctgcatcttagcggccctatctccatgaccacgggcgtgtatcgcaaaatggaccgcctctccatcagttcgcgactggccaaagccaagaagtatgtccagacccgcgaggcaccagagaagggcgctgcctatttcaacgaggacctgcttcctacgccgcctggtaggtagtttatccaaggcacgaagcgagcccttgccaacgagctaggtagaccatcgaacatggacggcccttcactttttcacttactacctcaccacgaccttctcccctagcagctacaatctaggcgcaaccttaatcagtctgggtctggtacgccctcactacccatataccataagcgtcccctatactaacggcgacacggctggtggcactgcatcctcgccgccataatcggctccttcatcctttctatcattgtcgtcctcaattcccgcggggcaacccgctaccacgtcggctaccccgtctacgtgcgtgcatcgtctggcgtcggtggttcgcgtctctttgtgaccgtccgcgcctctgtcgcaatcatctacttcgcgacccagtcctactacggcgggatgatcactccgtctgcctgcgcgcaatcttcggagccagctgggtgaactgccgaat

SEQ ID NO: 4072 - DNA, 1275 bp, Emericella nidulans
agaagattctatggtgtcctgggggggatagtacgacttgacaaaattcgcttccagaacgctcttctatcgaccacaccgacccctcgggaacattgtcttgtcggcccgctcccacgaccctaatactcccttggcagacttcctctggttcgggccgcggtgggacgtcgcttcgaacacctttcgactcccatacttccaccgcaattctgcaaccgagttcctggcgtctatatacgggaatggcctcggccgttcggacgagttccagcctggcggcgggagcgtagaggtatctcacacgccgcatgggaatttcagcaaagagtatgtctgggagaatcgggtgcaagtcaatgagccgaggaggatcctggagaatcaaatgaccattatggttgaaagtagcaggaactttctgtttacggagtatgctgtgtctgggtgtggagtgtttaagagccagggaacggatccgagggtttgggacatcctgcctgatagattctccgcttatccagggattaaagggattctggaagcggttaaaaaatataataaggagaggaaggagagcctggacgtgtattacgatgatgagcggttggcgaagttggtgaaatgaagcggcagtgaagccatactggagggtgtgattgcacacagattaggaagctaatcataacaccctaccagtggaagtccctcctgccctgcgtcaaggggatgagctgggttaactataatcacttatattaaagaattctatattccgcatcagtaatataaagacagcaaaatgcagaattagtcaattttgaaattcagatgtacagtcattagcctatcttgcatctcaatttatttttattttatttttattttgtcgttgttgttgttgctattaataacgctgctagagaagagctagatgcctcccatgtgctctttaaaccatattatatctcaatgcagatgtagacgcgcagtacgtcaaacagagccctgctgataccaagataccagtgccggtaatgcttctctctgagactgactatgcaaaacctctgtatagggaagatgtcacctggtataaaatcacaagtggatggcagacacggttgacagtggcctcccgctgagctgaaaattgattttccttgcgcactatagaacaacaagaataaaagatggacagtgaatatgattgcagaatataaaaggcccagactacgactccatagatctctgctgaccgtcgggagttggcga

SEQ ID NO: 4073 - DNA, 3577 bp, Emericella nidulans
ccagcaaaactaggatctgcttctccttgccgcctaacatatagattatgcgtccctttgcagaggacctcccacaaatgaccttttggtacatcattctcttctccatgcgtaggatttgcaagaagcgccagaaaggtcttgttgataatctgtttggcctaccgtttcacccagtacacttatggacacctgtcgctagaccaatagttaggatttacgtgtaaggcgcatgacccacatctgaagccgttctttgagatcacgcctgggattctgggtcgagggcagatataaagagtatgcttgggtcgaccatgacaaaacccgtgacgggtccaaggttacaacccgaacctgcgggtcgggtcgagggttagggacccgccacgggttagcgggttctgggtaactcacgggaaccgccaagaacaaaccttgcataaaatgtcctaatcaggctatatactctacataaaaattgctgatgtacccaaatactaacgtaacgaacccacaagcggcagcccgctcaacaatctatactgaggctatccagactgtcactataattccagaaagttgatcgcgtttagattagctgagcacgaggacaggattatatttgtacccgttgagcagcggcagtttcttacatcctagagtcaactctctgtggccgacttcaagggagccagtattgcgaagcacaacacgccgactgtcataagctatatggaacccaggaagaggccttaggatggtgtatataatggtcggtgactgcggagcaattccaacacatgttcaggttaagggttcggcaaatctgtcgctcagcgaggctgatcctacccagatatacacctgtagaacgcgtgatgtccccttatcagaacctatctattcaggcagttagatatcctatagcgcagggagataaggctcaaaccatttagaaggctcctgccaggttctctacgccttcgtattccaggacgcgctccaccaacctgttcaggatgtagaggtctatgatttgtgtatgagataccaatcttttggcctgtgagtactgtaccgatttcgctattcatcatcttcttcctggtagtcagagggaagcgaaaagttccatgtgatgctcgtaggtagactcttccgactagctacacagtcctgcatgtttaggacaattcgatttttcaccaccacacacataagagcttgctcctcctcataagcagtatcctcatcaccttgtgcctcttgcattttatgccgcatctttgtggttgtccccggtgacatcttatccctcgagggcacacatacacctttctggcttcccatctggggtagtgctcaacacttgtgtctgtaggcagtgttgtagaaagatatctagtcccttcaacttcttcgacggagcactccacagctagtgcatggaggtatcgcttattttcaagctagtcttggagccgagcaatttgaaagtatcgtgcttctttaaaaagggcaagatataacgcgtggtcatgacctttattgatatcataaaatatcgggagcaccccacgcctaaggtaacgcaagatgtgctcaaacaaagtgggatctgcgtcaataaaataagacccgtcgggaagagcattatcccatcgtccagagagcaggcatgcgaagaaaacgctctcagttacaagtgtctcacgagctgtaacaaatcgagactccaatttgcagaattatccgcctagcttgagcggcaaccaagctttgggatgggccttcgtcattgggttcatgattagacatgttgaagttggtgaatcctgaggttcaattaaagatatcgatggggacgttgcaagctaagcgcagtagaataatgagtaggttatagaatatacgtacattcgcatcggactagaagagcattacatgatacattatgtcacagcttctttcaggctgctaacatttaaatgcgtttcagcattgcacaagtccagagtctaatggttttcctgtatggatgcactatcaattaagctctcattgatctggtcagcttagggcactgcgccttcagcgcactgttggttcaaacctcagtgatctcaattagatcacggtcacacggaatagtaacttcaatgcaacagtgtcgcagttttgtaaatgcagactttcagtgattaatagaaggctcaacgatggtgcaggccagtcttgagccgcgtctcagaatggtcttttgaccctctgaatccatgaaaattgtattcgttcatcctcaattgccgctttgaaagtgcgctgatgagttccgcaggtccttttcataagatgtggcctgtcagtttcttaccctgtttctttcccactcaaaccatttctcaagggtctgacgattaacaaggaccttatgcactgtcttccagcgccttccttatctcacgcctcgaaaatactcaaagcaggttgagccactgaccgaggcgtccagtcagtttcttctattgtgacctcggtctctaacttgttgctgtctccgccggcactggatcctcatgcgtctgattgggagcagctgacacggcagcgctacttgctttcaatcgtttcccaaggcgtgcctggaccgatctggatcgtgatcttgctcgtcgctcccaccagtcctgcggtgctgccacggacgcgacaagttgatgggtcaccgctaggttgcttcgaaaactcaggatagtggaactgccaccgtcaattgcagcgcaaattcactcgtcgacaggcctttgcgtagtggaaaatcataagaacttgcattctgattggggtcctgcgcatactgttggcggtggtctgcgcctcagcaagcgaattagcacatacagagatcatgtccctctccctccaccccccttgctcgtagacaagggatgtaactgtgaccctccgcccattttagctccctgaaccctcccgtttcttgttgattcgtttcttccatattgcacggagtatcaaaacagcagaccaatcccctgtctctcaattattcccgttgagcctgttccggatcaagtagatatgttgcgtattgttcgatgtccggttgagaaggtcctagttcaactgtacctgccgattctataacaacctcataatctcccatgattcgttagagaaggtggtatcccaatttcctgcccgattattatcttgatgtattagcggttcttccacagcttacggatgctatctggattgtgcggttgcaaactggttctcagatgctgactgggaggtcgtggtcggttcttgttactgggtgcgatggcttcagcatatagggagttgggcgtgtgaaatcttcctgcggcactgggactgactgcggcacctgcttctggattctgccgcgttgtatttacagggaccggactcatatcgtccagctggttcccctccaacaatcgtgtaactagacttggcaaatctgggggcgggggctctgttacaggctgaacgacatgatcctccgcagctctcggcgtatgtagct

SEQ ID NO: 4074 - DNA, 5614 bp, Emericella nidulans
gcagtaagacgaattggctggacactagctcaccgccgtcacgtggggcagtcattttcataaatccccaccgagcggcgttaccagccattcgttcatatcatgggcaactgcctcactttgtggaggacggatcacctcccttcactttaaacgaccataaatctctcatggttacggcgcttgatctccctgccatgtccgtccgtacttcttgctttgaatgatctccgacttcgcgccctcgcggagtcttctagcctaaccaaccagcccgcatggatctttcctcatcttattatgtccagatacgagaagagaagcatccgcaatctgggactagactttgcatccttattctggattcttcattggtactggactatgttagtagatatggtagacgctctttttgacttgagttattgcgtatccacaattcagatatttaagttgactcagctacttcatcccttgttcggatttcaatggcctttcaagttattgttaacgcgtctttttaagcactaagtacatattagggcttgattactttcataaaagaaagattttattgcaaccatttatattgccactcatcacttggagctaaagctttctcatctttcaatatctgttctatccatggtccattataagaacattgctttgccagggccattttcgtcgatgaagcacagtgacctatagcgtctctatatttggggctgcaatggtagtacacattatcgggcctttctctagaaaaacgtgaatggagcttgagaggtgtgaggagtacgtagaacgttgagccttattcccatcgaccagcctcccgctctctttcaactctcgcagcccgtgcggcatcggtctcatcatcgtacttgtagttaaggcgacgcccagctcgctcctgtcgactgtcgcgtcggcggctggatttgccagcatcccgatcagcttgcatcgcttcgcggcgctgttgttccttgagcagacgctcgcggttgcgggcttcgcgctctaaggtatgaggatctttctcaggttcaggtgggtttgtcagaagagtcttctcccttgtgtcttttggacggtctctattgctggtggaggtgcgagcgtcgtcttcacgtcctcgttttgctttacgtgagtgataatcactgtcagctgcggattcggaccggtcgcgccgagatcgttttcggtctcgctctcgatctcggtctcgctctcgaggacgttcccggtcccgatcgcgctctctctctttttctcggatcctgtcccggtcccggtcacgatcgcggtcgcggtcgcggtcgcggtcacgttcacgatcacgccgacgggagtccctgtccctttctcggtcctcctcgcgtcggcttgaacggtccttccctgatcgatgggtgtctaaagtgtctgcatttcgacttcggggtttggagctgcttcgctcttcggcgaaacgatcagtgtctcgactatcaccgttgcgatcaccacttgcgctgcgactccggctgcgtcgacgatgagaccgacgggaccgacgggctcgacgccggtctcgttccttatctctgagtgatgacctgtgagaatcgatagaaggagatctggagcggcgctcatcttctgcagtcctatctctctcatcgtgatggggccttcttcgacgctctcgcgggcgatcgtagtcagttgcgtcgtcttcaacgcttcgagacctcggacgataccgtcgacggctgctcgagcgggatggtacacgggatcgagatcgagacctgctcctaggcttcgacctcgacctcgaccttgctctggagatagaccgagatgacgactgaggacgctggtcttccgaggttggttcggcgtgcgggctgcaaagatgtccgttagttcttgttaatagacatgcaactctgagaaatacttacgtctgtgaaacttcagggcctttactaggctggttagggacacgtccgactaagtgaaaattcctttgacgaaatacgctggtatttggaagcccttgtctcattgctctaggcgcagctggagcaccctcaacaccaggtcctcgcggctgcatattgggcgctggcataaattgctgctgcccaccaaagctgccgccacgaccatggaacccgcctcgcatataaccgccacctctaccgaacccttggtacatgtaagttggcgccgcagtggctccaacgttatagggttcgttaagactatcaacggtgggaataccctgaagttggttctctgcgttcatagcttggtctggatggccatcagctccaggtacagactcgacattaccaccattggtctccacttggtttaaggcctggttcccggaagaagcatcgacagtgtttggtccgtcttccggcttcttcccatctgaaggaacattgtctccagtagccgttgaatccgttgcggccttcctcagtctgtgagggcatgggatggtccgcgctagaggtattatcttgaagagctgcagagttaacattatgggggaaattaggttgcatatgaccaacataaccgccacgaccacggccgccgggaaagtaaccacggccacgaccccggtaattgccggggccataatagccattctggagctcttggttagaaaactgctgctgctgcatttgaggatgaactccgttgggttgagacatattatatccgccaaagccagaggggtccccgatttgcgcgcccataccattcgcgaaagcatttggattgaatttatcttggcttccattccacatattgttctgtgagccgtcccaaccaccgtacatcccctgcccagcgttgaaattcattcccatattcatgccattgctcatgccattcatgttcatcccgtagcctccaaacatgccctgactcgcggccatcgggtccatgcccatggcggccattcctgtgagattctcgttagcctacaaaactcatatctgggcgtaagtctctgtcgacatacccataggattgggaaaccccatcattccaccgcccataaactgagccatggggttcgtaccccacgccatattcggaaacatccctgggttcatgttgaatcccatggggttgggaaagccagatcctggcatagcattttgggagtcctgatcaggttgttcagtagactcgctactctcgatattatctccgtcagcgttcttttgtgccacatcaagcgcttgatccgctgcatctggagcaactgtttcagaatgttcatcctaaaggattcccttcgtcaggtctgcgcgatagaatttgcacggagaaggaagctcactacctgggagactccattggtcccgatctgttcctcgccagcagcgtcggcttcggctgctgcggatgcagtatcaacgggttgtgctgctgacgagtcttcgccagcattcggcaacggcccatttgcaggggtttcctcaacgacattcgagtcttgctgagattcttgtctgaccaaagcttcatccgcaggcgcagccgtacccgaaggggcaggctgtgcttcctgtcgctcctgtcgctccttctcgcgtttcttttcttccgtgcgaaggaaagccttcaaagtggttcggagggctttgttcggcttgcaaagatcggacgagatgggggtgtgtgcgcaaacagggcatgtatccggaagtgatgcctggcctgtagttcgcgtaagaaccacatacgcaatagaatcgtaggaggacgcttacaattctcacagattgcttgatcacagcagggaagacggaaggcattcaaggcaagcttgttgcagatggcgcagcgcaatttgaaaggaatctcatcttgcgttaaggagctggaacccaagaaaacgcatcagtgtatagcgcaacgtaatgaagctctgcgctagggctcaccttgcaatgtccattaagcccgaaggctgagcggccgccgccattgggaagactagctacacgcaagcagcaaggaagcaaactcgattgagttgtgattataacaggaaaagacaggccggagaggcaacagaacgcgacatgactttagtcaaccatcagtccatatccaacagcgtcacacgagtctttgatgaggacttgagaacctgagaatctgtcgcaaccgtttggcgtcggagtggaggcggagccggaacggaacaaaattctccggtactggaacgtcttacgaacttacgaatacaagtacttaaggagcttgtctaggagattatttactgattttggtgcctagcctcttgcccttgaagggctaatgcaaggctgaatgcagtttaggctgagtcctgagcttcgagaacgtgcatgtcagagtgacatagccggggcaaggctaacggcgagaacaatccagccgacccataccggatctcattttccattgcccgggtaggcatagtgcgtgatctatgttcagggctttagcttggacaaggggaacgactcaagaagaggttgcaagattcgtccaggacgcgatcagattagatcaagtaatttggtccctcaccgatgtacatgtaagatggatccccgcagcaggcgataccaatccacgacgtggatggtttcagcctgcctgaggctcctctacatctctgggctctggtatcgtcatgcagcgtccgtaggatgaagggggaaaagataggtaaacacaaataacatataagtaaacataaaataacagtaaacataaaataacagtaaacaagcaataagacagatcacaaagatatatattatttgattggaatttgtattacttgcatcatcaaaaggcgtgaaaggctggatcacgcgccgcgaggccaataagggctgtgaccgtcgaagatgactgtttggttgatgtggcaagaagagcgggcggtagagtcattagttacatgtgatgctgcgagggtgggagggaaagagagacgagatttgcagcccaagagtgaaatagtggctggaggggatgaggttgatagagtgagggagtgtgtgaaatcatattagatggactcagaaaggagaaattaagtaagcaggtacatcaggaatccgtcccaggatcgagaaaatgattttgatctaaatgattttttgtttaaaattagcgcggcaagacagggttaaaagggctaaaacgccgccccccgccgcccggagcaaagaacttgaatctcttttttggctaaactgccacgccccgtctctcttgggcccacgcaccagagcttgggccatcaacaacgactcgtctactattctacaggacacgactgatgtcgcggccagcttgattcttttagctcagatctcaattgaatttctgcagaggtaactacgcgtcctctttctcccccgtcttcctaaagcgcactcctcgttgccctatccgcccggtgtcgacgcgccgacgctacgctctatacatactgcatactccatccatcactctactattctattataactatactataccattgccagttgctgagacagttttgtcagcaatgacagag

SEQ ID NO: 4075 - DNA, 8453 bp, Emericella nidulans
ccaactgccaggtcattgccgagactcttctccacgctgttgccgagtcgataatgcaaataccccatgaacaggcagtgctcgctgagtcgcttgtggctgctggtgtgcggaaaccaccgcccgccacgtgcgcgaggaagctgacacgcctcttgttgtacgctgggccaagaaagagcttctgcgccaattatgcttgggcttcgaatgtgactttcactgggagaagctgcccagggccgttagaaaggctcttcttgatcgttgccttggccaaccatgtcgactttccgaaaagcactaccggtggcttgaggagagcatctgtcaattcgacatcaaagatctagcggtccacatcgcccgcagcaatcttgcagctgcagcggccgtcagtatcctggattatgccaactacggaacaggtgaatcggcgacttacaaggagtccgagacacccgcatatatcccttacctgcccaagcaacttccgacagtggcttactttatcatgaaaccgctgttctcggtgtactataaggttgctatcgctctcaaattcgtggttgtcgccttagttgccgatccggagttccagcgagagtacaatcatgttatgagtccttatcccgccatcattcgggtgccggctacattcgcgctgagcatggtctggaattatgccaaaatcatgcaagacttggggcttacattcttcctattccatggtcgtgacaatgtcaagcagctctgggatgagacaaagggtatgacaatcaacatcaagaagagcaggtacatcgtgcagagtctcgatgggacattcacagctttccggcacaatcaaccagatgggggattcaaagtctactactacactgggactcccaagacagagccgcagggaacgaagagcctcagctgtgtcagtacatactcgaaagacctcctgctgctcattcgccaagagtacaaaggtggtaacattgtcaacgaataccactatgattaccgcaccccgacgaagaagggtatcaccctgaagttgactgacaggaaggtcccaatgggccgacgatgcgtgcgcgggacaaaccatctccagagcgtacagtacaatcgtaaaggactcatcgaggctggctcttacatgaaggacggcaatctcatccgcttcaagtaccactaccgaaagaatccccagtttggcgatgagctgctccgggctgagttcgccttgtcgcatattacctgcactgtgtcgtggtgtgcaccgccgctccgccaccctgagaaagtcgaccggtggattcctcatgcaaaggtcaccgaggcgacctttgtccagggccctgacgtctacgaggcacgctggctgtacgatcacaagttccacccgaccatcttcactacgctcaacggacagaagatccagaccccgccgatgatcgagcatgattatcttggagttctagcaaaacccaggctcacgagctttgtgcatgacaatcctctgttctattgtgacagtctcagctctaacatctttacccggattcttggattgacgaggaaacgcttcccagtttcaatttcgcgtgctcgttcacttatctggaaagcttggaaagagaaagctgactttgacgggatcaccgtgcgctggatggacgaacggttgctgcgaagagacaggacactatcgccatactggcgcagccgtgactggggtgatcttacatcagcaaagaaatacctcgagctcagggctgataccattgcggcgagcgcagatcttgacgatggcatttccagctggacacccttggctgtcaaagttagcgatctcttcaacttcggtcccggaggtgacgctgtggtcaacacgaggtccaacgactttggatcggacacagagaagtcccttcatgtcatggcggcggataatggtacttggcccaacgaaggaggtggtgtttctgcttgtcggcgggacatgatcaactctctgcgcacaatcaagtggcatatgatctgcgagtcggcgaacgatttcggcgtgccgaagcatcagacggagcagaacattctctcgctcaaggtgattccgctatggggaatggacttccttacaccaacgcacggcctcttcaggaacaaattggacgcggaggttgagagcgtcacgtctgcgaatgatatggatatcaagatgaactttattcccatcctaacagccctcgtcaagggagcccgtgccgtgcatttgtccaaggccgatatccgccaggcgactagggctttggtcaatctcaacacgttcttccaggactcgcggcactggacacagatttggaacagcgagatcgtcaaggagagctggcgggatctgtggcttacccaggagatgccgaacacgatgccttcggctgaatggttcagcactgacttgcccacgttgggaaccctcgacgtcgcgcttgagctttggtaccgctatctgttcattttctcgatccccatccccgagaagattcccagcgttttccaagcgtctcaccatagtgtaagtgcttcgtatggtgttgtatgcaagatcaagagaaattgcacgctgcagatctgggatcatgcgatcgcctggcgtgagacgaacctgtgcctctcgtccgctctttgcaagctttccccgtttgttcgaaatgcgctactcggtctgatgcgagtcacatccgctctcactttgtatcatgccgatattatctccccgtgcgccgacttcttcaacccaggctgggaagtcgagattggaacatgtcaaggcacgattgagcaccgcaacatcttccgccgcaaggtcgacccagtcgtcaatggtatcaccgacatgcagaagttcgccccagttaaggagatcaaatccgagcggcctacagtgacgatgctttcgcacgtctggtacgccaaggacatcaagaccgcgcttctcgccgcagacatcatcatcaaccagtggaagttcgatgactaccacctcgatatctacggtgcaatcgacaaggcccctacttactccaccgaatgccaggaaatcatcgcctccaagggtctccgaggacgagtgaccctgcgcggcacagctgaccccatgaaagtcctcgagagcacctggctcttcctcaactcttccctgtctgaaggtctcccactcgctctcggcgaagcagccctaactggtgcgccagtggtttgcactgacgtgggcgcctcccttcgcgtcctcagcgacccagatgacttctcccgtttcagcgccgtcgtcgcccccaacgacgcactggcgctcgccagggcccagatttccatgctcgccctcctcggcgaatggtctcagtacgccgaagacaccgagcccgcccctattcttccatcatcacccacgcccgaagacgtcgcaaagatcacccagcgcatgtacgacaagtcggagcaccgccgcaaactgggaatgatgacccgcaagatcgtccagaagtctttcagcggtgaccgctacctccgcgagcacgagcagatgctctggattggcaagtccgcgaaaatgatggccacgcgtgcccccggcctccacgagccggcagacatcgcaacagccatccagcagaccctccccatcgaagaggaagtcatcaccatcccccgcagcgccgtacactcctggcgctcgtccgcggcctctggtatgtccaccctgtacacgagctacactagctccaccactcccttctcccacttgaaccccaacaaccaaccacccacccgctcaagctattacgctcctgcacacacatccgcatccgccaacctcctcacccgcccatcctccctctactccgccatctccaacgcttccacaacggacgcctcctccttcctgccgctccccaacaccccccttcccgtttttgccccgcggcactccttcgcccttccctctgctcccggtgccaatgcggaaacggaggcgtgatttcacgccccctatcgcctgcaggtcgaaggtccccgctcttcacgcgcgctcgccattcgcgatcacgctccggtagtctctctacgggcgggcgggagcagctccgcggcctacaaagggaggatctgcagcagtatcgcaattccgacgttagcaccatcatgagggaggacttcttccagtcgagtatctaccgcgggatcgagggtggaaataaccaggtttaaggctgaaaccctgcgttcgatgcctcttgttgcggtccctagctgactgtcattcgttctactttttcgttttccttcctacagtacatccgctgacgctcttgtctctctcaccatactctttctttctttctccctctctctctccttctttttgtatatctctcctgcatttgtcttgtctactatgttattctgtgtggcataggaccgctgagctcttttcatgtatagactgggttttgaacaatataatctaattgcagataccccaactcgtcggtcacgtccgctacctgtagaaacgatacgtagtataatctagactaataggacgctaaacataatatcttcagaaggggcatcgccatgcttggtcgtgggtgacgtctgcttggatacttctaggaatatgccgaaccggccacgcggggtaaattgccagtggatcgatctggggaaggcatcccaaaagagtaactcgaagcgccagcccgacctggagaaccagccgacccttctcctaacttgttgagtgccgcttagcactaccgcttctgaccagagggtagtctaattcatctttctcttcaattctgtgcttgcaacactcatgcctcttctataagtcggacgtcatgccagactcagcttctgcttctgtatcgacgaggttcagtaatgacaaaggccataccaacagaaaacacaacgagactccttccacaacaaccccgaaattcacccgatgtcgcacaggctgtctgcggtgtcggaagcggagacgcaagtgtgagctcacctctgtttctacttccttccgcagcctctagcaacctctacctttcatcaaggaaatgaaacgaatcatacgtacgaccacatcttactgacccgtctttataaacaggcgacgaactcaaaccccgatgccagaactgcatcgacaagaacttcgactgcaactaccggttgcaggtgacttttctcgcaaagaactcgatcactgttcgggcggacgagctcgagcagagcggggacgcagcgagcacgaaaaagggaagttatagtaaaattcaggtgggttgctctcttcagtcttgtcttgctcaagggtatttggtgatatttggtgatacttggttgaacattgaatgctgatcgattcctcttgtccagttcgtcaatgaggatcctttgtcgatcgataaccttgttaccccgcaggtgtcttctccagagtcgaatgtggagactgcaagtacgccgttgccgttgccattttccgcttcgcccaggggtctactcccggggaaagagaatggcaaaggttcggtccactattccgtttcagacagggagacgctttttaccgaaccttacatagaagagagagagaccagcaatacatatcgcggtgctcgttctcactctcaacatcacgaaactcttgcaccgtgggaacatgacgggcacgcccatgctcatctagaccgcgcaccaacaccgccagtcacccttgaatcgacgatcccgccgagtacattcagcgcgaaagacgagtatgctgtgcaaggccttctggcgcttgggacacagcctgggtcgtgtcctgcacctgaatctggatctggatccggatctggcaatagtggcgctattccgggtcctataattgctagggctgataaccatggaaacggcgaaataggcccagtcgtagacgccgaaggcacaccagataggatgataagcgtcatgtcggctggttttgttgatggaatactacagccgacaattggtcacgacgtgtccccgcctgctccctcgattttagacttcgacattgggggctcgaacgtgaactcgtactccttcccccgccaaatgtcggattataagacaatgcctcagacgtggaagctgcaactcctgcagaactaccgatatcatgtagctccatgggtactttgcatcctttttcctcagcttctatctagtccagatttctgaggcccatccagctaactgataccaaagctagatattttggacttgagtcattccttcggcatcacggtacttcagatcgcctttgactcgtccactgagcgacttcttcatgcaatattggctctctctgacacaagcatgcgcgtacggcaggatcgtggttactccgatgcggccatccagctcgatccgcatttctattcgcactccttccaagcagtccattatgaggatacgaccgcatcatattccgactccttggtgaatgcagcagttgatgagacagaagctatgctactgcgactgttcgagaaactagggaaattggtggcggatgttgcaagggcctgggctatggaccgagatcaatacgagcaggatggacgttcaaattgctatgagtacaggcagttgcgatcattagtggatagggcctacggactgggcatggactctgcgatatattggatggtcttgcgaatgggtatgtgtttcacttcctcgatcaaaagcctgcgggtgaacttaaaagcacagacttgggaatgtccctagcgaacaatacgcccttacgcatcttgctccctcctcactcgcttccaagtctctcccgcctagtgcggatcgaaaacacccacgagcgagttagccactacgcccaggctctactttcgctctgtggaaaggctctaaatatctaccatcagcaagatgctgctccagcacaccaagcggcaaacccagataattggttccaggtcttcgagaaactaagccaatggtactacctccgtccgcaagagttccaccccatggttgagctgaatcacgacggcgtcgatgccttaagcgccggaagtgagtttcctctgctcctgttcacaaacggcgcagcagcgctgtgcagtcagctatatcacactgcgatgctccacatgatagaatgtaagccgcgaacggccacggcgctgttgaaccagcatcagaaacttaatccgcactcaccggtgctctcccctctgtggcatgcgcatcgggtatgcgggattgcactaaataacgatagggccgagtgctgggatccttgtctgctggcatcctttcttgtcgcggctaaacgtatgacgcacgagtcccaacgagcggaaatcttgcgtggctttgagcgaattcagacgctcactggatggggcgttggagagtatcttacggctttgcgcaaagagtggtccttccttgacggtgaagagattgattgatactcatggggtagcactggtcatacgactatatgctgctgacttgatgtgcatctccatccatggacgccgagaattgctgatttatcatctctcgacgatcaccactgacggcatacccccacgcaagctccaaatcacgaattcgccagcaagcaccccagccggtctcggcctcaatgcctcgaatagtattgacaatttgctcatgttccgaggcatgactgaacagtcgccccgcaatccagagcggctggatcgcgttgttcaagcagccttgatgcttattgctgattgatattccacagattctgcgcgcatgccatagtagggacaatgtaggagatcgcggaatccgcaaccctttgggcatcattttcagcagcagtatgcaagcggtatggtatagctggtttgaggagatagcggcccagtgaacgaagaggatgtatgggaatggctttcgggggattgtttggatgggaaggagttcagggggccgttcggctagccaggtttggagctcgtcccagagagatccccagcgtgtggcgaagacctccgtcgtgcagccgttggcttcgcctagttcaatgaacttggtacggttggagacaagctcggttgttttgacggcaaggtacacggcgtagttggcatgcatatccggggttcgtgcttccttgaaaagtctgtatgcatcttcttcctggcagcccactgggagccatttggaggggtgtagaactgtcgtcctcgtcccgtctgatataagcgcaccgcagagatctataagtattattagagagtctcctagcagtaaacgacagttgccgttcgcaagcataaataactcacccatccgcgcatagcaccagaaaacagcctgtagcaatcctccacagaatccatgaattc

SEQ ID NO: 4076 - DNA, 3351 bp, Emericella nidulans
agcagtcaaagcgcagggaccatgtcaagtaagtttcagcatgctggcgtccagataagttcgactcttcatgttatctctggaatcgagctatcaagcagcactatggaccttgaagaaggctaggacaaaaaaggactagatagctgctgactcatcacaagcggcacaaaactcccaccaccataaccaaaacctccctcttaagtcttccctactcgctacatcggggctgcggcccttacctttcaacctcgttttaacactgtagttttactcttccctatcatgataggtttctcaaaggtaggcggaagtttgaccccccccctcttttaggcacaattgcgtgatgatctcttatatattggagctgtcctagcttatcatgcggacaacctttattacatacgcttttcatctttctgatcccctaccactcaattcaccagcacatatccacgtctgctgttgtagccttgctaattacaagtagtcttttcagggaccaccgagtgaacatactttccagcctccttagatctttgcggagaatatcttccatcttgatcacaatcgtcactttaggcttcatataagggtactatacaagatggcctacgacccgcgattagcgggagcaggaactgcggcccaggaaaccccggcacctccttcgcctacagaggcagctgtaacgacagctactgctccaagtgatagcacttcaagctcaacagagaagacagattcatacaagctgcgcttctgcactgtatgtgcatcaaaccagaaccgctcgatggaggctcacctgcgtctatccaccgcagcgtcgccattcccagtaatttcttttggcacgggttctctagtccgcctcccaggcccctccatcacccaacctaatgtttataatttcaactcaacctcctactcccaaatgtacgatgagctcctttccaaagacgagcgcctgtaccgcaataacggcatcctaaacatgctcgaccgcaaccgcaacgtcaagtggggccctgagcgcttccaggactgggtgcccggtatgccgcgggtagaccatgtttctaaaggtgacaagggcgcactcgggactgagggaggcgtagtagacgtcatcatcacctgcgaggagcgctgctgggatgctgtcgtcgacgatcttttgaacaagggctccacgctcaaccggcctgtgcacgtgttcaatgtggatatcaaggataatcacgaagaggctcttgtaggcgggaaggccattttggaactagctacgcggctgaacgaagtcgccacccaggaacaaaaggctctgggctcaggtggatgggagaatgggacgggtgaagctcggaggagctttgatgagaaggttccagaggtgcttggagcatggcaggagaaatggcctaatctgccggcattatggactttggcttggttgtagtccggttgttctcattgatggctacgaaagtcgtgttgctacacataagcacagcaatcaatgttaatgaatcattctcaactatattaaatacacttgtaaaggaaagtcattccttttgttctatactaatagcggatactcgtcaatcatgtctcgtaaacgaatagtaccaatctcaccaagagtaactacgatcccgctgcggcgcccgcctcagaagcttactcaaggagtgcctgcctcctctcgcgataccatcgatcaagacaagccctcctctcagcctgcgtcatgctctcaacaacaagcgcaaattccgtcgcattcgggaacccaaaccgtctcgccatgctacagaactggcgcttcatcacgtcttccgggggatggtacttaaatgtcaccggtcggccgtttttctggaatgtcggagctacaaccgcaccggcgacctcatcttgcgagtcgcagaagacttggaggttggccaggctgtcatcctcagctagctgagcttggcggcttagttgttcctcgactttagaagagccgacaacttcgttgtttagatgtgtatattcgacgcctgcgccggcgaggatagcttggattgggtcgtgtttggatggagttgtggattgttgccggtggggaaaaataacttcgtcgtctgtttcgcctcggattctggcggcaagttggctcatggcttcatcatcgtcgtctggatttctactccaggaaccgtcctcggagcccgcttcttccagttccagttcgatatccatgacctgtacgccggctttactttcggcgatattggtcttgttgacgatatcacgcagcacaatgttgtcgttttggtattcgaaaatgttctggaggccaaaaatctcacctttctggtctttcttttcttgcacgcccttgaagtagcgtcgctcggagctggcgttgtatccaatgttcgcttgttgttgcttatagatctgccgggcatagacaatctcttcaatagtaccggcggatatgaggcgaaagacctctacattgcgtgtctggcctattcgatacgcccgatcctgggcttggagatcgtgggacggattccagttaggatcaacgattacgaccttgtttgctgatgtgatattcagcccaactccgccagcccgtgtggagatcaaaaacacgaattgtcgcggatcggagttgaactcgtcgacaaccttggcccgggtttcataggtcatcgatccatccaggtaactgacgttgtagcttgtatggttgaaaagcatctgtaacatcttcaggaggcggacactgtgcgaaaacacaagaaccttgtccccattcccgtgccaccatttcagaagtttcctgaggactttccacttaccgcaatattcagcatcagcatagttgattattgaatctctcgtgcgatatagcctctcccactcatcaggcaccgcaatctccagcatctccttgtccttttcctgcttctcaaacgagtccgtgctctgtggaatgaggatagcaagatgattgctcagcttctgcaggatttgcatagctggaaacacgtaagtttgccaacgcctgcctgagggtaaatattgatggcagcaccacccggccttcctcccggaaccacagtcgcatttattggtcgaggtcttaatgtaatggatgatatcactgtctaaaagtctctcatatgcttgtgcttgggtatcggtaagaggacaaaaaacgacgcgatcgattttcttcggaagctggtcggcaatcaacgtcttcatccgccggaggaaaaactgaggaaaaagattctcccgagttttttggctgtcacacgggctcgtcttagt

SEQ ID NO: 4077 - DNA, 5723 bp, Emericella nidulans
acgaccgtagcatcactgacctgagatacactcggtttcggttttcgacggagctcatcactccagaccggtcgggccccactctgacgacagtccccgctctctgcgattatttatcaaaactgcttttatcgccatgagcgaggagatgctattccgctttaataacatcttgcgccttcatggaagttccgatatgatcagacgcagctagtacaccgctgaaccacgatatagtcaacaatatccccttttgctcctgcatgcctcgaatatcgcgagctgcccgtccgactgagactttggatcctcgctgagcttatacgtttcatatctgtattctccgctctttgcattgacttcaatcatggaatcgcaagtagcccgactggttgacaagatttggggtgagtatggagtgtccttctccagagtcctgagtgtccttctccagagtccttaacacttcgcaaaacaacgactaacatgggaccggatcttagagaaattccgaaccacgcccgaaaatgcccgtctactgatcgctgtcagtgggattcccggttccggaaagactgagctcgccatcacaatggcgagacgtatcaatgagaagcacggcgcacaaaacggcgacctaattcgtgccgcaatccccatggacggataccaccttacacgggcacaacttgcccaaatgcctgatccagaatacgctgctgcacggcgaggtgcggcattcacattcgacggagagaagttcctagccctagtgcgtgcgttgcgtgagccactaacacccaaaacgcaaacgttacatgcgcccagttttgatcacgcagttaaggatcccgtggataacgacatccccattgctgctgcgcgacgggtgatattcttcgaagggaactatctgagtttgaataaggagccgtggagctcagcggcgaagcttatggatgagctctggtttgtggatgtcgatttcgacacggcacggcaacgcttggtcaagaggcatgttaaggctgggatagcaaaagatgaggctgatgccgagaagcgcgcggatgagaatgatttggtcaatgggcgggagattgtggattgcaggcttgacgtgcaggagatcatcaggagttcctatgaccccaagtgggaggattgatcttgtaggactatggacgatgaattgatgattagacttgcatttattcgtacttactagaacgaacatccgaaggtggcccagactggttctttaacgctcctgggctgtgaccactgtttcacgctcttaaggttaaggttttataggactattcaaactattctgctcgagcgaggcgttgataacgtctaaataccaagcacatctataaactaggccgtcggatcaaagctctaccattgctgatggcctggacttatcgcgctcccatactggggccgttcgtgcgaatatttaaatgacttgccaagtacgtatatagggactccctacttaattttgcagaagttaacagtgtgacagagccctcttgcatgtgatggaagtcaatcactttcttggattgattggggcttcgacccacactgaattgctactgatgagtttgctgcctaaggcttaaggctgagtaagggattcagggacaagcgatcggcagggccattaccacatttagtgaagcaatcgggcgctggggtcgacccttgaattccttgctctccccatcacagtcccttatcattacttcaagatcacgtcttcatctcttcgaattactgtctgtctctcgttaagcagactactgtcattccttaatttgagtccacggtctttcgcactgtcattttagtcactccttcataactcactgtctttacgatcccgttgattcccctgaaccgaaccactgcagtttcgactccgactccttcgtcataatgctcttcgccaagtccaccgtgtttatcgctctcttcgctcttggcaaggttgtttctgctgctggcaccagtacacctgcctgtcttcttactgttgtggggtatgtttgagctgcgctcgtgccagtgcgtaggacgtttttcgctaaggatactatccgacagccccgaaaaccccggtaacctcaaagcaatctgcaagaccaatggcgacgagattcagacttcgattcgcgatgtctgcggagatgatgccaaggatgccctgaattactatgctgggcgtctgcaaagatgcaggctacgaagttggtgcgtactcctcacatacgcaatatactagcagggagctaattgaaacgctgatagatatctcgtcgtcctcgaccacaacttcttcgcagaccagcaccaagacatcggatacagagtccagtacttctggtagcgcgaccagcacggatggtgccagctcgacctctggctccgacagtgactccgactctaactctggctctgcttccgcttcaacaaccgacagtgcagatacagccaccccaaccaatggcggctccaccgacaagcaagtctccgccgccgcatttgctgctgtcgttttccttggattcgctgctacactctaggagcgccttgcaagctgtgtataatagctggaacctggacgctaagcggaaataaggaaatattttcgatgtgaatacatacctttttagttcctgctgtcgctagagtactattcattctgcagtgagagataaccagtatatttggatccggatcagtgcctcaattgaaattcttatgcatcatttctcaaaaaaaaagcgcattctgcaaggccgagatgaagctttgtaagatacgtagtagcccgtaggacgacacgtaggtcacgtggacgcgtaccgagtcccagctttgcggtagtccattaagcccaaacacgaaaattcgcgttgaatccactccagggacgcgtgagccggaatcaatatctcccttctctcagcccctccagtctctttttcctctcatcctcaaccctaccttgccttgggacttccttttccctcattgtactcaaatccctttctacgactgttctaaagttcttcaatctgcctgagtaatacgactatcattataccctcttcgccgttttctagttcattagtttttcgctcagtcgttgggttcctccctgctgtcctgtaagatgtttgtctacaagcgaggtatgttcaagccatttcagcctttatatattcctgattgcctcacttctgctttggacgcgtcgtcgatatcacatgggattcgatcgtgtcgccacttgctgtacgaactctgctaatgtattattaatcacagacggacgcaaagagcgcgtgcaattcgacaagatcacggcccgtgtatcaaggctttgttacggccttgatcctgagcatgtcgatgctgctgctatcactcagaaggtcatctctggtgtctaccaaggtgtcaccacggtggaacttgacaacctggtatggccaccgacgacccattgcactgttctatgctaatatcattcttcgaaggctgctgagactgcggcgtacatgaccgtcactcatccagactatgctatcctcgccgctcgtatcgcggtttcaaacctccacaagcaaactaagaaacaattctccctcgtcatctcagatctctaccactacgtcaacccaaagaataaaaagcccgcacccatgatatcaaaagaaacatacgagattgttatgaaacatgcagaagagcttaactctgccattgtgtacgaccgcgacttcaactacaacttcttcggcttcaagactcttgaaaggtcatatctcctgcgacttgatggaaagattgccgaacgccctcagcatttgctgatgcgtgtcgctgttggaatccacggcaacgatattgagcgggctatcgagacctacaatctcatgtcccagaaatacttcacacatgcgtctccgactctgttcaatgcaggcaccccccaacctcagctggcctcttgcttcttggtcgatatgaaggaggacagcattgacggtatctacgacactctgaaaacatgtgccatgatttccaagactgctggtggcattggattaaatgttcaccgcattcgtgccactggctcttacattgccggtaccaatggatcttccaacggtatcgttcctatgctccgtgtgttcaataacaccgctaggtacgtcgaccagggaggaaacaagcgtccgggtgcctttgccatctacttggagccttggcacgctgatgtctttgagttcctggaccttcgcaagaaccacggaaaggaggaagtgcgagctcgtgacctattttatgctctctggactccagatctgtttatgaagcgagttgaggcgaatggtgactggactctcttctgtcccaacgaggctcccggtctggccgatgtatatggagacgagttcgacgctctctatgaacagtacgagaaggaaggccgcggtcgccgaactatcaaggctcagaaactctggtacgccatcctggaggcccagactgagaccggaaacccgttcatgctgtacaaggatgcctgcaacaagaaaagcaaccagaagaacctgggaaccatccgcagctctaacctttgcactgaaatcattgagtacaccgctcctgatgaggtagctgtttgcaacttggcctcccttgccctccctaccttcgtcgatgcttctcgcggtgaatacgactttggcaaactgcatgaagttgtgcaggtcttggttcgtaacttgaacaagatcatcgacatcaactactaccctgtacccgaggccaagaaaagcaacttccgccaccgcccgattgctcttggtgtcaacggtttggctgatgcattcctcgccttgcgtctgcctttcgattcggctgaagccaaacagttgaacattcagatctttgagactatttaccacgctgcactgacggcttcttcgaatcttgctaaggaggacggaccatatgagagctacgaaggctctcctgtttcccaaggtatcctgcagtacgacatgtgggagcgtactcctactgatctgtgggattgggatgccctcaaggccaagattgcccagactggtgttcgcaacagtctactggttgcccctatgcctactgccagtaccagtcaaatcttgggcttcaacgagtgctttgagccttacacttcgaatatctactctcgccgtgttcttgcgggtgagttccaggtcgtcaatccttggctgcttaaggatcttgtcgaccttggtctttggtccgacaacatgaagaaccgcattattgcagagggcggttccgtgcagaacatccccaacattcccgatgacatcaaggctctttacaagacggtgtgggagatttctcagcgacgaatcctggaaatggctgcggaccgtggcgcctacattgatcagtctcagtctctcaacattcatcttaaggaacccactatgggcaagatcaccagtatgcactttgccgggtggaagatgggcttgaaaaccggaatgtactatctccgcacaatggctgcgtccgctcctattcaattcactgtcgaccaggagcaactcatggttgccgacaccaacgttgcacggactagcatgaagagggcttgtggcatttcaactactgcctac

SEQ ID NO: 4078 - DNA, 4488 bp, Emericella nidulans
ataattttattttttgctcatttcttccatttgctccccacctcatctccagcatcatctcgactctctgggacgctgggactataaacctcgttgtgtcccccccctgttcctcatctctcccccactccatacatctggatggctttgggatagccgcgcctccatcatatatgcttacctgctcgccacgttttttgactacttgaacttctcgatcccgttcgttttagacttggttccaacaccttgcctttcttttggcattcttctcacatacggttaatccacggttacctattggcccatcaatcgctcacttatatcggcggctcaacccattcatatacacacatcgtcatggatctcgccaacctcatctcccaaccggggcctgagcctgctctgacggccaaatcaagatacagccctcctgcctttgaaccgggctccttctacgccgcatctacttcattcacgcggacacaagcgccactatcgcctccagtcgaggatagatcttctcgctgctcactgccatcaatctctgcgcttcttgacagcgcagacggcgcctcgacacaagctccaagtaagtctccatttcagcgcaaccgagcggatcccggctaacattgaatcctagagcgccaacggctcagctctccaatgcaccgtgaaccgcttgacaagaacccatctgccggcgctgctcccatccgtctcccgcccactcctccattgcgccccggctccggcttccacagcgccggccactcgccctcgagctccatctcatccatctcgatgatcaagtccgagtacccggcaccaccatcagctccagtctctcttccgggccttcccagcccaaccgaccgctcgtccatctcgagccaagggtctgcgccgcagcaccagcatggtccctacgcctcgccagctcccagcgtggcgccctcttactcctcgcccgttgagccctcaccctcatcggcaatgtactaccaacaccagcggcccgcatcctcaggcacataccaggctcctccacccccgccgcaacaccagcccatgatctcgcccgtgacaccggcctggcagcaccaccactacttccctccttcctcaaacacaccctaccagcagaaccacgaccgatatatctgccgcacctgcgacaaggcgttctcgcggccctcgagtctgcgcatccacagccatagccacaccggcgagaagcatttcggtgcacacatgccggatgcggaaagcctttagtgtacggagcaacatgaagcgccatgagccggcgtgccataccgggagggctgtcgcgatggtgtaacaattgtgttactccactcctcgcatcataacaaaaaaaaaaggaaaaaaaatctacactaatcgcctgcttaagcttgttatctgtttcatgcatgataccctctcatgttctgttcatgttcatcgcaccggtgtcacggggatcaaggaattggaattggattcggaatttcaaataaacagccctggccttctcgcaagacacatttctcttctaccgatgtatatctattctcatacttttttactcagcaacctctcaaagactacgccaggtcaaccatctcatctcggacttacggagcgagcagaggcgttggcgccagctgggctcccttgaggctattgtattggatacccgaagaaggtatctattgaatatgttttttttcttgtgtcatttcctttgttccgagtgatgatgtgacatgaatgactttttcttttctctcaccttatcctcagacaattacagacagaagaataaaaaaaaggaaataaaaagatgaaaatcctctattaattccatggtcctttgtagcttctgtgcgcaccttgagttctttgatcaaacgagctactattggtgtctttgcgctcgaggctagatatcattctttaaaatggctctgcgttgcggtgggtgcccctggcccaagtgagtgaatcgccgtacagctgcctcgcaaatgctggatgtttctaatggcagtacatatcttcttcgtcccgtgtattccgtatcccattcagtaagtagcttcctcaatagagtgtttctcacttcaatgtattccctaaaatcatctcacaaagcgccaagaagatcaggtatcacggtcaactatagacaagaatggttgtagatacagcaacctgcgaattaaagaaaggatttcaccctatctaccttcatgctgatgcccaaaacaccgaaggaacctgcagaaaatatacggctaatatggaaagatgggttctaagcagcaacagacctcacagcagggctcacagctcctcccgtacccgaccgtgcagaaagagcccgcttgttccttactgcggcaccaagatctatgagattgtggtcctcaggcatatgttcaccgctgacgatgcaaaggaccctcataccgggtttgtatcgagtccactaagcagcttcggggtgataaggaagtactgcccaccgccaccgtcgctgctaggagcgcaagcgatctcaaccaggcgcccgtggaccatgcgctcattccggggtccattccctgattgatttcgtcaacgacgcgaaatggagaggcggagagggactgtagggccatgaggtaaaatattgtactgacggctctctcgccgccagactggcggtgcgagtcgagcagtgaaagattttcgtgctcgcgaaacttgacgtggacttggatagaccacaggtcgaagtcgttgccgcttggctggccgtcaggtccaggctcatcgcctggcttgtccaggctgacttgacctgcgcagccgatgcgggcgaacgagtcggagaatgcgtcactgacgctcttgacgatggcatccagcttgggctcccatttgcctctgacttcagcaatggcgtcgttgaattgcttgagcttctcatcgaactctgtgagtttcttgcgcaatttattgatctgccgtgcgcgctcttcatattcttgaaccacgttgctgggacctccgtgtgtgagctcaagacgtgcctgctcggagtcgatttcgccttctagtgcttctggggtaagattgttactcgatacctcctgtgctacctccatcaaatcgggctgctctctagcctttactgagagcttttttgcctcctgctccgcccttctgcattccaatgccttctgtttgacttgttcagacaactgctttacctcgtccctctttgcgttaagtctttcctcatattcactattgcggagtttcagaacttcccagtccgagaacgattcgatcttccacagcgatagtttgatcaattcctcgtgcaattcacggagactctcaacagcattctatacctgttagcatcaatgtgggttgagattgcctattttcataccgcgtattgaaggacagcttcagccttctcgacagacagtttatcctgcttatggcgaattttaataatgctcgccctgattttagctatagaagcgtcttgggcctctttcttggcttcctgatggcctgttgtacattcagtgattgaagaagaaatagaactgaagaaaacggcttacggattttctctggaatggctctaaaatgggtgtaggcggtttgtttatcattcttatctcgttcaagtttgtcctattcaaacaagttagcataactcgtcgggtttagaaaattggcctactgaccctttctgcatgggcagtgtcgttatcccgtttaagttgagccatggttgctctatcggactctattctctccttgatctcctcgacttcgcttctcagctcctgaatccgtcgttgcagctcggctttcgccgatgcatcaacaggttgggaagtccagactctggctggccgcacctgtctcacgcgtgtggaaatggcaccagggccatactctcgtcgtcgattgatcgtataattctgtttaccagcaacccacgacgatatagacccctgttccaacgtcgcgaaagtctgatcagagatatcccttagactgaccggcgtctggtgcagtagcttctcgctaaccagcatcgcgaccacgggttctggaccatcgaggaagtctctagcccagccatggaagcccagatctctgagttcatgatctggcagagaagagcgtaggttttcgagaggagtagaagaagtccggatactgatatcatggagccttagctcatttattaggtaacgttgcaaggtcctaaagtctcgccgattttgaactgtgaagcttgtgaaatccgttttttgcaatagtgactcgacctggccggcatatctggaatctttgatggaacacgtcacaatcggaggcccaaaaacctcttgctcaaacttgtcttgattggctaggagccacctaatagccttataggaatcagatgagacgtcctgg

SEQ ID NO: 4079 - DNA, 3872 bp, Emericella nidulans
cattattatggtgctgaactattcatttcagctcttatcggatggagagagagagattggattatgatcgattattaccggttatggtgcagaccacttacttctcgcctgaggggtttgaaagcgcctacttcttggggtctgtcgaccaagacattgttcaaactccctcgaagcgattcgcgtggccgtcgcagtcggctaccgttcagcgtataacagcaatagcttccagtccgcttgtgtctgcgctgggacctctttccaggctgattgctcatgcggtcgagaattctagggatcctaggctagttgcacaatccgtggaccgaattgcggattttgttcggaccttgatagtgcaatggcggcagaacaagttatcggaagtcgacaaggctgaagaacaagagtttctggacgcagaatcattgcgtgatacgataccaaacctatggaagctacttcgcaactgtctatactctgtggtgattattcttcgagctgttcttggccgagtcgtcaatgaccgtgcactagcctccgataagagtaaggacttttgtgggaattgataccgttccttctaacagtgtagcaggcgcgcccttcatctctatgcagactctgcatatcctccgcaacctatatttcatttcctcgcgggtcggccagaattcttcttctcagcatacattcgtgacactggcagctgttgatatccttgctcagtatccagaattgaccgaaaatttcctaacgagtatcaagccaagcgagctgggtcagattcctgctcatcccctcgatcgatgtctggatctatacttcctgaatacctcagagcttttcacaaccgtcatctcaccaaagttcagtgaagacgtgcttattcaagctgctttgccttaccttccagcaggtgggaacaatcacctccttgaaatattcgaggcagcgcacagcttagtcctggccgtcttcgcaattcctaataacgcagccgtggctgcaaagcatctacctttttacattgataacctcttcgccgtaagtcaatcatcatcatatttccaggaacactcactcagtaccttttcaggtattccccaacaatctctccggtcgtcaattccgcctcgctttcaagacagttctccaggtcaccgctccgccctccccaattgcaaaccgccagcccctcctcccctcaattcttcttgaagtcctttacgaccgcgcttacaacagcgcctccaaaacccctctcccaccatcctcgcaagctcccagcgcctcaacgtctgacccagaaatggccaaggcagcccaaattccgctctctgagcaagcattcctcgtcctcgctctcattgacagtctctgttttcttcgagttgaagacctagaggagtggctcccgctgactgcgaatttgatcaacgcggtttccccttcggagatgcgaaaggtctgtgtgggaaggttttgggatgcgctgtctaatggcgagatggatgttgagagggcgcattattgtgttacttggtggagtacgaaaggtgggagggagatgattatattgggaagtgagaatgcaagtgcgcagggtgatgaggtgcaaggtgcatatatgtctggggctattggagcggttgcttctgaaagtaagctctaggtatatatcgttcttggaaaaggatccggagcgttcgataccatgactgtgttctggcacgccaaattattgtaatttgttcgtcttagcacgtgcggggcacaaattatccacttgtatatagcccttggaaatataattggacgactgcatgctttacgcaattcctgggatcccaatgatggtcctcttcttgtattccacatactcattcccaaagaacgcaatcaagaatcgctcctcccctaataacaccatcagtgccatcaaacgacggtaaaagaaaggagagaactcactctgaatccggttattgaagaacttccacagcacaacggcgtatcccacaaaacaaactacattaccgagcaccaactgggtcccaaggccccaccaaaagaacccaaagtaactcggatgtcgtagcacactgtaaaccccatgctgcacaagcgtatgtccctccttccgctcaacctgcaccgtatgattaaagttactccccgcctgcgccatcgccagcgtcctcaccgtctgacctaatatcataaggaacagacccagaacagcctggactttcaccccacccacggaagcagtaaacttaaagtacgaatcatgcgggaagaagacataacccagtaagcattcaagcgcggccgacgagtgcgcaacattatacgcccacccgttcgaggaaagcaggaaagcggagatatcggcgtagcgcgtgttgtgcgcggcagttatgtagtactccaggaaatggaagagcgagagactggcgaggaagaaggggagacgccagaggtagtgaggctggctgtcggaaatggtgaggttcaggagggagatggtgagcgcgctggagaggccgagggttgtgcctaggagaaaggcgcgcagggagattccgctgagggatttcgagcccgaagggtacaggagcgcgtctgtcgatgttgtcttattcgtaatgggaatcggctgcgattgcgattgcgattgcgactggggttgtaattgagattgggagagcgagggattgggaggagtccaggtgttgtatgctgccgctgttggggtcgcggaggatgcggagggaacggcggtgtcattggccatggctaggttcggcgttgctcttaatttctccagaacgagaagcaggtatataaggtagtgtcagggaagaagcatggcgtggcaggtggacagacggtcctttttggggaattccggacagataaaacaattggagggtaggcggagaacaatacctatcaagtggatactgtatagctgcccagctggagcctcagggaccaatgcgcgccatgctttatttcttttgttcctcgttcagcgcccggattgttctcgacatatagaacccttgggcaataagggatgtccaattactagtatatggttgtcgaaattttcgactttagcattctgaaaacgccataagaagagaattataggattgatacctctgcctgaagcttcgaccatgcctaatgaggaatagtcgatcgcatcccatctaatacaacggtcggcgatccccagctgagcttcctgtccccgcatttgacaacattggcgactctacataaagtcaagatgcccgagtccgaaaaagagaaaatactgcggggaaagctttttcgcgcatttacccccgaactaacggctgagcggacccgttgccggcacgcttgtactcgcttcaacacggccggcgaagtctcgcgccgacgcctaattgaactttataaagagtgagaacggcgctcctcttcaaacctacattaccgatgatggacttgctgataagaactcatagtatactccaagacataacgcctctccccccagccaaagaagactccgctgaaacgacgcgatcctcgaaaaggaaccctggatcgagccgcccattaaagtcgactacggctacaacgtgaaactcggccagggtgtctttatcaattatgactgcgtcattatcgacacccgtctggtaaccattggcgcacgaactctattgggacccaaggtaagcttatacagcggaacgcatcctctagaccccgatttacgcaatggcacatcgggccccgagtcgggaaaggagatccatattggcgaggactgctggttagcagggaatgttactgtgttccag

SEQ ID NO: 4080 - DNA, 4029 bp, Emericella nidulans
ccgctcgacagcctccttacgcacgctcattgcacggatattgtcccgttgcatcttagcaagacagtaggtgatgtagtcgatctccttctcaatcaggaggagcaggttgccctcgcccaacgctgcattaggacccaggcagatatagtaattggggaacccgtccacggcgagggagagatagttctcgggtgttgcctcccatcgcttcgccaaagacactccgtccttgccgacgatagggaaccgcggggtgaaagtggtgtcgaacccagtagcgcagacgataacgtcggttggatgatgttgtccgtcttccgtgacgatgccgtcttcaacgatcttgacaattgggtttgaaatgacgtcgactttatcgtccgtgagagcctcgaggtacccgggcccgggagtcagccgacggcaggcaggggcgaatgttggcagaagatcgttgatgagctccggcttctttctgagccggcgcttcatattctcggtgaagaaagccgtcgctccaatttgttctggcgagcctacaatggtgcagccgtgtaccgactgcaactccgtctcgatttctgcagatcatcagcagctgtcgaaagtcatccgtttctgagcttctctcctacctttcctgaatttctgataagctgaatggtcctttttgaatgtctcaatctcctctggggtgaatgcgacttgccgattgtcagcgggaaccgatccgggaggttggatactcacagttctcgagttctgcactacgcttgtcgacctgctcacgcgcaaaggtgggagagagccaagtgcggcctctgatgtagtgatcgagatgggtcacttccggcagcattccagggacaatctgtataccgctggacccgtttccgatgacagcaactctcttgccctgcccaagcaattagtatacggacgctgcagagatggacgcatcttacgctgtaatcatagctctcgtcccagttcgcactgtgcatcaattttcctttaaagtcatggagacccgggatactgggccatttccattcgttcagagcgccgctagctgacaccaccacatcacattgatcctcaatgacctcgccactatcgagatttttgacctatactcagatattagcaatgtattgagcctactacggagacactccgcacctgcagtgtccacttgcttcggtcattgtcccacgttgcgctaacaactctatgcttgaacttgatgtacttttcgcagccatatttggctgatacatgcttccaatacttgtggatctctggagccgcagcgtagaaggttgaccactctttgtttggctcaaaagtggcctggtatgtgtgggcaggaatgtctgcagagcaccgttagtcctagatggccaaactttgtcccccatactgtctcatatgaacgtgtttggccttcgcagtctactcaccgcatgcgcagccagtgtatctgttctcgagccaggtaccttcaatatccgcgttcttttcatagacgcatagatccagcttgccgatcctttgccgtagacggattgacgagatgatgccagagattccagagccgataacaaccaccctcatgggacggtatgcatcgatagagcgctcttccacaatccagggttcattgactgcaatatgagccactgctggctttgatatagcgtctttggctacatggttgggttcagaggcgccgttggtctgaacagaaaccacctgctcgaccttcggctcagacgaaccgcggccaaagactcttgataaacgcttcatgatgcttgctgtcttccgtgagaatcggaccaactctgacaaggactggcaagtcgggtatcacagcgagcgaggtatataaatcaacaggagacaagggtcaggggcccgttctgcggtggaaacgctgaatggctcccccccggaggatacacgccaactcctcaactcctcagagccgaaaaagttaaccagactagcgcctctctcgaccaggcaaaagtgcggagtctccatccgtacatcacactcccatctcctccccgtcgtcgtcaatggacccccccgaggcaaactgggtctggcgttgtctgcgaaaggctccatggtccactgtggttctgcactagacgttatcagtgcttggaccgaacgtcccggtgcaggaaatccagaatggcgttgacgagattgggaaagtggaccctcggttccagacgaagtcaagccaggttcaggaaaaccccccttggcccccattgcggggaaaacgaagcttcaactataggaatctggagcctggatctaatgcctcgagttatgactggctagtcaaagtcgattacgactcgtgtagacggcttagaagacaaacgtgccaactatttcacgcgctgctgtgccattaaagtttcggttgtacggttcctattggcgaagagtctgcagatgctgagcccagcatgtatgttgttgcaaacgcctggaacatcccagtagcattctggactacaactacgatgggttatcacctcagcgagcctagggtccgggttcaatcaggttgagctgtggcatctgaaattgtgatgcgcaaccctgcagagcggaattgagccgtgccaaagatcggccggacaaaccccggcgagaggcgccagcgagagggaagtgtgcctactatgactattgttacactgtgacgacaaccttgcaactcctacggcaagagacaaatcgaaaaccagatacccagagccgagagtcctatcggtcctcaccctgatacccggtgatttggtgacagtcaatcggaaatcccccaatcccccagtgccccgggtcagcaaacgcggggtatagaatccttcttggagatttcaataatacgcttccaattactgcttagtggaggtttttttttttattttcccaaaaagaaaggaaaaagagaacccgcttcttacgagtgcctcgttcacctgacaccgaccaagaggacactacggaggaccgccgagttcggtacagctagttaccgttatttaccgtactagcctcaacgctgaataggttaacgtttccagttcggtaatacaccgattttcagcctcaggcaacaatcgtctcaacgctcgtctcgctgaaagtcctattagtggtgtcgatgagcaggagcaggccgtctttataccctgcaactccagactccaaagttagccatacgccgacagagaagcggtcacagaggacagtcgctctgtacttcgggatatctgagagacccgacttcctagttcttgatcaagcctctgccaataatggatactgaggagatgctgaggcggggtagattgctccgttcactgcccgcaacgtactctgggtactttgagtacatactgattttccccagatttcctcctttgggaggtccaggctcccgaagctgcaattcatatccgtatatccgtcagctgctcgattacggcagccatagcacaggttgaacctcggtttcatagggttcaacaggactgctttcagtatctttcgctcgtctagatgaggagtgagatagatgaatgccgcctatattgccggctcttatctgccggggtgcctaccgcagctgcagggatgcagcgtgttggggccgcgcgagatggcttctatagagcgagtgtagatcggcggcagtcagcattggagagaagcggcatgactggcctcgtctttctgcatgccaggtactcattttcttattcgattcgtttggggtgtctcttactgggcctgaaggacgccgagtatctcttgtatcttgtctgcggcacagcacactaaaacgacccgaattcgcaatccctgcagcactagttaggacgagacggagaatttctccccagcgaacatgccattattgtctgatccgatataaaagcgttgctaaagccgggactggtattggtcatcccttaataatctacaggc

SEQ ID NO: 4081 - DNA, 2777 bp, Emericella nidulans
gctgaagatttaaaggttggtggtaaccctaggatttatcctgtggaaaagaccaattgagcatcagaaatccagtcccgtgggtcattgggtgcttgttacggaatattgatgtattgacggaaatccaatatggtggttgcaataatacccgacaggagaagtgatatgagcaggttccgcaattgatgctcggatggttcgaaggtgaatgttgacttttgatgcgggcgggttgtggggctggtttagaatcagccccaccatgcggaggagtctggccaattattctatatcagcctaaccctaactataggactgcacagataaccatcaacaaacggcggacaatatgttggaggtaaaaggagtagccactgggttgataagtccgaagtcctgaatccacatcacgtactctatgtagcctgcactggttgtgattttatcacagtcggaattagggacaagttcttgagaggcttttaactccccttaacggcagcgtattatttctggatcaggacggtgcgccaacgtagaacaaaattgagcttcggcgcctgataggattgaaactaatatccacgaagatacggtccgtatcagcacgactcgagccctctcaaagtccgcatgcaacctaaacaatcaagaatgacatatcgggcaatagccgagaaagccaagattgggatctaagcatacttttgctctgaagtacagcctctcgaaccttcttacatggctcgtggcccgcgttcgagggcgttgtttgaaccgaaaatcgaacatatttcccgccgcatcccttcagttcttctctcctcggttgttgaggttactacgagtctctgatgaacactgcggcagggaaagtagtgatgccatctatagaatgaaatcagttcttccacttcatcagccaaagcgataatgacttgggcgccgtttcatctgttgccaatgacctcggctcacttgtattgaaatcaagcgaacgggctagctagcagggtggtatattcctcgttagtgacttcaagcttggaatattatgatgattcagcttgggaagatacccagctgcagtgaaaggggaaagagatgtgatatatacctttccaaaaaaaagttcaaagtcctctcggacatacgactggcctgtcttctatatacatgtgccatcgttcttcatattgatctgcaaatgacacaagccccgtgtacgtcccggtgcatggtgaataaaatgcctgggagtgatcaaggtgggatttaatgaacgttcaccagcttagtttgtccgaaagcgcgtaatgacttatacagacatcccagtcaacgcgggagctacagccccaaaaggcatgcttaaactcctctcaatgtgtggatagttatcccagtatctataaagtaatccaaaccttcggcatggtaccaaatgcagatggcccatgatgactgctctgatttccttgaaataccaccggttgctttaattgcagctggcaacacttgccttagtactaggtatgacgcaagatatttgtcaggcggaacccatgatctattatccattcaacagctcatctttgccttgaataccagaatactttactaaaaaatggcctcgattggggcattcaatgaaacctggcaagtattcaaaataacggcgtctgtttccgggtttattgtggtgcccaagaaagttgccattggcgcctcagaggatactgtattcgacatctaagtaagaaaacgggcctctcggtcattagcagcctaccatcgctcgttatcttgatgttctaaggcccgaatacgcatcgttgtccccagtgggcatgataccgctgggatagagacatgcgctagaaggactaggatctcatcggactgccatcgtagtgttcgaggccagtagccactttcggctcagccagtcttccaaccaacgattggaagttctcctactgcttcatgtagtacaagtggtgatgctcacattccgtacttttgtccgattgcttcacagaatcctgttctagctggcaccagctacctgttgcgattgcatctcagagtgatctggaaaccttaaacactagataaatattgatttaactaccctgcaaaccctgacgttgagaggtggattgctccttcctaaattagggagagcctaaagagcctgcactaactgctatcatggcagtaagggcgagcaacaacaaagtattttgacagatagcagtctatagctgtctatagctgtccgcaacggacatacaaatggatacgtaaagaaatgtagattatattatgcttgtagattgtattctgtcaatacagggggccacatgaactgcggtgggtcagagggtaagtgttcgaatagtaggcgagcaaattgttatcgggtctccccgaagccatgaatttatgcctgaaaaaacctcagcatcacatgaccgatttgcccctggccctgccatgggcgccacggatcggacccaatccattcaaggttagtgccaacttttccttcgactcctgtaagtgcctctccgttgacacttaaccaccctcgttgcgtgctgttttggcgaggactttatccgctggtctatttctttatttcagccaacatgggacttgtctcccttgtcctcgacaatgtttgtgaacgatgttccgccctatcagtttgggccctttctgggttaggattactctccgttgttattattgccgctgttctgaacccc

SEQ ID NO: 4082 - DNA, 3050 bp, Emericella nidulans
tatgatcaacacatacgatttaggtgacactatagaatactaggatctgccgtccatccccacatattctcaatgtaagcagaggacgtgcttgtgagatgaagggcagcccaagctgctttgcatttgtctggactacccgcacattggctttcgactttgcttcccacggcgccgccgattcgaatatggctattccagaaaccgacatcgccgggtttcgagccagcaatgtttacttcgacctgggtatggttagcgatggaacctattgagtctggaggactgacaattttacatccgggaaggatgtctccgaccgtgaacaacatatcgctgacctgagcgacgccaacatccccagggtatccgaatctgaccataggacgaaccgacatcggatcctggaattttgcaccaacaccgctaatgactgaagcgtaaggatcaccaacgatgcgtcttccggtcgggacaaagatggtatcagtcaccatgtaagtcccagcgggaaagtagattacgccgcagtcggcattttcagccaggatctcattgatattctgggtgtcatcggttgctccatctccatagacctgcctacccggaacagacttgatattcaggacctggtccttggagaattcctgaaatgtcgggggggacttagtaaagtactttgttccgtttagaagtgccgatgatcgttgtgtagtcaccgtctgcccgttgactcgctgcatgtttgggcttcccgccgcatactattagcacagtcagtcagccactatccacaatgccattatgaagatgcctcaccatgtctccgcggacccaagtgtttggaacgctcccgctcacgacagcctgcccacccaggttcactgtggttcctgtattctggatgttctccaagatgattgcgtttcccgcgccattaggagtgctggatattaagaagctttctagtcctgagccgctagagtcgatcacagtgagagaaccagatgtgccggtggcatcgatgcctgtcttgccattgctgaactgacaccctaggagaataatgtctgttcctcctgcaacaatacctgtagtggtcccggcaaacacggtatttttgatcacccactgctgtccactgagcttcatcccaatgctcccgccgttgaaccataagtcgttctgctggtcagctttattcctcatggaattgacggtctgcataccaatatgatattgctattatagtcgtattgggtggtcagaccaacatgctgggaagcgggtggcatgttgaacccaacattggccagttgagtcgcttggctgacggtccaatcaagcagattcattgacaaggtagaatcgaggcccgttgagtccagcacaatgttcttgatccctatgtaaaagttgatcgttccgccaaagttcggatcttttgcatatatgatatggtcgccagaaaagccgggtgtcgcctttaaaatgggaggattggttgggtctccaatcaagacagtcccaatgtagagttgcagagcggctcctagtaaataagtaccccccggtaagtaaataatggcgggttgaccagtcgaccccattgctttttcatctcgcgcgggtcctccagagggaccatctaaagaaagtgtctgtcagcttctcctggtcaacacaggacttgtatggtcacacctctgatagctttctggatagcggacgatgcgtctgactgccccgtattgtcggcaccgtagtcggtgactacatttcgaaacactttgtagttgtctctgtatcccggaacgagaaatgacgactgcccgttgtgctcgatttcctcgtaccaaaatttagaagaccctgaggaaactgcgcagctcgcggccggtttgttcgccccgtgggtgacattgatcagatcatgccatggttgtgcggcgtagttttggatagtaaaaggaatccctctgctaacgttcgttatcacaccatgacgtggtctagcagactcgatgggtatactaacgatggacgaggagggctatactctggcgttaggttagaatccaaccctggaacgaagttaatcctcgctttctgagcggtagcccaggcgcaaaggcagaacagcgagaataatctccagagaaatgcagtatgtaatgccatacttgcagcactgcagcagacccctatatcagagcagtcatatgagacaacagcatcaaccgggctgggaaactgctgtccggggccttaataacagtcaaaatatcggtgcaggagaagcggaggaaatcagagacgcctgctatgtgcccttgattatttatatggtctggccaagtctacaagattcctgcataccttgactggggccggcatgaaatccaggtcgatatcaccctcgcgacgacccatgctgggaatccagcttctgatctctggatctaccatcgatgtcggtgtagacagaaaggagcatctatgacgatgtcatttcggtcagacatttcttgttctagcaatccctgttcggattctgggcagaccaaaaagtccacgttacccctaggtcgctttagaaggcgagacgtacaactgagacgaagatttcctgcacttcacggctgaagacaccaacaccatgctgaaactgggtaaatattgtccagcgaaaataatgtagtggcacaaaaagatgggatgacttccataatgggtttgaagaattggtggtaagtcgtaagaatgaggtgcccacccagcattccgaagatatactgaatatatttaaaaaaacaagtaccacattctcttcaagattccatacccgagtccagaaccctttccgccaatttatcctcttcccatatcttcgtcgatcagtcatttcaggttcactgatatttggcttcgccggctgctatagccaccccacgcggttttacccttaaatcgacacgtcagcaccacacatccaggtacatacacaactaaaggactcaaacctgcgaatattgccagcaccccgatgc

SEQ ID NO: 4083 - DNA, 2147 bp, Emericella nidulans
ccagatcttaaaattagcaatttgaaaacaacaacaagttaagcgttttacattgaaccaacttggaagagaccatttggttgtttaaaaaaacaaaatctttaagcaaaaataaaaataaaaactggctcttcaaggggcatgcgggggttctcacgatgcatgagggtgcgatccgacgcaaaagatttccaagcgcctattgcgctatgccttttgaagttagcacaaggctctacgggacgggccgctcgcttatcttgtcataaacgcttctgcagtatggcggctggtaacaggagagtgaagtaatatacagaatcatcgatagaatatagcaaacgataatcatcgagcatcagcttgtgctatttagcttgaatcaaatatgtcatacgtccaagtttatacgatctatgtaggatcaatcactccactcaattcgacgtacagtgtaaagacgaagcccagtgcagcattcacttaccagtcttggaagtctcaggtagcagcatataaaatagatgacatcaacagatacctcgaatagatcaacattaccgactgagatatcaagcttctattggccgctagcgtaattcttttcttatctgccacagccatggccttaacttggtcactaagagcttgcgcctcaaattgttgctaaatttggaaagaaattagtaggaggaaaatgacggatgccttgcgactatagagcttggaaaagaaggcgttcaacgccaagtggaactctcgtcctgctcacgggttccgttatcatgtcataatatctcttctttctcaagtactttccgttttcccctgtctcttaccagctaatcacttttcaaatgatggaataagtttcttaaacaacacgtgatacagctttcgactcgtggacgctcgagatgtttgcaaggcacgttgcttaacaaccttcggggctaaatatgtacttttggagcataagataccacttttgtcactcacagtgagtaggtgcgatccagctgaggtatttgaagactctgatgaagggctataccatcttacaatcttggtctctgcagcagcttgcatcgtttcgaattgacttgtcagactaaaagatggtcgaagctgccagaagctcccataggtttaatgagcatgaaatgcatatattgtggaagtacggccttcccctctacgcctacttgacgcttatacctgatttatccacgaaattgtagcgccggtgcgtccaggcgcggaatgttatcttccgacgctttaatcctttacaaagagaagtcccagattggcgatgtacccagcccaccacacactagctaatgctgtaaacttcgaatggggaggataatacgcgcggatcttttgaaagggaatatgatggcggctggagtaccctggcggcaaatacccgccaacctgtccgtacttcaacgcagccatgtacaacgctgtagaggtcggggactgaagaaaccctcagaagtaatctcttgaccattctcggcattatgctacgactccggcgagaagaagcgctggttgaagcaccatgttatcattccaactagttactcattaatctcacacatcccgatggtaatagcaccgtaacagggcacgaacaatgctctctcagagtttcagcggctgtcagaattcctcctagtatcacgaaccagcccaggaaactcttcatgtcgaagattcatgcccgaccccaaacaagctaggaggtgctcgtgactcttccatacgatattcgaggaagttaagatatgggccacatgaggcatcagtaaacgagctgctatcattgaaagagcatccatgggaacattgacctgtaaacagggtcatgttaacgcgtaagtggaaaggataaaagggggtaggccgcggccaaaggcagaagaagcggcgcagctggcacaaatcgccgcccgtacttaatctcttgcacaagcttcagcgttccccgaagaaacagcaacaaccgtgatcgttactagtgtttcccgttataccgcttgctgcagctcttgaggcctagaattgaattattctccttaagcagtgggaccagaaagctgtgattgctaaaccccgtcttacgaaagaccttg

SEQ ID NO: 4084 - DNA, 3701 bp, Emericella nidulans
tttggccggaggttcagcaccaattttctcattctgcctgaatatcaaactatgatgcaactgctagattctccgcctcctcccctcgtggctggcacctttcgtcgcacaccgcctatgcgaggccatagagccctgacagtcctactagatactctcattccgatcatcgagcgccgtctttatgagcaccagtcgcgaccagaacaagccgaagcccgagtgcctcgagactgcatccagttcttcgtcaacgcagtcaagcacaagaaacagctagataagtggcacgcccaacggatcgtgcaggtcctgctaggaatctggttcgcctctgtccaccagcctgcaatgtgtcttttctacgctctcgacgacctatgtctccacccggagtacgtggttccactgcgagaaaagatctctcaagccgtacaggtgcaggatcccatactcgaatttgacaccacacgcacctgcaagatcgacatctctaccctaccactcttagatgctttcttaaaagagtccgcccgtctccacccaacagactccatctccgtccgccgtaaggcactgcggccattcactttttccgatgggacaagtctcgcgaaaggcgatgtcgcctgtatccctttgcagccagctctgcagaacccagagagctacgcaaacccacttacgttcaatccccataggttcctaaaggataaaatgactagtacatatatcagaagcagcaggtcaaggttcactgacgcggatgtggccttcccaatctggggtttggggaaacatgcctgtccgggtagacattatgcctcccttcttctgaaactagtgctcgcgcatgtcctcctgcgttacgaaattaaattgcccgacagaaaccggaggtctgaaaaaaggtcgttttactggcgctcggctattgtgcctaggtcaggggctgttttgtattttcgggagcggggatcgtgtactgagtgagcctagtatggagtactttgatgcctacggtagcttaggagttgcttatgttctaatgacatttattaacacaggtgtttactcaataatctgaccataggcatagattggctgccctctttatagctttgcttgctccataggcttacttttccacgcttgaagctaattctaccaagcaggctagatgtataggtgcagtccaggcagatcaggccatgggcgtctgatcgtagtgaccttttggcccagttaggagtatgcttgcctggacacatattcctaaacagttatttacgtactgaattcttcagcaaatttatctttctgtcctctagagcctggagttaagtataaagctcaccatattgctgtctttacttcttgatatttaaagcaattttatgcctcaacagtatactttagcaatatattctctctataatatattatcttacttgcaagtataccgttaacacattttctagccacagcccaccgtcagctaacaatccattctgtcttttctctcctcggttatcttcgcgggttactcaacagtttgagggcccaaaaatgacctcgtcaaaaaggacatttccctcagaaatggcaccaggaccaccaaaggtgcacgtagcagcgaggttgatcgttgtatttctctcagtaggctggatctcgccggtaagcgtttcccagctgcccgcggtccagacgaggtcggaggcaattgcgccggcctcagaatcttcgccgaggtacgcgctgacggtgcatgagttgacggacgagatggtctcggcgagacggaattgcaccgtcaaagtgtaggactgctcgttatcgagccagtagagatcctgggagacggtgccggacgggttggaggcggttgttgcaatgtccctgacaatgttagtggatgacgaaagctcaagctgaagcaggttcatacaggtaataggacccggcataagcaaggtcaccgttttgaacggaggcgacagtgctgggcgcggtgtaccagtagtttaggccgctctcgaagccgagattgctgatgtcgttgcaagacattttggctttttgactctgaaaggtgagattctgactaaatttcgtgggttcttgtctgagttgatgatggagaggaaagccagacgagtattgaggcggtttatatatttgtcaaacaggacgcctaacaggctgtgtatagctactgtgtaagtaaatagattcaaaattgtgtaaatatagcttgtaggtaagatctcttgtctccgccagagacaaacatagccagtcatactactataatatctgtgcagcttaatggcgctctatgcttcgtagccggcgaaccgtactacctagttggtgaatccttcaacctccacagccaagctactttgagcttaagatccacaagaactaaccgcagaacatgtatccacatgttaaatagtcgaggatgctgtgggggcctcgcaacgtcatgctggtttgttgagcagcaggcttagacatggacgtcaaagaacttgcgagcttttcagtcatttactatgcaagaacaagatagcgatgaacatgtctgaacacaaccgtgcacctagttgcgaaaccagagagcatggaaatgcaggtaagtcaatgatacatagctttgaggtttaatgtacgcctgtttggcggtcatacaagcggaatattaggtctactctttttaagtccaacgcagctcagggcgacaaatcccgatcattgctgataaaaaagataacatatataaaaatagcctatactttcttagtcgtttttcgaccacgtcatgagctccagctcaaactacccgattccagtttgaccggttgagaccattcaagacccaggaaaagcaggaatgtctcaaaatacagccaatattcggacagtatcaccttcgcgcgtcgttatacgcactaacaaatcatctgtcagctcctcgactgtctcacactgatctgacgccatggatgcttggcgggcgcctctcgaaaaatatgttcagctacggaagaactataacaagaaactaaacgaaccctgtactgtagacctttgaacgaggtgcctgagctgccgacaagcatcaggcattccgccacgtacgccgccaccgtgaatgccgcatattgttgccaggtgttgttgttatggttccggagacacaaataccgcgattgtctgggcctgggaaggaactcataagggattacgaggggttcagcgtagggaaacaggagattcaaaaataatcctcgcccagtgctcaattgtcttttagcccagcattctttaggagctgatgtgctgaatcagcttattggactagagcacttcgtgctcatacagctgattctcgagtggtaatcagctgaagaaatgcatgttaggtttgcttttacgtctaccttactgccggattactttttctgttgctattaactagccagtaaccgcttattaatgcctgattggtccacaatctgtgctgggcgtccatcatcatacaaagcgtatgctttttttttttaaggtccacagctgtggacagtctgttcgaaacggggttgatatttcaagttcaatacgaatacgggcaggaaattcgcaattacgcctgctcaatgagtggagagtacaaaagtaagaagtaaaac

SEQ ID NO: 4085 - DNA, 2667 bp, Emericella nidulans
cttagtatgcgcgtccggcccccgcggtgtccgcgggaaccggtcttactttggccgttctgtttactgagggttaaaactgtttttcctacggtcttagttacgtctcatggcctaatagaccaagaatgaggcgttctacttgcctgtgcttgattgcgtcgagaagccgccgcagcacagataactcacctctggggtcagatgtccttcagatcagtgtgcatcatcaaaatgtacccctttcctttgcaggagtcttcatcaacctacttatatatctttgaaccggtgttctgctccgtaatcattaagtcgatccagatatccaagagcgccaaccacacccccggttgtcgtccggtagattgaggcagaggcatcctctaattcttctaaaagtgctcccaggcgctgactcttgagctcctagtgtacgtgcagagcctaactttgcgtccggatgctagcatcatgacttgagagttgcagttaagttgcccttctctagtttacagagatttggctgaacgttcagcccagcagccaacctcaaccctatgcccagatgcagtaatgactctgtcgatgtaccgagtggatctatacccacacacttggcaaagcatctaagccgccaaggcacgaaagatcatcgtcgtccccaccgtccccctagccctaaactgcatgtggtaatccgccgtagacacggatacgaactgccttttgcatgtatggcttcaggaatggggcctcgctccgtagaaaatataaagcaagccgtggcttcacggctgcagaaaaaatagtccttgctggtgatttatctttgcttctcctctcggaacctcatcaacttcggagccgcttacttttactcgcctattcggaaattcttcagagctctaaacaccacgatggctgccttcgagaaaacataccgctcaacgccaatcaaccccccgctataccaggatgcttcgcctgaggccaagaatattacctacaagaaggactggaattactcgctcttggactgctgttctccaggctcgttgtgtaagctcgcgctgccttcccactaatccgctgctgttgaccgatacccaggcttcctgacgtgctgccttccctgcctcaccttcggacgaactcaagccagggcccaggacccaactctcaagagctacagcagcatcaactccgaggtgaacaacgatgccattatccagaaaatgcagaggtagtcagttcatacggctaacctagtgtttgcgcagtgtctgatcttcaccggcctcaccctctgctggtcccaatggatcattcaaacaatccgacgtggcgagatgcgcgaaaggcacggtatcagcggctcttgctgtggggactgctgcgcaaccttctggtgcggatgctgtaccctcgtccaggaggagaaggagatggagttgcgcacgaggccagagctgacggggtatcaaggtacgccgcagatggcgtatccatgaaaattgagaatactgtgcattatgtatatttccttgtctgttcgcctctatgtgtcctatgcatgtccactgtttaagcagattcgtagaaattgttctgctccgtgtatcgaaccccacaatatatgtctctaggaggcagtctaaagacagtctgtgagctaatgtaagatatttcgagacagttctgtagagatagtaagtgaatgaaagttaattttatcacaggctagaattctatcatatccgactgcgcacatagaggggatacaaatgagaagaaactgtcggagcatgggttcctcccctgtccttggggtgcccggtctgcacagtcttagtcagcatctcattagtatttagcctagcttccttgtgcatccgcacccctgaatactagactccttcatgcttccacagcctcccagggggcatctggacgtgccgcctaaacagaactccctaaaactagctcgatacaggtttgaaacagcaactatggacaatatgtgtcggagatgagtgggagaagcatccggcactaccctggccgggtcttctaggggcagaagcccgttttggctacctatagacaagggagagggcttgtaccgttgatccaggtaaattaaaataatgagtcttgtcctatagtgtatattccggtgagagagcacgtgttgtcaagcatactgcaaccaaaccagaaggtcactataacccgaacccatggcctgactgtacaacttgcactataattgacgggcacgtgacacagtgtcagaggtgcaagaacagacgcccaagcatcaccatacccacaggcatcacagcgacacgacgaggggaaaacagcacccctactgctctaataactgatctcttacacttggctcattgctcatcccctccaccccatggaggtggatatctcccccccaggcggaacccgtccggcgactccgctcctgggtgaaaactctgaccccccctcaggacctaccaccccgacccccctaccccggaactccctgaagagaagggccttattctccccgcagaagactcccactgcagctccagtccctgtatcccatacgccgcaagccccgtcgatctgcgaacaggtcggcatggtagcagacgaccagct

SEQ ID NO: 4086 - DNA, 3338 bp, Emericella nidulans
ctgtggcacgtttcgcgtccagagtgtctgtgttgcttaaacacagcgattttgtgacgtcaattcaattccatccgcgtgatgaccgcttcttccttgcaggatctttggacatgaaacttcggctttggagcattccagacaagagcgtggcgttcaatgtgacagtgccagacatgatcacgtcggtctcttttactccggatggaaggcactcaatggcaggatgtctcaacgggatgttgaatatatacgaaacggacggcctgaaaccggcagggaatattcatgttcgctcggcacggggccgtaacgcaaagggtagtaagattaccggcatcgactccatggttttacctcagaatgacccggagggcacggtgaagctcctagtaactagcaacgattcacgcattcgcctatatgactttcgagaccggagtctggaagccaagtttcgcgggaatgaaaacgcatgcagccagatccgggctagtttcagtgacgacgggaagcatgtgatctgcggtagtgaggatcgtagagcctatatatggcctatggggccggttgaaaaagacgctgataaacgggcctttgaggtgcttgacacgcacgcagagatggcgacggatggcatcatggccccaaaagctaccaagcacattctaggactttcagaagagccgagttatgacctgtgcaacccggcaccggtaaccattgagagcaacaccaaaaaggaaaatagccgacagagccgactgtgcactggcagtaaactggcccaagagtcacccgggtttcaagcacgttcggctcacccggatgggaatatcatcatcgcagccgattactcaggaaagatcaaggtctttcgacaggactgcgcgtatcacaaacgccggtatgatagctgggacactcactcgacgatctcccggcggctcctccgccgtaccaactcggcacggcaaagcatcgcctcctctattggcaaggagtcctcccacaagacgccgtcggagcggataatctcgtggcgcaactccgtcatcgggcatgacagcacgaataacagagaccaacagccaccaaggactcgaagcccgtccccacagaaggcaatgcgagaggcctctcggaactcaagtcctgggcgcggatcatccggcgcacgcggtgaatcccgctcagcctacactgcatccccaccgccatcagcatataagtcatcgttttctagtccgcgatcaagcttcgccgagaaaaggcggcctaccggagccggttttgggtcgaaacctgaggactctcgcgcagtgcctgcccgctgtcggcagctgcattgatcaagggaagagacggcaatgataacccacgctggctccaaggcgaccaaagctatgccttctataataaaatcacccaggacgcactcgcagttcaccgtaactctccgggccttctagacccaaacccacggccaagtccggagcggaaactcactagagctagcatactgagcagcgagtatgcctcatccgatgcctccgatgctgacaatgacgttctcaaatgcgatagctgctggggtacaaatttcaaggcgaccaaaggtcggaacggcaagcagcgcttgatatgcgtgcggtgttctcgccccatcagctccactgctggataattcgttgtttaaccattttcttcactcttctagcttcgcatatatattatattctttggcacggatataagctggtgctgcacatattgatggaatcgtcatggtcatgtttattgttgatgtatgggcgttgatgtaggccgcattttggttttggattttgaccctttgacgactttattaagcttggcactttgtatatgtagtaacgatttggatgatatgagcatgacacgagcgtttatatattcaattattgtgctgcctaatgttgtagcgagttactaggcatggtcggtaatgcgaggaatctcagctatctaatccttacaacatggttaacggagctgctgtccaccgccaagctcgaatcttagcgctccgttgtcttattattctcccgtcaactccacaataatcccattgacaccacattcataacgtctcatcccgcgaactcgtactacagcaatccgtaacaacattgcggctacgttgaaagttattgaagagttattacacgaaaggaaagaataaaatacatacgcgaaaatgcgttcaggaccctacctcccgacctcagccgcctacctcaaggaatcctccctcctcctacaggcatacccagaatctgtacgttcttcccttataactaactcctctgctttaatcaaactcagcttagttaacgatattctagacgcgaataacaacaaaatacacatttcccaagtcttcaccctctacaaccaacaaatccaagcccgaaaccacaccctcaacacaatcgacctcaaccccagcagttccaatcgcaacgctcgtattaaaaacatacaatcccgaagctgggatatgtttgaaataccggacaaataaagccgctgaggtggggcggctgattacagcgctgggattgttggctgggggtgcagacatggcgagcttggatggaccagtttctgctacgattacagggggcgatgtggagatggggggtaccaacggtgttggtgaggaagttgtggctacggcagcgagtacaggtgcgaatacgggtgcaggtgttgggaaaggaaagggcaagggaaagaagaaggggaagaaatgattgagtggatctaagatgaaataaagggatagtatcttcacgctattatgctatatttggaccgcaagttgcggcacggggtaattcggcttatgacctcgattgaaatcattatagaccgcagtacccccgtatcaacataagcaatagatcacagggtcaggggataccgaaaaccgagaacagggataacgtctaatgaatacagcgcatagccaattaactatccaatgtacaattgatatcctattcactaaatacatgccgtatcccataccgtgacatgagacaagacaatttagacattaaacaaaagaaaccgcctatacaaacgccgagcccatgcgtatccttcaataatcatcaatcaatgaacaaaacaaagagggaaggggtataatgttgcgccgtttaaaagtcctcgtcaaaggacaaaccgttgccgtcgctggtcttggtctcgtcttgcttgggatccttcttggtgctggccatgacaccagccttctggtagtcaccgacccgcttctcgaagaagtt

SEQ ID NO: 4087 - DNA, 4074 bp, Emericella nidulans
tactatccaataatgacggtctgtcgacggctccggatgttgccctttcattcaagacagctatgctcgcccagtgcagtttaacaaggcgatgagctcaatgcctgtctcatcgtcctcgcggtcccctcttccctctccctccccgctgaccgaacgtcgcctgtttagaactttctcggggttatcagcctcgtcgcgaccacgctcgcccacaggcaatggccatgctccggtaacagaggagataagcgagatcaaacggtacgaggactttaccactatcgactgggtccaggatgcggtacacgagcaagcgcgacggcggataaagcgccaggaaggctcggggttttgggacaaagaaggcacctttaaatggaggcttaaagtacgggagtcttatgacgctgggcaagcttggcttgtcattacgatcgtcggggcagtcattgggctgatagcggctgttttgaatattattactgagtggctgtcggatattaaattgggttactgtacgacggcgttttatctcaatcaacagttctgttgctggggtgctgaaggaggtacgtctggtcctttttttgtagtccttgtggcaagctaactttgatttctcaaggatgtcctgaatggcggagttggacttcatattgggttgtgaactacgtcgtatacaccttctatgcggtacctcaatctttgttcgccccaacgttaggcaacagctgagtatcgataggtattatttgcatttatagctgcgaagttggtcaagtcgtttgcgccatacgctgccggatcaggcatctccgaaataaaatgcatcatcgccggcttcgtaatgaagggtttcttgggtggatggacacttttgatcaagtcaattgcgcttccactggccatcgcttcgggtttatcagtaggtaaagaggggccaagtgttcactttgcggtctgtaccggaaacgtcatctcgcgattctttaccaaatacaagcggagcgcatcgaagactagagaagttttgacagcaactgcagccgccggcgtcgctgttgcttttggcagtccgattggtggcgtattgttctctctcgaagtatgtactctcccctatattttgaatccgagtactgacataacgtaggaagtagcgtcctatttcccattgaagaccctatggcggagctacttctgtgctctggttgcgacgggagtgttgtcggtatgtttcagttgttctcagtagagcatatactcatgtttgtacaggttatgaacccctttagaactgggcagctcgtcatgttccaggtgcgatatgaccgatcatggcactttttcgaattgatatttttcgtcattattggtatatttggtggattgtatggagcgttggtgatcaaatggaacctccgcgtccaagcgttcaggaagaagtacctctctcaacatgccgtagttgagtccgtgatcctagccgttgttacggcagttatatgtttccccaatatgttcttgaagatcaacatgactgaaatgatggagatcttgttccaagaatgcgagggagagcatgactaccatggcctttgcgagtgagtggcctgaccctaaccgttttcattgctaatgaagcaggtcgaagtatcgctggtcaatggtgttctcattagctacagccacaattttacggatattcttagtgataatatcctatggctgtaaggtgccggctggaatttttgttccatcaatggcgatcggggcgtcttttggccgcatggtcggtattatggtccaggcattgcatgaatcgtttccagattcgaagttcttcgcagcttgcgagccggacctcccttgtatcacgcctggcacctatgcattcttaggcgcaggcgcagctctgagcggaatcatgcacttgactatctcagtgaccgtgattatgttcgagctgactggggctctgacctatattcttcccactatggtaggcaatgcgactcctaatcgtggcactactgacgtatctagatcgtggtgggtgtcaccaaagcagtgggagaccgcttcgggaacggcggcatagctgaccgcatgatctgggccaatgggttcccattccttgataataaagaggatcacgtctttaatgtccctgtttcccatgcaatgaccactgacccggtatcgcttcctgcctctgacttcccagtgcgtgaagcagagcaccttctgaatgataataaattccaaggcttcccaatcatagaagaccgctcgagcaaaatcttggttgggtacattggccgcacggaactgcgttacgctatcgatcgagccagaagggaaggtatgatttctcctagcgcccagtgcgtgttcaccaaggacgcagcggaagcctcagtcgcccgccgcgcctcctctactttgcagcgtactctcttaacacccgacactttcgataatatcgagagcagttctggggcgagtttcgtggactttagcagatacatcgacaacacgccattaaccgtacacccacgcctgccgctagaaaccgtcatggagatcttcaagaagatgggacctcgtgtcattttggttgagcaccgtggccgactcacgggccttgtcacggtcaaggactgcctcaagtaccagtttaaggtcgaggccgaggagcaagcactagctgcaacacaccatcccgaacttccccttggggcgtaccaggcgaaggataatggcactcttgaagaacgcatctggaatcttatgcagaagattgggtcgaggttttccaagagttccggacaaccacgagatgccatgcctctcccgcaagacgaccaatctccaattggtgtggggaatgacgcagatggccggatggtcgagttggaagaacgaccttagtattagaattttgattgtatggtaaatgaaatatagacgaacaatcctttatcctatagacttctcacaactaaccgcgccctccctatccgtaaccatatggttggagccttcgtagcaagtaattcaagactcctccctcatgccgacaagaatacaccctccccccatcatcgcggcccccaaccaccatagtccaccaaccttctcccgaaagacaatcataccgagcaaggccgttatgaggaaatttgccgacgtgttggtgatagacacctttgtcgtggacggcgcggctgtcaatgcacgcgtgaaaaatgcccacataatcacgttgcagaggacatttaggccgagacatatcttgacaactttgttaactactgctggcatgctggaagagaatgacgggattatatagagagaagaaacaagcaacttacccccctcacaacaaacatgaaaacgggatggccttcagcgtcgccgggagcgccgaagagagacaacattgcattcgcaaaggtggtcgtttgttcatctgttgtgctattcccgtattagcctctgaagtgatttctataggatatgagtagagttcatacagtttcgcaaagaggccattcaaggcggcgaatgcgcctgacgcgatggcgaggaggatccagcgcggttccggccgctgttgggattggggccgtggcgttgactgggacatcttctatttccgatttatacaatatgagttttagtatgcggtccggggatgttgtaatcaagttgcgcgttaagaatttaggcgtcggaactcaagatgagctttgccaagtatcgcatttccggcagtcgtcgcaatctaatgagcctactccgtactgttcgatctattcttttatgtataaccctgtgtgccaacgtgtaacaatgttttatatttcgtggctcattcacactttctgctctatgataaaaatctaaggcgaaagtcgctcaatccgccatttatacgacgactcatctgtcccatgaatccgaacatatcggaaccgatcatgtagacgactgcggcgaccctgccagaactccaccgactccgggatcaaacgcacgcctccccagaacggagggagggggata

SEQ ID NO: 4088 - DNA, 4575 bp, Emericella nidulans
gcatgtgtaatacaagggtatcatttgtattactttcagtatggaaatacaagtctttcatactgagggggtgtgtcgactagaaaatatgactgtctaagactaatttggaagtcatgacgcctttttggcttagctgtatattttaccgatatattctctctcagtgttatctcgcttcgaatcttccccactgtactttctggtatggttcgtgacaatgaactaccattggctatattttatgctccggtcgtgggtaatgcgttgaaagtagaatgaaagatagtccatggctgtaaaaatgttctcccacattctatgaacagcgattttgaaacaggtcaacggagccgctaattagcgcacaatcccctggcgtcaatgtattggcgcttcgagcggacgaatggccatggacaggctctgtgctcttgctcgtccgtattcaaacagctaacaatattactaataaccctattcataattacattacctacgtttgttattgatatatcatatatgtatatttcataacacattagcatttaaagacaataaatctcttatcgcaattggtccaatgaacaaatacaaaaccatttgatgccagattgcagtagtcaataggctttactgcttcattgcaccagtgtgccatgctgcaactttcgttaggctgttgtcagattaattgacaatctgaggctgccctccgagtttacttgtagcatgaatcgaagtggactagaatctatctttcatgcagtgactgcatactgtattcaaagacgctagaaggtgtctgaagaatggcaagacagacttcatcccacagtcatccatctgctccaaatgggagttcacttcctgcccctgccgtggtgctaacaagcttctctgaacagtatccatacaacactcgcgctatacaacactacactacaccaacatgccttccaagacccaaaagtcgcttgaggctctcgtggcctatttcaaacagtcgaagagccgccgcgctacgattgtgcgtgggcaaggcgagcctggtcaccgagctgccccagcgcgtgggggaaacaatgatgcaagattcggaagccgtattgatatcggagaaattactgacaaagcaggtaaggaatatcgacggtacaaattccagttcaatttgaacgcggagattccactctcaagaaaaaggccgctcaagattcccacgagggttattcgaccgcagatgtggagattcaagacgataggacagagggggaagaagagcaggcgatgcgagagtttgaggaggaaatgtcaaagaacttgagagagtaggcatggtcatatcagatagtttctagtcagatttggctaagcatcggagcttctgagcgttggtaagcgtgctccccgtacaatggctggagagaacctcacagagatcacatttccctattgaaactttcttgaccaactcgttcctgaggttacctagtacttgcttctactcatggcctcggaggctctgtaaggttattggtgctctacgcttaacttatacagatcgagattagtcacttgattccgcaataataacgcctctgcccccataaaaactctcaagatccgactagattacctagctgcgcatcttgtgaggtctggttaggacgagatgtaaccaccagcttcataaagggatttgtcgtccgagaaatagccgcgccacagtctaattcatcgaatcttggagaaatttacgacacacccaaggcggagagtcaactaaaataacatatagtagccaagccgtgaggtggatgcttcagtaagtggtgttgaagcccaatattagccgtcgttatataaagagtacaatgcgggaccagaacagcgaggcgtctaacctttgagctcctgaagcagtatacactcggtggatgattgggctgactgacccaagggatgattagtactacgatcatgatagtaaaaataatgttagacgtaacccttgaaaaagttcgggcacctatgtgctcatccaaggcacagagctactcatacatcagtctaaatgccattcattacttatcgttcaagataattgagcttaactttttcattaaaaggaactattcttgtagttaaattctctgctatgatttaactcgtcatgtggggtataaaaatagtgctcagaagtgaaaccgcaggcctcggctacagaaccatgcgcaacgaagatgcaaagaaagatatatcttcactcttcaacggtcagagtagcgctatttgaaacggcttgcgagggcgtcgaggttcatagtgaacgagagatctgcatgccttctcaatgctgggatatcgtggaatgaaaatgggatggctatcgtcctccctccacgggcaactcgtgcagcaatccatcgtggttcccatacagctccgcgcggtatgcattgttgtccagctctgcctggaagaatccggcgtgctcttttgtatcgtggccaggggcagagtcacttgtagatgccaaaagcgaactttgggcagccttctgccgccgtcgtatgagataccaggccagtgcgagaatcagagcaaggcccgcgacaccaccgacgacaccaccggcaatggcgccagaattcgtagatgaggatgattcttccgacggcatgggcgtggacgagggtgtgggagacggtgtaggcgttgagctggacatggaggactgggctgcttccgactcgttacctgtaatccaacgcatgcgtgcatcattagctctttgatttctcgttttttcctgcgaagcattattcaaaccagtagctgcacgacataccccttgcaaccggcgggattgccgtacgcaggtctccatccggcagtacattcgtacaaccgataccttcggtcgatgtcccgttatagaccaatccgccttgtatgaacccgtacgcagtattctggcagcagaagtactcatcatcccaatacaagtcccaggtgacgttgttcgcgcagtgcggaacctgctgaatgaatggcgagcagtcgggccgttcgcgggcagcaggtgttgtcacttgaacagtgagttcccttagggccacagtcgtgccacaggtcccagggctggtcgcacgttacttcggttgcactgcaggaaccccatcgacgaatggcgaagcccgaaggcgggccgtatgcattgctggatgccatggagttgggcagttcaagtaagtctagagatgacaatctggaaaaatggcaaaagccaaacagaatagacagctgcaaagaatacgagaggagttttgggcgaatgggcgatggatgtgagaagggggagtgttggtagcaatggcaaaggcgtgcggatgggggccggatgcgctgggggcgggcccgtcagtcagcctctctgcctcgctttgcgtgcttgctctttacagggtcgttggccgccagagatgacgatcaggagtctagggaagaaggtgagactctgtcaagagcggatcaacgccccgaaataacagtggagaccctaagaatccgaagcgcctcttgacgggctgcatcagaaaccctaacgcgcggtccatgttagtgcgggcacatcgttactcgttcaatgggaataattcggtgtccagaacagctcctcgcgacctgatggcggctttgctcatcatcctgagtaccttatgctgctccaccgtacttcttccttcgccaatgagctgcaataatcccgtccctgtgagatgtagctagttaattggctctgatgcggctggtacgcttaattcgactctggctaagctgatcattccatactaggaagccgcatgcaccccactataagttaggcatggatgatgcggaagaatttatcactaccgtctgaccattggcgacctcgtatccaactccaggatgagaccctacagcattcgagtattcagaccactcactattgtggctacaaaaatgcttccgctcatgtctactgtgctgaagcctacccctactctgcaggtatttacgagcacaccggctacgaactgtatggataccttttaaccttttctaccgacttcgctatcagtcattccacgagaaattcgagctataaaaaggacagtacctgccttagatcactacctgtatcctgcttaaaggcctttacaagtgcattttgctgtcacgggcggaagagccgtatgataaggcccctaccaggcgaatgaactttgtttacatatcgtaaagttcaaatctgtcctgatacacttgtcctcgctgtgccagaaccagactctccctttgtccagtagtctaaagggctggtaggttcttcctcgtatatattctcgcggccgcttccgatatacctaaactcagacaccaaccgttggcgttctcaacggcttgtcagcggccacagatcctgcctgtatcgcatcactattcgcacaagtcgagacttacacgttaaacacgagaggagtgaattgaacaacgtccagcccctagcaagccagtgtattgttg

SEQ ID NO: 4089 - DNA, 1254 bp, Emericella nidulans
actcctacttccagaagtaccttactcctcgacaaccctccgtcacatccttcctagcatccctcgcccaagcatctcatgacctaataccaccagacgacctggaaccactcgttcaaaagattgcgaacgagttcgtctcagaagcctcagcatctgaggtagcaactgccggtctgaacgccatcagagagatttgcgcgcgacacccctcgcgatgaacgaaaccctactccaagatcttgtcatgtaccgcaagagcaaagacaagggtgttgtaatgggagccagaggtcttctaagtctctaccgagatgtcaatccggagatgctcaagcgacgagaccgcggtaaagacgcctccatcagcctccaacacggcgaaaagaaggagaaacggttcgccgcccaagaggccggtggaattgaaggcattgagcttttagagcaatggaaggaggaggagcgcaagaggaagcgagctgaaaaaggcctagcaaccgacgacgaagacgaagagaacgaagacgaagacgaaaatgactggactgcctggaatgtggaagatgacgaggacagtgacgactctggtggctggatcgacgtccagagcgatgtcgaaatcgacctcagcgattccgaagacgacgagcgccccgcaaagaaggcaaagcaagctgatgataaggaaaacagcgctgactccaaccctcaggctccagaaaccaagcctgaccctaggaagcccagccttgcaacatcccgcatcctcacccccgccgacctcgccaaactccaagaactccggcaacaagccgccatcaatgccctcgtcccaggccctaagcgccgcggtgcaacctccgagagccgacacaaggaagaccctctcacagcagccgaaatcgaaggtcttgctgccctgtctgctgggaagaagacacgcgaggaacggattgcgcatgctaaggaggggaaaacagatcggtccgagcataagagtgtgactgcgaagcgcaaggaaaggaaagaagagcaaggcaagagtacgaccaacaaggaaaaggcccgcaagaaaaacttccttatgaccctgggcaaagcaaagtctaagggaaagcgtagtttggtcgagactagagctgttttgagggctcatcatgagcgggcgaagaggggtggcagaaggggtaacaggtaactgaattatccgtggtgatatcagttattttttgcttctttgctggctgcgcg

SEQ ID NO: 4090 - DNA, 1910 bp, Emericella nidulans
taaagggtcgtcggatcgcttcatgcgcttgcagatatcggcaatgttggcgaaaatcgtacgcctgttaccttcacgaagacattgcggaggaggaatcttgtacgacttggttccactcgacaaaagatcggggtggtggctctggatgagagagaagaatcgtgagacgagcagcgagtaggggatggcctgggtggcgtcgtgggcccaaatgcctgtgccggcttcgagatcgccctcaggcacctcatcctctttcttctcttctgcctccttctccgtaataccggcctcggcgagcttagcttcgaagtcgccggcgtcgaccttcttggtcttcttcttctttttcttcagcgctgtggggtcaaactcgccgtccgcggcgggggcgggggaggattcatcgtcgccggcgtcggtgtccttgggcttcttggtcttcttcttctttgcaaggcccttgaagaggtcggttacttcatcgacagccttgtctgctgttggtgagtcaggtcggtgttcagtgaagagaggacgcggaggggtttcggggtaatccgcaccttgctcttcaacaggcttctcgagtttctgtgtgacttcgccgttcgtatccatgatgacggttccttcactgaatgcgacggacttgcgttgtttctgagccgttggttcgacctacgcagcccggataattcgttagtgggggaggagaattcgaaactcaaaatgccaaggagtttaaaaaagcgggagaacaagacgcgacacaaaaaggaaggtatgaattatcgcagcgcaaaacaagcaaccagtaaagtggatgttgagcacagcatcagcaggttatgcacaaggactttagaatgtgggcgatcggtaaaagatacagcagcgaaaacaagggtgtgtgacgtacagtctccgccatattttcggaggtaattgaggagaggaaaagaaagacggtgactacttctgtagaagaaaagaatatagtagagccttacccagtggagatacacacaaataagttgtctttgtaggttgatacctcgccttcggccgcagttgctttgagttcgatggcaagattgttatcgcgaatgtagtcacgtgcaatatgactcaactagagtatcggtaataccgtttggctggctatcacgtgttatatttaacctcaatattcaggcatcaaggctaactatcaatagcctcatcgttccaaacttccaactactggcagcggttccagagaccgtacattcatttaacgctgctagttcgggcggtaggcaggccactgcttgagaacttaacaattttgaaaccaagccactcctgcacaaaacctcagtactatatacctcactgatcctcggccaatatccgacccaaacaagaaccccccgttaactccgcatcaacctaccgacctacactatcaccaactcaccctttagtcttgagttaagcctgaataacaccacaagccgtcttcttgtcaaagcagacagttcatctaccgagaaaaatgtcttcctcttcctctaccgcagattcatacatcctcccaaccccgacctcttcctcaacaccaacgtctcctcggccccgaagcacaagctacacagactccgtgtcctctgtcgcctctcttccctccgaatcaacttctgcttcagacctcgagactctctccgacgactcggactattccgatgccgaagctgagtggcaagagagcattgagcagctggagctgctgctaacgatggtgattgtgcccgttattggaaaatatctggggagaagatgtgcttattggagtatgttccttctgtcctgtatactggtgtctcagttgatttggggagtgggattatgctaaatatttggct

SEQ ID NO: 4091 - DNA, 1458 bp, Emericella nidulans
gctgatagtcaagcagacatagcaacctagatggacaccaaaggcaatgaagtacttcggggcatcattgtccaagaacacctgcgggccgatcgcgtttccaacggcccaggagacgaatgttgcggcaatggcggcggatttcttggttgcgccaccgatgttgcgcgagaccatggagagaccgagggtctgagcggaccagaaggagagcgtgatgtagtaggagatcagcaagccgacttttgtgcctaggttcttgttgtccacggtcatgaggacaattgtgccgatgtaggagctgcggtcatgttagtcagggctgcgtagggggctatagcaggaaggctaatggacgtacgggataatgaagcccagcatgacgtagaggttctgtccagtctttcgaacgagatacgcagacgtcagcagcacgatgatgatgtagaaaccaagcaccatggcgaggagctgcgtctgcaggacagtaaactcaaaaccggcgatgacgatgttggcgaaggcaccgaggccgctagtgggaagagtagtgaaaatttgtatggcgcagtagcaccagatctatacgggtcgccatcattagccgccatgctcacgatgtcatttgaaggagagggagagggagagggagagagaaaaagagcagaacttacctgaggatcaagcagggcctccttaatctggtacgcacggaacttcctgttctgcagaccagtctggttcgatagaacacgctcgaccatgagcttcttgtgtgccacgctcaagcatttcgcgcgcataggcgagtcgttcagccaccagaggacgaagaagccccagagaacagaggcgcagccgtaggtcatgaagagcgcctggaaggatttgacgtcgcggtcgttgccaatgagactaaagcagtaggcgagcaggccaccgacgatctgttgcataccgttcatcatgtacctagagtttccatcagtgttagcattgtctgcatggattggggaggatttgcggagagacgacgtaccagtatgtcacagtctctgcctgctcctgacgcttataccacatactcgacatgagcacaaatgagggctggcagacggcctcgaagataccgaggagggtgcggacggcgacaagtgaagggaaattcttgcacgcggcgtgcagggctagcacggccccccagaggatgatgttgatgcccaggtactttgcaatcggcacgcgctggatgatccagttggtcgggtactcgacgatcagaacggcgatgtagatacaggtcgtgagccacgaatactacagataggatgcagcatcagtatcaagtcgggtcgggcatcacgttaggtctgcctccgcgaggggcgagagggcgagagggcgagagcgtgtaccttgttttcaatctccagaatcgcatactctcgaatgcccata

SEQ ID NO: 4092 - DNA, 2561 bp, Emericella nidulans
gatattattcacggacagttttctatagtttgtttttcttattatttatgacaacggcgttatggtttggctgatacagggttttcatggtacatctgatgacaatgttcaaggagaaattccataccagatactttccatacaccatcttaacaagaataatatggatttgactgattaacgaagtttcaaaatttactgacaggataggtctgattcgcattaatccttcttcaaggggtgatagacctcctctatcccatctgcagtaataaccagcatctgtaggccatctccaacctcaatatgtctctccaccgcgcttgtaaacgcatctcgcacaagttgttccaccgtctctcttgacatcggctcaggtttcctagcttctagagcgtgtccctctccacttccaggaatatactggttcttcaagttgacctggttgtccaggaacggcataattaagctagacgcggctccagcagacctgcactgttcccgttcatatgagcctaccgggtcgtaaccgtacagcgcccccttgccctcttcgtctaagccggccaggattgcctgcacgtagtatggaaagaacctcttctggtagagaatggttgatagtcgctgcgcacatgctctcacactcatgggtttcccgtgttggtacttatacatcttcacaactgcatccagtctctccttgagagctaggccatctgcagcgaagcccaccactgacaggaggatgtgagcgccttttccggtttcatcttctcctccaatcttgaaaaccttcggaacgtagcgagagttaatgttgtacccggaagtcgaacgggtgtcgccagcaaggacagcgaaatcctttcccgttatgcctaggaccgagcctccattatcagtatacctgaattaggttagctcggtgttgaatattgaaaaggaattctcagcgtattacggatagaatgaatgttccttgttgccagcgttcgtcggctgggcgaaggagtacccgataggattgatgtgagggtcttgggagaaaagacttgtcatcttagtgggttttgagacgaattccgcaagttttactggtgtagttgtagagaatgatgtaactgaatattcaggcaatatatggaaaatgttaggagagagatgatgaggtcaatgatgctcgaatggagctctcacctactgaagcggtgctggagcttcctttggattatgtaatgtgctagcagccgtcccattgtacagctttgcacaggaattaatacaacccaacaaatctctctctgccttaatgaatatcccttgtccatcctttctatatctgcgatgtaatagtctgagagattatattacccatcatctatacttctactgcaacattgatatcggacatcagctttcccagggagcatttggtaatgatgctgggacttgggaattatgatagcagtagtgaggacgaggttgataaagaacagtcccttccagagtcaaaggtacaatacactatgagttcgttccttgagttcgattcacagcttaccactcgccagcaagaactgaaaacgtcacatgtcgaaggctcgcaaacaccagaggataaaagtaattgcgcccgcacgacgtttagagtatccacgctcggactaatcaatttccaaagctcaacatcgtccgaaagatgcttcctcagtacgggatactgtccccgaccgagaagtcagcggccccgtgcttgggccgatgcacgatatggggccggcacagacaagtgacggacagccattatcgaaccgtacactaatccatgacttgacgctgccgccagtaccgaacctcgatataccagcatctccgcctggatctccgaactccgcggcgaatgcaaaattccagcattttctgtcgttgaagaaacaaggcattcatttcaatgacaagttagccaactctgtttctctcaagaaccccagtttattgagccagatgatgcagcacgctgggatagatgatcgcgcgcagtactcaagctccctgccgaccgagatgtggaacacttcagacttgccgagctggggctacaaggaagagcttctgaaagcgcagagggaacttaatgctaaagtcgatgagactagggcaaaagggcaaagggacacaatcgaatttgtatcagacacaggccgatcctattcagcctcacatcccaaatcgaaaccacggtaacttaaagataatgatgacaattctgcataatccctaggtagtctaatgaaaccggccagggtaaaaagaaactggacgaagacatgccagttggaagccgcatctatgagcaactcttttaaatgtgaccttgaaagaattacgaggtttttggtaggtattaatggtcgattttactagtcagcagcaactgtaacggaaatggtgtatcaggtgtctgaaggcttctgtaatagtgattagatagatcgtggtaggtcgtgctcaccgcctaaggtgatagcatggctcatgtaattgagctccgtcagctc

SEQ ID NO: 4093 - DNA, 6329 bp, Emericella nidulans
  unsure (1)..(6329): unsure at all n locations
accatttctttgggacaaaagaatacttttcctgattagtcacgattactgcttgggcagtgtcagagtcaccagaattagtgtcttggtgctctgatccatacattatcgttaccgccggttcttccattctatgctatgccatgctatgttgatccagccgcattgctactagttagtcgtctagctcggtatgaactggaaaatcgacgcttttgacacttccagtccttcttaaacattgaagacagcattcgttcgcgttctatattcatcttctcctctttccaactacactatgtgtattgcgcacctcctttcttttctatacccaccccttctaaccctgctttcctccaaaccccacctccaccgtctactctcaatctcctcccaagcacattcaaccgacatacccttcaccgatgcaatttcatgcaaatattcgtggtaacgctccttatatcgcgcgaacgcacgcagctcgctctcccgtctgctaataccgctgccactagcaccattatcgaggaaggtcaggtagtcatcataggcgatacccgttactctttctgactttacatccgagtatgaagtcaagcctggagaaacaggcctgaactctccgtcaccaggagcaggatttgctgtcaccgcttcatggtctgggtgcaggattttagggttagagaaggctggctcataccgcgggtcatagaagcgggcgagagtatctttgtagaagatagatggggctatattgcttagcagatcggtgcatctgtgtgaactgggacagcagtcgttgtccttgttgctggatatgctgcctaaaaagcagtgcagtggtatttgtaggaacctttcgaggattggtttcatcgtggtgtaaataagaattaggagtgtgaaggtcagtgtaagtataagagtaagcatgatgaatatagttctctgcacagtctgagatctggtgtatgtttatggatattgatatgagctcagctgaaggtaatttggggacgatggttcatttaaatacatatttgccataagtggacggtatagttggacaaaggggttgtcgatagaccaccatttctttgtggctctcactgtcccaatttactgttgaggccgtcattgtttgtttggctatcgtctcggttcatacttccccttttcaactatccattatatgtcctttgcagaacatccacaggatgtcattgagctcaggcaaacgataagctcattatattctgtatatgcttgcggcatatcttttgtctgtcctaccgttaattctccatctaaatcctctcttactcaccatcaacacaacatcgagtagatcacaaatccaacgcctaatacagctaataggcaggttttcccgtgcggtgcacatctagaccaagagtctctatggcagccctagccctaaccgnntcctctcatgttctttccttggatctgcctctctacctcgccgcttctcgtccggatctctcatcataaatctattgcgcgtgcatgtcgatcactattttaaggagattggtcgtttgcgctggtcagtgaatattgggctaccggccggttaatggagatgaacatgaagacgatgaccgggatagggatgatccagacggaattgggagcgaggatgaaggacataaacgcttgtgaatcaggagccggggaagcctcaacctgaatgtggcagtcgaaaagtcagaatatgtgattagtactctgaactcggcatgtgacgggtgtggtgcggtggttgacgagcggtgtgatttacagggtactgaggtcgtcattgaagccgacttgatgcttgattggtagtggggattttgtgcctgaacgctgtatcccgcggcaagtcagcattcaggactttcaccttaatccccgcagtctgactggacagactgggttttgactgctggccgccaattgcaatgtcatagagttagggcctggtctcttgtcgacatctcggctggctggtcttttacgattagttggacgatttggagaacaatcagcaagtcatttctcgtctatcttatctatcgttctatcgagctaccgttattgattgattgtcgtaaccaaaatccgggtttcatgtatggagtccgaagtagtattcaaatgtgggtacgtaaggaagattcctcaaggagcgcagtagccaccgtcaaccacaatatcggcacctgtcgtgtagctggacgcgtctgaggctagatagaggtatgcacccttcagctcctccgcgcgaccttcacggcccatagggatcttgtcacaccagatgtcctttgtctccttggggacgaagttggagatctcagtaataatgtaaccaggggagatggtattggcgcgggcaaacttgacccattcaacggctagggacttgcctgtgctgtgttagccttcggcgaaccacgcattggtgtctattcaaggacatacataggtggataacgccagacttggcggcgttgtaggcggcctggagttgagggatattgacaatgtggccgctcattgaggcagtcgcgacaaagctaccgtaggtgaagttctggagcttgttgccgttgaggtcaacgccttcctccttctgtttcctccagtagtaggcagcatactttgcgcagtagaatgtaccgttcaggtcattgtccacaacgtcagaatagtggctcaactggccgtccacggccggaccctgagtccatggaataccggcattggcaatgaagacgtctaaccgtccgttcaagtccttcacactctgctcaagagcctgtttgactgcctcggagtccgtgatgttgacctgataagccttggctttaagttgttaacgggagcctgccgtctatccataaaccatactcaccttgcacgccgtatctagcagcaatctcctgcgcccgttcatgggcttttgtgttgctgttgtaccacagagcaacattggcaccagcttcagccagaccatcggcaactgcgaggccaataccagcagcggcgccggtgacaatcgccgttttgcctttcagagagaacatggccatcaggctggggtgcgcaggagcttcggtgttcccgtggacaaagtgtccagtcgcatcgataggcgcgccagacattgtatgggactcgtacggtggaaggcctagaagaaagcagacagagaagaacgaaacagaccgaggggaagaggcgtggacgatggctgcaaaggtcaggccaaccaccttttataaacaaatcggggtgtccccacggactcgcgcctacgtaggctccttcacttattatcccctccttcaccggttccaagcctacgaaccccaccatcggcaagctgacaccttttagcgatcatcccgctgtacttggaccgaagtgtgcatcatggctctccactctcgagaccttcgattcagcgtcgctcgcagaatgcgctatgtatgcaaccttagattagcgcattggcgatacagacgtgagccagcagctaggtatccaagtccctggaggcgccaagatgaagcatcgctctaagttccagcggtattattgggcagatctcgtgtgctccgaaacgtacgctactccaaagcgtgctccagtctcgttctctccaccagaatcgtgattaaaggaccaattccaacaaacatcaagaatgtaaaattgaagagtctcctacagtctaagcgtcgtttgcaagacgctcagatcatgtcatgacggtaagattatatcgtctggtaagccctttgacggagaatactctgtgaagtaccgctaccaggtctcggcgttatgtttctccgaggttatccgaggcgtgataaatgattactaatactttaggtgcccgtctctctagtgcagacatcatctcgagactgtacagctcacaataagcttgtcattaggtttccacaaagtgagcaagcgagacggtggcgaagagctctagttgtgactccatgactcttattcattgcaatcttgaattaccctgatagtattttcgtcaattgattcgtttaaagcctctggctgcggcattactttactatacctagcctagctacactgctgaatgctaactagagacgtcattgactgcacgttagatcgtaagtgaggttaaaaaacgagctgatgctctcataagtgagactgctctgtgctcacaaccctgcaatcacttatttatgcttcccgtcaacaatgctacaaacgcctttcacctcaactctcctccgtgttattggacaacccaattacaatccaagggtctcttgtcgatacataccatcttgaaagccaacttgcataggtattgacctgtttaccgaagggatggactatcatcgcattcctcacgcctttgggcgcaatgcgggcacattcctccggcctcttcaacaacaaccgccctcgcccagcctgagatggcttttccgccaccatcatcatgctcatgtctgtctctcatctctaagcctacgtctggccaagcattgcagcagtgcggcatattttcgaacgtccagggctaggcacaccccgggagtgagaggaaagaattggcagctgggataaggtacgccgtttgactgcttcgttgcgagacttgcctgtcaccattgcaggggcgaaggggcatcatgatagcgttgacaacggccgtcgcgatagcggttacctgctcagttattttcatggtttctgcagtggtaattactatcatctggatcaagatccgccaggaacggaaatcgcttgcaatcatacgccacccccacggaccttacgctcatggactctcgaccttcccagcagaaacattcactgagctatcacgcgaagaaggctctgccctcagacagtatggccagctgccatatggtagaccaactgaatggggtctgttggcttcaagagagagcctggacccatctggtggcgacaagtcgccaattaagctgctgaaaaagacgcgcagcttctccctgaaacactccatatcgtcgaagtcgaagcgagaaccgaaaaacctggccaagccagcatccttagtagctttggaagaaacttcagaagatcctcagtctcaggtgtcagcttcgaaagagaacttgattgtatcagcggttgacggggtactggagcttccagcagagacaacaccccggcaaacaccagagaaggaggaaggtcagccgagtacggctaataccattcgccctgtttcgggcggctggccgttgttcgccagacagaacgcccaaatgctctgttccctgttttcgaggatcatcacgaaggcactggaaccaacggaacccgggttcgaggtggcagcatcacttcccaaacacctgggatggcaccagaccagcccgttccaccccctccttgtgcgtatcctccgaaccgtttccgcttatcaaagaatgactcgattcggttctcgtctgtcagcattgaaacagccgacagctcaattctagacgagagccgaaggacatccgcgaatgtcgatggcagtctctcatctccggcgttgcctccctgtcccacgtttatgccattcagtgcaaatgatgttggaaaagagtgtgaccgcctgagctttgcggccaacggagccccatatatcttccctcccagttctcctgcgcgcaaaggacaaagagtggacgagcgttccccccctcgtcgcagcttgactgcgtgtggccctactcgctcgtccgaacgagttagcccaccaccaagacggagcgaatctttgtctgccaggcaatctctggacaatacagccagagcataccttgatttggaccatattccaccgctgaataccaggaaccgcaataacggcttgctaccgcaatttactcaattgcagcgccactcaatgcatgccagtttgccaagggacaacgatcctttttacaatggaacggacactctatacagtttcacatatcacccacagaccacgggaagacgagcgagtagctttcagccacaagaaacaccgtctcagatcgcaaacagtcatccgaggctgccgttgacatccgctatgaaaagtagcgggcaacgaaaaggacacagacgacagaactgtgtacgcatctccattcatccaccaatcactttcggtggacctgcgttctccccaatggttgaagaaccagaagacgccgaagaattgaacaatcgccgttccgagatatctgacctgtccacatcaaatattt

SEQ ID NO: 4094 - DNA, 2304 bp, Emericella nidulans
atttagacccctttggggaaagcgcccagttgaaaccgtcgagaataatagaagtgctgctagattcgccctggaaaaccttgacggacagaaggttcgccttcttggaaacaccgtaggtttcaccgccgatagtgccagcaacatgggtgccgtggccgacgctgtcaacatgctggccaccaacagcgttgtaggcaaggctggcgcggccgccaaattcctcgtggtcggcattgatgccggtgtccacgacataggcgtaagtgccctctcccgcactggtgtcatagacgtaggtggtgctcgcttcgcccttgtgtgagatggctccaagaccccagggagcgccgctctgggaggtcagggcgtcaatgtaccagatttggtcctcttcgacgtgggcaacctgcataaccgtcagcgtctgtataccatgctaatggccaaagactgcaaggtactcacatctgcgctattccggatctcctcaatagtggcatcgtcgaaagagccggagtaagccgcgaacttgttgatcttgtaattcttctcaatgccagagtactggtcccgttcagctaggccgcgacgctcgaggttgcgcttgtggacgttcgaggcccaagaggtgtgagcatcgatctggtcaacgttgagaccggacttgaatgtgacaatgtactttccgggaaccttttcagctgctcggcgaggctcgacgggagctccaaagacggcaggaaggagggctccgagaaggaggagtgagcgcttgaacgaatgcatgacaggagtcctgaaggagttccgacgaccagggcctggatgagattgttcagagaatgaagagagatgcttcggtactgatcgaattcgaggaaggagcgatggacaaaccccactcttatacctttcgcgcccacttcatcacctccaattctgcgtcattgacctcgtccatcacgaattaaccagggtcgactcgtgaaaactcacagggtgacattgcgtccttcagacgactgaattattgtgctccatcggagacatcgttatcagtgtggtgagtgccgatgcaaagcacgccagcgagcgccatgatcgccggaggatccattagtctcgagctgctaagagagacaggtagttaggtcaccaggtatagacaagcagctggatcgttatcacgatgccacggcgcataccgtgccagtgcttctcctcacatgcgcctttagccgtccctatgttttccgctcgtctttgccctgcatccccatcaggaaggtagtacaccggtgtatctgcagccggagcttgcgttgtgcgaaagagctctgatcggacggaaaagcttcatgattcgctctgatgccctagtgtgactctttagatgcttggcatctcatgcgcgatgcgccgttgtctgcgctttggtcgtcaggggtggtcttgggtcctaagcgacgacgggttgccgggatttttctagaacaagccggagccaccggagcatttttcccactactgagtcgcagccccaggaaaacgagcgccgatcacttcggtagcgccataagctaaagtatcccagtccaactgctacttggcgacatggagtagtaacgggcattgcaaatcgattgcatgcttgtgataagagcttcttgtgactgaatatcggctctggtacgacacaagtatcgcatgtgtctggaattgtcttctgatactcccaagtaaaggatttggaaagtggtcattgcacctctctcctcattatccaccctgagccttatctccaaattaaacttggtggtcgacgcgggttccttgtcaaggaaacagcagaggaaatggtgactggtcgtgtggctcggcaggggtcgtgatagcgcccgtctttctcacaagcaggaggcagccgactgataacgctatacaggatgagaggttaaagtccaatcacaaggaccaggagcctgacgaggatgtcctggccatcctgggctttgaagccaagtgatattatcgatctcctcaagtgtaaccctgtagccactacggggaactccggcgaggctttaaagcttggcgtcctgcagcgacaagggagctgaatttatatagagtgattttagatgaagtgtctcggtctcacttggttagcgacgaagggtgtgttgaattgtacattgaaactaggtagatctggtgttgcgagccggggggccggatctcgattcttgaatgctagaccatcttgagtgatggatgatcctcgattttcgttgatcgaaa

SEQ ID NO: 4095 - DNA, 6355 bp, Emericella nidulans
cgaagggcggagggcggactcgagcaggaaaataagagaaaagtaaaagaagatatgaataaatataagagactatataaaaaaaatcaatggtaagaagtaaaaaagaaaaatgataaaaaaatcatgtaaaaatatagataaaataaaagtaggaaattaaaaatgagttgatgaataaatagaagtatattataaaagtataaaataagaaaaaactaaaaaacgtagaaggaaagtaataatgtaacaatataagaaaaaaattataaatataggaaaaaggataccccagaggaacataaaaaaggtataggaaaaaaatacacaaaagataataattagagaaaaaaaacaaataccaaatattgggcctttcaccactcagtatacgtttcatgcatttccaaatcatcaggttttctaatggttcatgatcatgcaagcttcactcctttccattcgaccgccgcatccttccgcaccttgatcttgtaggcgctccgtctcctctcttccaagtccccccaacgccgtcagcatcttccgctttatatcgctccatctccatatcccagcgtaagcggtcccgtcaggctcaggagaatagccgggtggatgtatttcagacgcctcatcggcctccaccgccagtgaatagttatttcgaggaccccgaagaggcttatgatcacgaggaccatgatattcatcgtcccagtcgctatcgtgaataccctcgaacgcctctcgacgcaagtatgacggattctgttgatgatttccgtcgcaaacgatgccgtcgtgaagacccctccttggtcatcgctgcctcgccctccggtatagacgagaaagccgcggcgcccgagcacatggcgaccgaagctaggccgttccgatggagccaagccgtcctcaatatggtaggtaaggtctgggatttttgctggtctgggccttttcgcggattctatgctggtggtggccgaggctactcgctcgaccctccacaacgtacacccgaagaagtttacccacaccgtcgctcatccacacctcaccctgtcactattcctccccgatcttcatcattgtcgcctccacctgccgaaaaaagagctgtctccgttcccggtgaatatccgcttgatgctggagaggaagccctccgtgggagctgggtcatgatttccccaaacgaaggcgcctcaagctttaagacgccttctgctcgctcccatgcacgtaaaagccacgcacctcgccgtgtggttcatcgccgcagtccatctagacggacgctcatcccacatcctcccttttccgcgcctgcaaaaccgcgcgaaagtccagtctctgtagagactcagcgctaccttgctaaacaacggcggttagagcgcgaagaggacgcaagcttgcaacgcttgaatcgtcagttacaagctatgataaaggaaggtagacaggcgctaggaacgcgcgtggaagtcgaagatgacttggacatggaccttgaagattgaaattgctcttataccctttcccgacactctttctgccacacccactttgtattctcgacttcttactatatccagcccttgatgaccaatcacgagacatgatcacgacaacacgctttgtccttatctttattctgcatgataacccagtgataactagcgatagcaatgaccctcatcagattaagaatgaaccagatatcgataccaaacatacaagaacttctttcttctacctaacgcatcctatccgatctcaacaaatgatgtccactcactcacttgcccaaccctgacttgctcaattccgataacacagggattttcgcgtacgaaagagcgcccccaatcccaccagaatttgccaacatctcaagtgcagtccctccttgaagctgacgggcgacgatcggtgtgctctgttcgtacctcatgaagttagccctaacctgaaagaggtgtagaatatctaaataaaggcaatacaaaccgattgcaccggtgccgcaatcccactggcaatgaaaaatgaaattattaatgtaggtagggaaaacttcatttttcctctattgtatgtcgtgggtagtttggttgtggttgggtcgtttcagtattggtaggaaggcagcaagggttcgcgagtttttgcatttccatgattttcaaaggcgaacttggtttataacaagtcctatgaaagggataaaacagcttgatcacggctggtccttaggaatagcagggtacgcgccacgggtgccctgcattctctgtgttgcatgccttgcttttgcatttttattcttcacgttcagtcagttttcaggcgggacattttcattaaacgcgattaggagcgcattcttggactaggaggatgaagaagaggtagtcgtaaccggaccatcgattagatcattccctggagggtatagtctaccttcggttggcttgcattcaaaaagcgaaggaatacatagactagggcttttaatgctagcatgtagtataaccaagcaattgaaaatgtaacgataacaactagtcaactatataaagcactcaatgtctgtccacatacacagaatcactggttgtcatatggcaatccagacgcctttctaatggcaccataaacacccgcaatatcccccttctcccctttttcctccttgacaaccttcaaaaggtcgtccgtcaccttgacactaggcagagtcatccccgctgctttagcaagatcagcagcatgtctcaggtccttcctcgctaggtcaaccgcaaacagcggctcctctcgcttaaagtactccccggtcgccatgcgctctgcatacttcgcaaaggggccagggaacatggtagtaacccactgctggtacacgtcaatacctaggcccgacttttcagcagcaacaaggccctccgccagcgtctccacggtgttcaaaatgaatgtgtttcctaacaccttgagtagcgaggcgcggccaacatctttctccgcctcgggacctacatccagaacagctttggaggtgacgccttcaaggaagggttggatgcggttgattgccgcccgggaacctgcaggaacaacaaccatctggcctgcatctgcggcgttgggagcaccgaagacggggcaggcgatgaatgacgtgcccttcgaggagagagtcgcgtgaacgcggcgggatgtgtctgggtggacagtggagcagtcgacgatgattttaccctggaggtcgggagagtcatctgaagtgatggtatttatgatctgatcgagagcagagtcatcgccgacgcaaataaaggcgatagaggcgtctttaacggctgcggggagagatgaaactgcgacacgcgcttggggtttctcggcgttgatggactctgcgaaagcgcatgccttagaagccgttctgttgtagagaatcacgggtgtcttctggggtcctttcaatgcgatgttgcggctcattcccttgggtcaaatgtgagctgtggcttctgattgatgaggggcagtgtgacttacccggccgatattccccaggccgatccaggcgacggtttcggatgccatttgtactgtgtgatgctgaatgattcctaatttggaatcgatgaataagtgtggtcggttgttgaggagggatgtcgagaggctatgcagttgttataagtatgccccggttcagatattaaccggttgcttaccaaaagagagggccttcgaagttgactcacaagtgatcgtttctccactctgccccggtctagaagcttgtttcttgagttacgtatttgtcccactcgattattagcctaccttcacatctatatgtgccatggctggacccgggcttaggtatcgcggagactaggttatggcaggcttggtgcggccccctactgctgccgatatcgtccgaagctctacatcgaaccaactatacagctagaactctacttttgctgattaataggaggtcattcaacaacgtacattgaagcaagcccaacccagtacctgcagataccaaagaaaaacgccccatctctatctttctatcaattcgagaagcttctcacatgccacgactcgtccttccgagaagccgacctctgctgcaatcgttttcgcctggtctcgtatggtggaagattcattactatgcaagacgcagaggagtgccttgcctagttccggcccattgattgcaggcgcactcatcttacttgcccatactcccactcccaggtactccacgcgcgctgcgaagtcgtaggtgtcgaaccacacgggtaggactatctgcggtacgccagccctaggtagatgttgattagcaggaagatcttctcctacacaaaattcatttcaaaaaccttaccgtatagtctggttatatgagttcgcacctccatggtgaaccatacaacagatctgcccgctctcgagaatgcaaatcggttcgacagggagccactcctcaatacgcacacgtgcagcaaacacttcatcgaaaatcccctcgacagcctccgcaatccaaagcgcagcttccactttacggtccggcttcaatttccagagcacttgtatgtcaggccgagcgtctaggagcatgcgcagaccatgcgcgaactttctcgtctggtcacggtcgaagcacacgtttgatcctaaattaaccagaacggtaggccccctcaataaccattcggctagctccggacactcctcattaataggggcacaggggcgcaagattggaccacagcttataatagagtctgggacgaaacaagggaagtcgatttccggacgcgaagctatcagcaggggtgttgggttcttcgccaaagatgccatgacggggtacggcccagtgataccttcggcatggcggcgttcgtcgatggctttgaagacacgcgagttcgcgaatgtaagtccggcgcaaatggcgaggaatgcgttaggcaggatgtgtctccagggtaggggaaaagaatacccagaacaaagactatctcacttgtcagtgtaagcctgctaatgggaaagacttagagctaatacatacaccggaaacttccaaagattacctagcatcggctgcactacatgatccttcacggtattcgggctcaaaatcgcatacttacaacgcaatgttcgacaagcgtcaattgcttgagcgcaaagaggttcaatgacaacaatgcgaggctgcactttcttgatgatctcaatgcacctatggtaaaccgcaatatactcgtctccagtccatggcaccattacaccacacaacatggtataagcttgacgagcgccgaataagccaatgttgtgggcgttgaaccagctaccagacgagctgctggatgagttacccctgttcatcgctgcctcgaacatggttcggccgggaagggtatgaaagtttgcagttgtggatgaggactgcagctgggtagcccgggcagcttgggcgtttagcttggacacctctggctctagttgtcgggacgaggcaatgtgaacgttgtaggattgacggatgaggaactcataagctactgaaagaacgactgtagcttgtcctagctcttggttggttacgaaaaggacagtcggtttcgccattatttgggggttgaaccgatggcgagaaatggaacggatgaagcgaggcgagatgaataatgggaggattcagaagaagattggacggggtttataggcgtcgtagcagtgcagacatgagatttctttcaggttgtatgagtgaataacaagaaaggggagtctcagccaacagtctcacgtacaatgagcgagtctttgttaataaaaccacatgcctctggttagctcaagcaaaaagtcagataagaaatatcgcaaaatatcgtatccagtcttccatcgcaatatgtgaaactcaagagtatcatctcacacagtatgcaaatcaggaatcagcatacaaagctgtaagattattcattgaagtggaatatattctactagcatatcagactatatcttacctctatagaagaatcctcaaacaacaagctctatatctacgagcaatcgccaaagatttagcccatactcgtgaagataacagccttagggtaactctgttgctcctgaagcgactgttctactgtcaagagcagacgagtggtgcgaatatgaagctctatattccatgtcagtctcggccctgtagtgaagaaacagtttggagtaccatcgatcacaatttcatagcttgaaaaggtctcgtcgtcac

SEQ ID NO: 4096 - DNA, 1371 bp, Emericella nidulans
ttataccgtgttatgctctcaccaggtgactcttatcgccgggcggtaaaccggcactacaccgccaccgcaccaccccatggcagaaccttggaatggcgttcatactccattcaaacgagtcccagcctttgagcaaaacggtaaaggtgccgccgcaacgaaccgaacaataatagcatcgcttgctatttttgattaatatatcttctcttcgcgcccaattttctggttgaaactctaaccttacctcgtctcatctcgctatttcctacgtacactcctcctcaccaacccctcccgatcgctcagcctccgtcgctctcagcttgccttctaggctctgctcactcactaaaacttggcatttcttaggtacgagaatcccaggtgatcattggtcctctgttagtgctcatccccatatgtcgagagccgtcgtcatctgcttttttcgtcttcgtcgatatcgaatcttgactgactccgtgtacaagttactgtaccttgaacttccttttcccgccgcacaatcatgtccgccagagactactataaccagggaccgcctcaccctcagcatgcgtaagcgaccgtccatctccgcttttgattccgcactcgatattgggagttctatctgctcttgcgctgcgcgaccgcgcagttcaagtcaggttgggttgaagccggaatctgtcttcatattaaactgtacgatagctgactcagttcgttcatttagctaccagggcggctacccgccgcagggtcactaccagcagccgcaacagccctactaccctcctcaaggctatcagcaaccgtatccgcaagggcccccaccggtatgttaccttatctcggttgcatttcatgatgttgtaaacggaaaaagggctgaccgaattcttttcccgcacagccacaaatggtgtaccagcagcaacctccccggcaaaagaaggatcgcgggtgtctaggtgcttggtgagccagctcctccagttaccctttgtcttcgcatcgctattctgctgctaaccgtcgcttctttagtttggcaacgctctgctgctgcttcctctgtgaggaaacctgcgaatgctgctttgactgcattgagtgctgcgagatgtgttaaatgaattgattgatacgaccccaacgagacgcgacgagacgagacttcagcatattttactacccgttccctgccggctatctgtcgcacttccgccgtactagactactcgactggatacgtgccttaccttctgaaacgctcagcgttttctgtctcaatctcctcacctgataagaaagactggctccgttgaatgtctcacattgaggttcctgacctcattc

SEQ ID NO: 4097 - DNA, 5963 bp, Emericella nidulans
tgtttttatgtcgtataattattgccgaccaccaaaatcagggctcttttctgcctgtcgaaattctttccccctcaagctttactccttcgaatatgggaagaagcaaacacagccttggaacgatgagcttgcctggctttgcgggtgtggaggcaaccgatacgcaatgtcagaatacgatctgggctgggcggggtggtggggtgaaaaggcaagtaaccttgaattatacccgtatcactcgagtccagatggcgagctattgttcagggtcttgatgataattaggcccattatatgtggccctgcccgaggtatgccttctcggattctctagcgaagtgctgacagcctgacaccttgttttgactcgggcaaaaatcgagagctatcacgtgcaaatcaagccttggatgttcgcccggagctcgtgacgtgcctgatttggcctagcgtggaggtgccatacgcggggcagctcaaggttcggcgctctctctttagttcctgatactacgtagtccgattctaatgcacaaattacaattgctgggtcaattttatgtcgtcttatttcttttcttttactacttgtccctaactgttgggtctctataagggttggccgtacctgggacataccactgggtatcaatacaagtctaggtgtgcaccctatgtttgaggctttgacttgctcggctggaactgaattcacattgcgtcttagcagctaagactatcaaagtagtttgcaccgcccagccccggccgttgatcctgtgatctgcaatggaatctgagtcctgtctgtcctggtagcggctcttttttagaatccgttagcctccaaaatctgtccataccccattctccgtactcagtctctattcaaaaccatttgcagtggagcacacagttgaagtggtgagtaactctttacttttatctagtcaacataaaaatcttcctagcgttagagactgttatcgaggaaatgattcctagctttcacggactgagttcacatgaaactcagcctgtatctgaagactatttcgtgaaacactgacgagtcatcatgctagctccacactgatatgaactcgatagggaacatgtacagttagaatgtccaattcctcgtttttggacagaccgctgctcaaagtcagtcggccagtcgccgcatgctcaagatgccgaaccgccaagatcagatgcgacgggaaactcccggcttgttcggcttgcgaaagagcaggaaaagcggatacttgctccagcagcgatgaatttccccgaggaaaagaaagaagctatgttggatctctggaggcttactgtgaacggctcgagaaaagggctgcagaacttcgggaacggaaacgattattgaccggtggtgaaggaggtgtcgttcatgaaaactcgataacctcagcctcgtccgtacctgccactcatgcgcatagccaggaggtgtctaacattgacgatcttgttggagaattcggttatctgtgggtggttctctccctatattgaacgctgttctattgacaccgatctagatctgtcagtgccacctcaagagacttccagggcattacatcaaatacttcctttgccaatttgatattagcggtttcatccggtgaacaaatcccaagatcatccccccggccgatacggtctcggtcggaaaccacccggcttatacaccataattttgaacctttgtacgtccaacttcccttctttctcgaaactagtttttgggcttcagtcgattctgtctaccaaaacggcgcacactttgccaaaccattcgacaattgggctgtgcggatggttttggccatggcttacgggtccttatcaaattcacaactggacgtcaaccatcggaacgctctttctcttgttcaagaagcactacagtataccgaagatgtccttcgccctggaaccctagctgggatccaggcaattcttttcctagcgcagtattctcttatcgacccggtccattttcggacttggtaccttgtaggtatggcggccagagttcttgttgatttgggactgcaccaggatcatcatgcggaatatgtactttcttcagagaaacaggatcttcgacgtcgcgttttccattgtgtttactctctggataggtatcgtctcctcattgtcaccgactcgacttgcaacgacagaagcgctaattgactgatacctagggctactagtaccgctctggatagaactctttcgttctctgatgactccgtgaatgttgcttttccatcctctaaactggagaagacgtatatcttctctcacagttcggagccggcttggaacatggtcaaaatcagacgcatattgtcagcagcttatcagcagaaatactttaccacgaccgatccgtcgttccaatccccgacaccgacctgggtactttactcgcaagcgactgaatggttctataacacgccaaagaacatatcccaggttctcgctattaggtatcacttggagtttttgtatacaataactgtcattttagcgccgtcaacccgccaccttccaccatgtgattacaccaaattacttctcttcaatcgttgtattgattatgtccaccaacttcatcaaattctcgagagtcaaattcgcctgcatgtgatggattcgatcgagattcaacgcgtctatcagaccattcgacgcttattcaacatagtcaaccagagttttgacgtcctcatgagccctgtcccagccgcaccccaggttcccgaagattgccccaaaccaccgtcattggagctggaagattgtctgcattgtcatgaacgtgcccttgagtgtttaaatcaagcgggcaatctcctccaatacggggctcgaaggtggaatcaccatgctctgtcacaggaattccaaaagttgtcggcgcctgtccgcagtatattgttgcccccagctgttacatacgctccgactttgggaagttatatgcctgaagagcctgcaattttgcctcccgcggattttctgtacggcggcctcaacctccagcactccagccccgagaaccacaattatgaatgatcgctagcctcaacttggagaaggagaagatgtaatcccactccgttctggcctagctcgtctgtgcttctcgccggcttcgcataacgggaatgattggctctaacaatctcttgatatgaacagtgttgccagcaattacatccaacctatttatggtaaacgtcatacaccttctcttcggttatgtgactgaaaatatacccgatagatagctggctctatctacaagccaagagatacccagcttgccgaaatttacagtatggcgattataagggtttttgttttttttttttttttaaaaaaaacatattatgcatgagttattgtacagtgcgtaggagagatggagtagagtacagtctttcttatcctcattaccaggcaatcccaatgtctatatagaaatgcgcctgaatttaggcccctcgagtcccaaccgtctataaacaacacaaaattaggcattctcttcatcaagatttccgatgataggcttcctcttggcgacctccggatcctccccatagccatatttaatccacacccgctgccaaaagggaacgactggcggccgctcctcgccgcggatatactcagatccctgcgcgatgcgctgggcacgagcctcctcttccccggagagaacataccgctgcattcgggccgcaatgcggggatccataacgacatcgtttagccactcgcgctccttgtctgggttcgagtcgtcagttttatggacggatttgtgccagtcgtgctcttcgtgctcgagttgggattgttgctcgtatgttatcgacgacgacaagctggggtcaactgggctgtctgagtctgagctggatgaagcaggaccctcagcgtacgggcgggcgtgagaagcaaggacaagggctgcgacgtcccggccgacagagtcggcgacgtagcgcctgttcaagaagcggtagattcggataggggtattgaggaagcctagaagatgggggaaggggatagcggcggagccatcgagggtttgcgggatggatggcgggagtgttcggccggaataatcgctgggagcgatgtatgcagatgccgggcccgtgggtttggagggtttcttttcctcctctccttcctctttcttctccgctgcttgcccctgttctggtgctggcgttgcctgttcttctgtgttcgcgggtacctcagccgcaggaacttgcggctcctcaagtgctggctggctctctgccgacacgggcgggtcaattggaccaagccacccttcatgcaagcccctcacatactctttccaagtatgccgtccaataaccaaatcccccctcggcccaggctcttccctcacaccgatagccttccttgcctctgcaatcacatcctctgtgctcttctcctcatcgccaataataccagcactaacctccccactcttccgtcgctgcttcctgatctcctccgcaaacttcgcacggatatcgccttcccttcggccctcaataacattataatccagtgccgccgcaacaagaatcggcttaacgtattccttgaaatgctcgcgggcagaacggatgccgtcgcccggcggcgcggccaggaagacggtcagtttgcgtcgggtttcttccacggggagggattctttcgagatatgcgcgacaagattgcaccatttctgttgggcgcgacgtttttcccgtcggtcgtagattagggctgcggtaaaggagcccgtgatggtgagaaagatcatccagttacgggaggggagtttgaagcggaaattcgggaggcctttaatccattacagcattgtcagcactgcattctgtagatagctagactatggggatggatcatacccatcatctttagagctgggttttgcggcttgggcgcgctctttgcggcctcactagaggccgaggcggtggaatccgccattctgggaatgatggaggcgtatgcgatgtctagtgggtaagagtatatgtttcaatgtgagtgtatcagatcacagacctccctcacaacttgtcggcatggatctttgcctgggaaaaagtcggggatacgcaaagctactcgggcctggatttttccgattgttggtgactgatctgtcaggcaccaattgcacactttgagagacacaagatatagctgtctggattatagactcatttacgctataccaatgtatctgatgccgagagttccttcgttctctgccaatagagtatacatgcccttcaacgagcaagttcccatgttttataaacctcagcacggaaaggtctaagctcgcctaaccataattccatacggatcacggtccttctcactaacatgaacttcacacgtttcgtcctcatatacttcgttcaaacccgcctcttcaccctttccctcctccgtcctcaactccgcccactctcccttcaaaactccctccagtttatccttcataacagccctcagataccccctttcagtatttgaatgggcaagcgcaaccacgacagatccattctcaattgcaaacagcgtctcgtggtgactcatctcaccagtgaacagaagatcagggatctgtttgactcccttcatcaacacacttcgatccagacccgggacatacgcccacagtacggatcttgatgtcctcaacggacgcggattgtgggatggctattggaatgccgccaggaaaacctacgccgcttgcgatgttatcaatgaccccaaggctggggcttcgctatgggacttgcgggccatccctgttctttcaggcctgagggacgggacccgggagt

SEQ ID NO: 4098 - DNA, 1399 bp, Emericella nidulans
caccaccattataatctcagaaaacctgagttgtatcaaatcagcaaccctgactcaaggcgactcaaggctatagcctatcgcaaattgcgccatgattgctccacccctacgcagcctcgaagggccctttctgtgtgggccgctcagacttgcatggcggccttacccggtaatttcatgggccatggctggttaccctgcagcatgaaccttggaaggaactgggccgcgttctagaaaggaaatagtggttgacactgacatcttggttgagctcatgattgcgcggttcgattctgaagtgcctttattatactaattatagctgatctgatataccagagtagacaaaaggattggtttattggcatgttatttgttaaaaatacctcggtcatgatatcatgttttgcgtcagaaaccaggatgaagaacctgctggtggaaccggcggcgctggttgacagcggtctgaaggtgtctgaaggttggacagagttggacagagcgtcaattagaccgtttcaggtgttctgtttgatgcgccgtcgcctagatactgggaatctgtacgcgaaggtcatggcggtcaacagtgagtacagtgccggagtccgcgacagccctccggatcatgtgctggttccggaagatcccgaccatacggtttagggctatgatatgcgttgtctagacgataatattggaggagatattccattctaacaacatgttattgagagtcggtgaattagcggtgcaaatttcatcagactcggacgtaattcgagttgttttgccggccatagttgggtatcctgtaatgcaggagtcatgttgcgcaccgactgccgagatccattggcatggctgtcggcgtcgatcaaccgcaccaccaccggaaagacgatccttgacctgacgtcttcatacttcataagaataagctcagaatcgtacaaatgcaggtcgagaatcaattctgatcaattctcatcaattcccagtctcctgagtagccagttctccggttatacccagggattgtctgtcttgctagcgatcccagtacggtttcatcgaacggtcttctccttcgttgcactgaaagtccctgctcatgcatttatagttggtggatcaggaggcgacgacaagtttactgtactttgtacgagccaggagtaggaggttcaccgagcaccgaatgatcttcgtgctctccactgtggtttttgcagcaatgagcttagctctagcgtttaaagactcgacccagctcatattggttgaatccacaacaagtaggctgtatggatgtaaagattcgtgtgaggcttaacataatttccgtcattgcggtcatgccacgcagtcgctcatcaagcaattctgc

SEQ ID NO: 4099 - DNA, 2784 bp, Emericella nidulans
gcagactaccttcttctacttggcgtcgcgatgcacttaccgcttggtgacgccttggctgtcattgcgctgggtagaagcacccagctttgaggcttcgtgcgcgttaggccgagagttttgactatcctccatagtgtagtccattgtgttcacggagagcaagatttccaagaagctttcggaagagcgacgtagaagacgaccaccacagacaaagatgtgggattgagagaaggtagttgagacgtacagggctcgattggttgcagtagtaaagttgtagtagcaggagagggttgctcccgagtctggaatggcgggtcggctccggaagtagaaggttggaatggactgggcggatagacccaggtgttaccagatgcagtccaaagaagagctaaatcggaaatatctttggtgttgagatctgtaacgacgatagcgagaaaggaagatggatcgagtggattgaggattgaaacagagatgggagtggagaggagaagagaaagagagggggagcgtgtgaacggtgcaggctgtcttttgtttaccacagcaaccatctgacccaaccatccgacctttcctttgtcctcagccctgcgatgtcttgctgaatgttagctccctgaaccctatctaaatatacattacgaaccctgcatgataagattactttttcaaaacgaacgcctcttccgccggtcgactgtctcataactgcagtgactgtgcttacagcgagcggggtatgccgcggacgtcatgcgaaccgatggagatttgtcgctgaatagcacgccgttatgatggtaaaattcccaatattatgctctgatgcgggagctttcctttaaagcatgtttttttgtcattctccttttttttttgtcttttgttgttctgtcaaggtctaggcagggcgacctgctttgcgaccggctgggggcgaatccaataacagactacccgaaaaggataaagtggccttcgcgcgagcgtgccatcaaccgcgttctcattctcccagctcttagcccttgcatttgcatttgcccaagaagaatgaagaacgagtaatactcgaaacatctctccagtcaaccccaagttcgctctctctttcaagggaactggctcctcaaaatgcaccattcccaattagcgccactgcctatcgacctgccatttcgcattgtctcaaagacattcggtcagggcgcttatgcttggtacctttcaattctttacgtgctctgttatgaatgatgagctgtgctgatgcctcgctctttccagtcttaaaaaagcgtgtccactgaacgccgacactccggtcttcgcggtcaagttcattaacaaagactacgccgctcgccatggcaaaataagtccacgacaattgctcatggaagctacagtacacaaacatatcggcgaccataataacatcatatctttcttccagaccggagaggatggcgcatggcgatggattgcaatggagctagcagacggaggggaccttttcgataaaatcgaggcggacgaaggcgtcagcgaggatataggacatgtctatttcacccagcttataagtgcggtaggatatatgcactcaaagggcgtcggacatcgagatatcaaaccggaaaatatcctcttgaccgcggatggaaacctgaagatcgcagatttcggtctcgcaacgctatttgagtacaaagggggcacgaaactgtccaccaccttctgtggtagccctccatacatcgcgccagaggttatcacctgtagctctcgaaatcagactaaagggcccggataccgccctgacgtggcagacatctggtcgtgtggcattgtcctttttgtccttctcgccggaaatacaccttgggatagcccgacagaggatagctatgaatttcacgaatatgttatgactaacgcccgcacatctgacgaattgtggcagaaattgcccaccgcaactctctcattactgcgcggcatgctgaacattgacgcccaggctaggttttctctagaagatgtccggcggcatccctggttcacgcgccagaacaaacacctcgccccagacggcagactgcgagaccctatcaaggttgcaccgtctatgtttgagtctcttcatattgactagtctcaatccgcctcccgccccttgaaaggcgggagtttcgggccagatcgaatggacgtggatattggcgacgatctaggtgccgagcataggatttcatccacgcagccagaagtaccgagaggcgacatgctaatcgactgggacacgccgcatctcacggacgtcttctcctcgagccaaccaacgaacaacccacgcccaccatccagcagcctcacgcccgaaatcctcgaagacgagccctcgttttcacagttctcacaacggccatctgtgcccatgagccgaactcagaacgcccagcgcttccacgatatcgttccctcccgctccctcacccgcttcttttcgacgtgggaactcaagctcctcgtcccgcttatctgcgaggcgctacatcgccttggtgtcccggttcccgctgttcctgccgtatcgcccggtgacaattcggctatgattagagtgatcacgagagatggcagaatgtgtcctcttcatggaaaggtgcttgttgaatgtgtttccgagggcctcttcgagattgagttcatgaaaggaaagggggatcctagtattctatagtgtcacctaaatcgtatgtg

SEQ ID NO: 4100 - DNA, 642 bp, Emericella nidulans
ctgcacctgcacggcggaattgcttctgtcagggaaatgctttatcttctttctacgtcaggctcatgccaacatcttcaaatgggcttatgaaataaaacgatggagtctctgtaccttgtgaaaagcattccaacctaagtcttttgtttcgccagttgtcttcagtttccacagccgctgtttctcgctggctgtccaaggcagctcaaaccgtttgctgtatgcactcgaggacattttgcatagaattatcttgattacaatcacccagataatagtttgcttcctacgggcggttttgattgttttagaacccgtgatattcaatgtagttgaacaaattttgagtcaggggctgatgtgacacatcctttcagttccgccaagtgcttgagccggccatacggattctccgcagttggcttacgtcagtataaacattgcatatcagagcagagccgcgagctaacttgttcaggtcaatgcaagctgcaaattttaaataaaggttgctcgacggcttctgtggtagcctgttcatggccaaaactgggaatctgcaacccaacttatcgtgagctatcaaaagtctattcgaacaaatcccaaaatcttcccagactactgagttgttatatt

SEQ ID NO: 4101 - DNA, 3364 bp, Emericella nidulans
ctgttttagctgcagattcggtgatgccagtgctccagacccctgtatcggagcgcggggagaggaggaccttgcgtgcggtggccatgtgtgcaggattgtaggcgttcgtggtggcgttcgtggtgatggtggttgtgaatcgggctgcagaaagtctactgacagtcttggcgcctgaaggaatggcccaccgagaggaagacacgacggcagtgaacctgccccggaatatatacatatccgttacccatagcatgaagcagctgctagtggtcagactataagcaaaaagatcgtcattacgtcatttcggcgttcggggcctcggaggtgcgggggccgtctcagggtgcgttgattgctaagctcgtaagctgactccagaatgtacagagcacaggctccctgcgggagaggtcacaagagcatggatcctggtaataagcatagggttctagaatagtttggagtaagcaggccaagtctagaaggttgggagtgtggatattctactaaaatgggtattcgcgatgtttgtggtatctgcaatagccctaattgggttaccccctaggcattagacgtgcattgatcgaccagcggtcgactgataaattactagttaatataaatccaagcattctgtggtttatattcttaggcctgcttatgcacaccatccaagttccagattcccgtccgatcagtcctccatcctatcaccacccaaatgcctcctcaaaatactcaatgtcccttaacccattcttccttctcatgacctcatacaccgtctgccggcactcatccgccatttgtgccggtccacaggtcaagaccgccagacgcgaagagttggctttcgccttctgtgcctcggacgtcacgatagcgcggacgttgggccgacccgagagaaactcaaccgggtttctcgcagttgcgagcttggaggtgttggcgctggcttctccatccgccgcctcggggagaggagggtccctcgatggggctcgagcatcgaggatagcattgtcattgctggaaccggaaaggttgctgctcgacggggacttttcacccgtagggagcacagagacgcccgcctccttctccttcgttgccaatgacagttccagcaccgcagccgaagatgagggcgaggatgagaacgaaagtcttggagctagtgcagtagaaactggtcatgatatcctcatgcccgagggttccagccaactcgtcacaaaagacccgctcaaacatctcgttcgtcttggccgaccagataagccgaagccgggttgtgcgcgtctttgctgcaccgccagagcgcgaaatatggtcaatgatatacggcacggccgcagcaatacccgttccacccacgaccatgactacggtgtcgaatgtgtgcagtggcgcagcgtgtccgtagggtccttctaacagaagcttgggcttgatgacagacagtccagatttgcggcattggtctcgcagccgtctcgtccagcatagaaaatcggcttagaatcttgttgacgtttctcgtggacctggatactttcactaccagttgccagtgacagagaaggaggtacataagcgcccagagtgaacgggtggttctcccaccctttgagattcacgggctggtagaggtaatagtgctatcctggtgccggcttcaacattgacgaggcgggagagagttcaaccttgatcaaatcactgtcttcaaagtactgcacgaggaaagaagtggtcctgctgaaccgccccccaaaacgcacgttcagattgcagtatgcgattcggatgagacgcacgacccggtcgaaagcccagattgcgatcatcggccagagatacccgttccatttcgtgccgtcgaagctagtatgtctatctcgggatcagtgttaatgttggcatagagtggaaagaaggtggtagtgggcaggacggacctgaagagcgcatagacaacgacaatggcgaagacgatatgcaggatcaaaaaggtctcgtagcctttatgccgtaatattgtcatcgactgaacgagcataaaggacataaggatcgtggcctgatcaaaggtgctgttatcagctgctcgtgctttcaggacggttcgtcaggtgccctaccacaacccccatataccagtactcctgcttccagacactgtcccagcggccgtctaagaaatataacagctgtcagtccgccatcaaaccacattctggcccaagttggaacgcacataccgtagtaagcaaaaacacgctataattgatcgagtgcacaatcgccagcagcgtgcatgcccaagccacatgccgatgaaagatattgaagctttgggtgttaaaatccgtcgcccagagaaagatattgttgcgtccgccgaagagccataagaacgggaggcacgcgtacgacagaatgcctgtccggtcagaggagtattgccagttttgctgggaaaggctggtcattctacatatacaagttagaaagcgacaatgcgaaaatatagggccgtgattacccaatattgccatcgaaactctgatagtccacacaagcgaggataatgcacagtgcccagaaccccaacacgatcaaacggtccaggcggcgggggatggcatggtaccagaaaagctgctggtggttcgtcaagaaggggccgaagctggcaggtagggcgatatacgtcttaacgtagtggagcgtgttaagaggagtccgcgtgagggtttggcgtgtcggatactgttggattcggtatctcgagagctggaagtggacgaatggccgtgtccatgggccgggaagagattcagcggttttcccttttccctcccttttttgggggtttatatggccaaagtaatattcggcagagctgagggagtgtaatgacattggcctgagaccgaaagcgccgtacaactaagagttaaagagttaagagatatgtcgtggctaggctaccagtactattgaacaatcgatttcaaggctgaccagactgatcaagtgttcaaatattatacagtgcgatgcgactagacccgcgtgcgatcggtgcacaaaattgggcaggaactgccccggctaccccgacacttttgcatttaaggcgtatgatggctcgtcgcagcgtaccgcaacggcgtctcggtggatcgatcagcccttgagtactgagggatcaccgtcgaccggccagcagcatcctgggtctgcaaggaatcctgaatctacacccgtctctgcatgcgctcctgcacgtcctgcatgtcctgcatcttctggcacccacgcatccgtgcccgtgcgcatg

SEQ ID NO: 4102 - DNA, 2496 bp, Emericella nidulans
catcttttgcccgaacgacggatgagctttggcggactgaatcacttcgagtcaccgtcgacaacttttccgcatccgagatttcaacccgcaactcattcaccaatgcgaccagacgtggaaatgcgatgacgagaggtgaacaagcgccgatgtttgtgcccacgacttccccacgaaggagaagccgccggcatgggtgtaaaccgaactcaacaattccttcaaattaggtacgaaacacaggccccggaactcatcatcgagcgtaacatcgcccgtgaattaactgagaaggataggtggtaggtagttcgatgcgcgagcatggagcctacgaacactagctatccgatcaccactcatacgccgaacgttcaattaactcaaaatcatcaatcgttccaactaatctaccgaagtactcggctaagaagaaagaagacggacgaatccgagccaaagccgtacaagcgcgagataccttcgggacagcctaggcggatccatgctttccaacgaagcacgcccatccaacctaggcgagacaagggttcacatttcgttcatcacccttggccggctttcgaacagccggactcccatcaaaagatggttgccaagaacatcttcgttacggtttgctaattctcggaataacatcgacaaaactaggggaaggtttaaaaaacccacggtagtatgaagtgctactcgaaatctttgccacccgtctcgttccagttcctagccgcaaggtgtcgatgcccatgggcgacactcacacctcgctcacactcgggacagcctaggcggatccatgctttccaacgaagcacgcccatccaacctaggcgggtggaatcgatgcccatggggacatctcggtatttcgtgcgcaggacgactataccgccacccaaacggcctaggagaatccatgtcagcccatgcatgacacgcccattctcttcggcgacgaggtgaaaagatgcccgtggggacatctcggtaatatcatgcgaacaagttatataccgccacccctaggcctcgaagaatccatgtcagcccacgcatgacacgcccattcttctcggccactcagcaatttttgtccgagaactgctgaaaaaactccgacacttttataccgccgccaccctaacgcctcgaagaactaatggcaggccacgcaagcaagcccattctcctcgacgattcagcagtttttgtccgagaactgctgagaaaactcggaaaaaggcaacaaaaccgatcgccggaaaagtcgccggaaaagttgtccggcgaaaatcccggcggccggacggtcggtcattcctcgtgtcgatatccgataccatccctcgatcgctacccaagtccgaaccgaaaaagggggttcccacggactgcccagactccctcaacacccacccccctatatagcttaatagcccttttccctcttggcaccaacagacattgaaatgtctgaggagacaccggtgccaaaaaaaaagaaatacttggaatttgaaaattctttttggcatgcatcataaggatactaaatcctattttctggtaaattttcataattttttgacacctctagctaggtcatttgacctgatacaacatcggattttcatggtctagttggggctccgtgggcatatttgatgcaaacttgacatcctaaactctttattgatgtattttaagagattcgatcacaaaacattgcatcatatccaatgattttcgaaagttattcggcaacatttttttttctcggacatccggccgtcctggtcgacgaatcctcggacccggtcgatgaagtctcggacctggtcgacgatttcaacccctggtcgaccattcctcgaacccgatagattttcatcgcccattcatcgtcctggtcgagggttccgccgtcctggtcgacgaattctcggtcccggtcgacgatttcaactcctggtcgacaaatcctcgaccactcctcggcctggtcgacgaattctcggacccggtcgacgatttcaacttctgtcgcaccattcctcgaacccgatagattttcatcgcccattcatcgtcctggtcgagggttccgccgtcctggtcgacgaattctcggacccggtcgacgatttcaactcctggtcgacaaatcctcgaccactcctcggacacggtcgatgaagtctcggacctggtcgacgatttcaacccctggtcgaccattcctcgaacccgatagattttcatcgaccattcatcgtcctggtcgacgaatcctcggacccggtcgatgaagtctcggacctggtcgacgatttcaacccctggtcgacaaatcctcggacccggtcgacgattcctcgtcctggtcgacaaaccctcgaccactcctcggacacggtcgatgaagtctcggacctggtcgacgatttcaacccctggtcgggggatcctcta

SEQ ID NO: 4103 - DNA, 5119 bp, Emericella nidulans
tcttcctctcaaaacagtacaaaccacaccccatccaaaatgacagaatttgatcgcgtgcacccatcgacaacggcctacatcgtcgccacagccattgtttccggaatcgctggctactttatcggccaaggtgcgtcgctaggactattctcaacaaaagagaaagaaggctggccaaatggctataatgtgaagccgcaccgaggctcttcggatgaggaagatgatactgaacaggaggagagtgatgaagaggaaggcgatggaactgaacttgcaaactttgagaacaataccgaggaggttaaattggtgcttgttgtgaggactgatctggggatgacgaagggtatggcacttttacctctcttttttagtagccatttaattgccctcaccagcgggatgctaaccgctgtctgaattaggcaaaatcgctgcccagtgttcacatgcaactcttgcctgttacaaatatctcgttgcgaacccatctacctctacgatcctgcgtcgctgggaacggcaaggtcaagcgaagattgcgctacagataaaatcggaggaggaaatgcaattgttgcaggcgcaagccgtcagtcttgggctctgcgctcgggttatacaagatgctggacgcactcagatcgccagcggaagcggacggtgttgggtatcttagggccaaaaagtgtagttgacacagtgacgggccatctgaagctgctttgaaactcgtctcaaagtggacgcggatagacgcggtcaccgtggaaggacagtttgtgagccgctcatgtatatacccttgctttcgtcactttcgtacttcgcaacggtgttcaagaaggcatatatgatatcaatgataataccataccagagtgctgcacagctctacgaaatatgctacatataaagctatcttggtaaagaatgttggctagccatggtttctccctgacctcatcagccgacggccaaatcggcaaagggaacaggaatatgacgccgtcgacaccaggaaccccagccgagctcaccatgagggagctcaagaccaaagtgaaccacccaatgccgacatttaatctgagatctgtcgaccggaaaacaatggacaccaaacgagagaatgggtgcctcctttggtcgtcgaactgtccagcaatcgaccgaaacacagaagagtaaactctttctgcgatcaggatcgccgaacacagatccgtgtgtgttctgttcatgaggagaaaagaaaaagaaaaagaggaaaatttgcgacgcagcggattttatacccagcgctaagtaggcgctaacccatcatccggcgctaaaccttaccgagaggtctatcttacgtaatgaggcgctgggcaagttgtcggctggtatcatcgtcgccgacatgttcttttaacatagcggccccgacgacatcattccagctcttctcgttattgcaaactaccttgttgggcaaaatggcggacgctatctccatagagcagaacaacaagatccgcgcggcccttggcctgaagcccttacctgttcccggggccgacgctacgagcccttcgttcaaggaatccaacgactcacccgacgaagaaccggcgagcactattgagacgcgcgaggcagcggccgcggagaactggaaaaaactacaagatgaagccaacgcgaagaagaagcgcgaagagcggaacgcggccataaagcgggcgcgcgagttggcacagcgcaacgcgaagctcgaagggaagacgctaggagagagtgtggatgcggatatggacacaaaaacttggttactgcaagcgaaaaagaagcagaagaagattgaacgagaacgggcgcgcaagctagcagaggagctagaagaacggcaacgtgtggcggagtatacagcttccgaccttgctggtatcaaggtcgggcatgagattgacgatttcgggggaggagaggagcatgttctcactctcaaagacacaactatcgatgaaaatgaagaagaaggcgatgaactggaaaatatcggtcttcgagataaggagaaggctgctgagaggttagagctgaagaaacgaaaacccgtatatgatccgacagaggagaatactggaatactagctcaatacgacgaagagattgacggcaagaaacggaaacgttttacactggacgccaagggatctacggtggaggaacaagaggcgcggcaacaggaagtttctgagaagctcaaaaagaacgttatcagcctcgactttgaagctgaaactcctgcctctgactacatggacgtgagcgagatcaaggtaaaaaagcctagaaaaaagaaggcgaagactaccaaaaagaggtctgctcttgacaatgatgagatttctctacctacagaaaatgtcgatacgtcgaacgacgcatcgatggaggttgacgccgtcaacggcgcgccggcgccggcgccagcccctcgcaagaccctagatgagaacatttcatttgtggatgatgatgatttgcaagctcttttgacccgacaaaggcgggctgcgcttaagaagcggcagaaatcgcgaccagaagatattgcaagacagctcagagaggagggatctcagactccaatggataccgagacaccggaagaagagcctggtttgataatcgacgagacttccgaatttgtttcaaacctacagaagcccgttttgccagagcctcgacgtcggacgacctcgccgagtgtgggcccccgcgccaaaactgaggaactagacgatgaaaagcctcagattgaaggagatattgatatgaatagatcttacaacgacatcgaggatgaggaagatcttaaagagcgtatcaagcgcgaagaatcacaacccacagcgcccattactggcaccggtttggaggaggaaactacgttgtcacaaggtctcggtgctacgttgggcatgctgaagaaacgtggtctagtgaaatcaacagacgctgcggactccaacgcgctccttcgcgatcgcaaccgtttcatcgcggagaagactcggctcgaaaccgaagcggaacggcgtgctcgccaacagcgtgagcgggaccgcgcatcaggaaaactcgaccgcatgtccgcacgcgaacgagaagagtacgcgcggcgtgagaacactaagcgtgaccaggaggaagcccggcaattggcagcgaagttcaatgaacagtacaagcccgatgttcagctgaagtacattgatgagtttggtcgccagatgaaccagaaggaggccttcaagcacctgagtcatcagttccatggaaagggaagcggcaagatgaagaccgagaagaggttgaaaaagatcgaagaggagaagaagcgcgaggctatgagtgcgcttgacagcagtcaacatactggtatgaacaacgccgttggggcaactgcacggcagaagggtcaagctggagttcgtttgggctaagtccttcacgagtacaagtgcttctattactgtgtggttgggcaatagcatactcaatgctatattcgaccgatgattgagaacagagtctttatccgcacgagctaatccttgccgctcaccatctgatatttgagctggagcctagaccgtattcactacgggcagttccggagccgcattcggtccgcatgaccctctgataatacgtttcggaagtccagcttccctcccgagtcttgatattcatatttagccttggtgtggggtaatttaaccgatcaatagcaaagcgctcagaaagcccttacggccttacggtgtatccactgttagatacccaggcaacgaagggccatcagcaataatgctatgaatatctatccgtccaccgcaataaaaataatatatatatatatatatatgtaaaaagaactagcggtagtacataataatacatagtaaaacgaaatttttgcttgttcttcaacaagtcgcaccgtagtaaaacccctattcgattctagctctggtctaatgagagcccagcgcgtagccctagatctggggcctggaagcggttctaatagtattcctcttcgtatggtcttcctccctttacttatactggacacgcaagaaccccaaaatccgcgcctagtagatgcgaattgttttccctttgtttcatcctgctcgttttcagattccaacgtttccatctagtcaacgggggcggctgttcactgccagaaacgcagggagccgaagatgacaagcgtggacttatcattttggctcacctgccactgatattagattccttggatggatgtagaaacgacgggtggatcggttgtgatcgagaagcttagctccttttcgtcagtaccccatgggatggacggtagctgatttcgctgaactcattgatgcatgcggtgtttcgcatatagaagattgtcgctcatcaaagccattggtgtaaactcgaaactttgatataaactaatgagatggcaagctagccgacagcctcgggacatctcaatagatggatagccggtttcaaaacggatctgaatttagagttagtatgggacttcgatttctgttatggcggccaagagggcttttaaaggtgaaacaatcagtatagcccatgagccacgacgtaggccgtctgaatacctccaagagcgaaaagatacggtgagaataggacatggacttgttacccctcagcgtcagcgcgtgtttaccccaaatcctctccgaattccgtgaggggaaattgtcgagaaagttcaccgagagcggcccacaatggcgcgacctcgaccgcagagaggcagccttcaaagttcagcgccggccagagcgccgtgctcagagtcagtctggagatactcacgcggagatgtggagttatcagtagatcatgtattttaatacaatgaagtgactgaagcaattgtagtcataatattgagtatctaggttcaattgacaattgtaagaacaatagctgatccagatcgggactggaccagcgatcggatgagtgttggcttttacccgtgatcggcccatcgctctcacatgagtcaaag

SEQ ID NO: 4104 - DNA, 4282 bp, Emericella nidulans
cttagcgagctcgtctgccagctcattcccagcaatgccagagtgacctgggatccagcggtcctgaaggggcttccgttgcatggttaggattgaagggctttccatccactgggcggctagttggctaaaggtctctgacagaccatgtctgtgaggggttggcctatagcttgctagcagggaggctgcagctaggttatctaggaggataactagctgggtggagtagccaacacatggttgtcccagggctgcgcgtaggccttccacagcacccatgatttctgcatcatagacttccgtcctagggcccgcggggccatgtcccgtggatactaggatagggccaaagtagactgcatagccataccctgccccctggctggtccgtgagccatctgagtatactgaaatctgtaaaggggcagggctatagtctttgttgtctgttgggagcatgcataatggagggagaggcagctctattatagcgtgctctggcagggggctgaggaggagctgtaggatccttttaagcctggttttgggcctgcccgcggtagtctctgcggctatttgggcaattgggtgtttagtgtcgaggctcatgtatctcactgctgccctccggaggatgctgttgagtagagcttctgggtctggtaggtctgcttcgcgcagaagtgctgcagtaggggtggtcttgtaggctgggataatagccagggctgctgtgcggaagagagaaagcagggagttaactacccctttttgtcttttgcctgtatagaagacttctgacccatacagagctgttgggagaacacactatataactgctgcctgtatagaggccactgggcatccgcgctgggtgttgctaagtctctttaggtgctgggcgagtcgtttcccgcggctaaagaccaaattaatatgggctttaaaagtaagctttgtatccagaagaactcctaaccaacgtgtatatagggatggtgtaatcccccctataccaggtagagtaactgtggggagatgctgctgctgctttctagagaagtattgtatctctgttttctctattaagaaaggaaggcctgtctctgtccctagggcagtaatttgcttgtaggcctctaccagttgttgtgagctctcttccagggtattcccagttaataatatgcccatatcatctgcatagcagaaggagccctctaaggtagagactattcttgctgcatatagcaggaagagtattggggataggggggatccctgggggagtctgcctttaattggtgctgtggcagtgccttctttgatatgaacagatacagagcggccagtaagccagtccttaagtagctggagtaagcctttatgccatccttgcaggcgtaagtgagaaaggagccgttggtgtattacagcatcaaatgcccctttcacatctagtaggagtagtgaagcatcttttccctgttgaaaggcctcctctaccctgtgaacaagaacctggaccaggtcaatggcagagcatcctggcagggccccgaagtggcagggggctagcacatctgcctgaattgctcttacagctatctgctgtgctaggaggcgctctaggcctttacctagggtagagaggaggctaattggccgccaggcattaagttgggtatagtccctctttcctggtttcagtaacattattacctttgctgacttcaggctcagtggaaagcagccttcctccatacacctgtagtacagttgtgtgattgtatcccctagtacgggccagagctccctccaagcagtggtggcaagtctgtcctccctgggggcagacaggggtggggcacagagagcagcccagcagtgctcttttgttggcaggtgtagtgagctgaggggcttgtttgggggtccctcttctgtctgatttggaagcagggcccccttctctaagaggtgattaaggaaggcgtctgccttgccctgtggggtagtaacctgtgccccttgtatattcaggggaggagcagcgagctggtctggatgttgtatctatttagcaagtttgaatgcatctataggtgctgtggcttgttcaattcactgcttccagtattcagcctttgcccgtacaatggccttccagagctgtttatagtcggggttttgttgctgtcttgtttggtgtagtatgtctgttagttctggagtccaccatggggtcctggggagtctgcgagtattgtatcttgatgtgccttgtattgcaagctgggatatctggaccagttgtttggctagtaggtcaattagtagggttgggtcaggcgggcttgccagggctctggctttctcccagttggtggatccaagcttgtatataggcgagggctcttcttgttccagtattattccaattgttgcatggtcacttggagtctttagatggtcttctactagggcccttagtggtaggttagagaagacaaggtctagggtgtttggtccacgggtgggggtgcctggctcgaggcgaagttccagctcatgggcatcaagccagtctaataatcctgttgcgccaggtgtgatagcatgagactcagtatctggctgccagaatgggtgccgggtattgaagtctcctgctaggatggtgttctctgggggtgcatatcctaggagtgtagaaagtgtagagggtgttgagccagcaccagcaggggcaactgggtcattaggggggcagtagacattgatgatagtaaggcctgccgtgtagattgtggtgatatctggtgagattggttctgggagggaatgggctgggagatccctttgtacatatattagagtcctgggtctggcagtccatcaggtcgggggactgaacagctgatatcgtgggtgggtcttggttaggtgctttgctgtatttgtccaaggttcttggacaagaataatatctgcttcaaagaagagtagcaggtcatgtgcagcgcccccccttcctacattagcttgtagtattttcatagttcaggggaggtcagggtttggtttaagagctcctgggtgagctgtcttgtaggctggtttgtagtatgggtattatctgtttgttgtttagagctttcttctgctttcttctgctcctgttggaaggcaagccggcctgccttgcagatagcggctagagcgtcttttgagaggcgggtgacagtgttcctctggacgtggggtctggctgggcatttttggaagtccgctgcatgcgggccgcagcagttgatacactgcacacagcagttgtgttcctgttttgaggatccgcaggagatacagtgtttgctggagcggcaggcttgtatatcatggaagcggtggcatcgggtgcattgcaaaggcctttgcttggggcgagtgggccttgataggccagacaagccaaagagttgcaaggggtgttgtagcctttttggaaaggctatgactgctgtgatagagtccctctctactgggtgctttgagagtttggccatgagtggtttaataccagtaatgcgctctgcttcattgctgatatctgtaattgtagtatctatccatccatccagggaccagagttgtttcgggatccgggggataataacctggtgatactctgttggtatttcaaagtatccatccccagctaggcttgcagccttctctgatagtaagaagaccttgccttgttcagttgtagtaattgcatatcctgttgatattacttgcacctgtgcaatcccgtccggaactttccctgcaagggtgacccggatgccatgtggtccaatagcccggaggctagaggaggccgggaggcggaggaagatgcggtggtcagtcttgtttgactgcttcagctttcattgtgctggttgcttggcttgcgtacggtgttctggggcaatagtttgccagttcccctgaccagctcttggggctgtcagggatgcccaggttgtaggctgcgaggttcgcctcttcagggggccttcgcaagcctcaggagtgggaggttggtttggctgttccatctgcctggatggctgtgggggtgcaactgctgtcatcagaggaatctgctgaggggagtcctgttttgctagggaaacaaatctgctgcaacgccccgggccaggtctcttgggcggccctgtagagaggagacagttagatctagagctttagcaagagaggtcattgctag

SEQ ID NO: 4105 - DNA, 3062 bp, Emericella nidulans
gcactgccattcttccgaccaccatgatcatttcgaatcggcgcccgttgcacattcccatgctcacaagattatgggaatccaaacagaaacagcgccaaggcaactgtaagtatggcattacttgtgagctgtttctaatctaacaattattagcgatgaagtggtcgcaggaattatggttgcactgccgtggattgctttgtcctggttctacgaacattatgcgcaatggacgcaacccgaacccgactcaaccgcatccatcgggaggatagatcgggctacatcacggacgcttggattgaccgccgcaaccctgattttatatggaggctgggctctaattcgcccaaaccggaggagtggtggggaatccgctctgaaaatgcccagcctggagttgaacacggggataactgcgctcagtcagatatgttcaactgcgtttcccatctatgcgaccctgaaagtaggtgggtttctcgtcgcttttgctttggccctcgctgtaggttcaggactgccaacagttgttcgcggccaaacctctgctagcagtgggaaagaaaggcagagcttcaagaagttgagcgccgctttcatacttatagttctggcgttgagcttctttggcatgaacgcagtatgggacaatgcacccttcgtgggatacatggccttgcttgcctcgatctttctcatccgtcctccgttcccagcaatctcgggctcaaaccatgcatccgagcgtgcacttgggatctccatacctgaccgtcccaatgattcagtgactacgctggagctacaaaactcgtcgcaagacccattgattgctgctctaacgggcgccgtcttaggactcttgacatttatcatcacaggaaatccttctttcgccatttctgatattatacacattctggcagctgcgggctctttagctacctgcttaacgtatctagacatctccagtatatactcaccccgcaaaatcggcgttgctgtcgcgacgggcagtgctgcgctattttgctcaccaccagttcaagacaacatctacactgtctactttattcgagctttgctagccattgcgtctttcttcgccgccaggcttgacgataaacgctcagtttctgaggaacatgctcaccatcaccaccacgcacatgcaacttccaaaccctcgcgagcaacgaaaataattctacgctacaccgagtcttaccctttactgtacagcatactcaaggaacgagattcgcgccgcatcttctatttcatgaggtaaaccgcttccctgccttctcggcccaacgcaccatggctaatgatttgcagtctaaactttggctttatgcttgtccaactatcttacggcttcgccacgggctcccttgggttactcagtgacagtattcacatgttttttgactgcttggcgcttgtagtcggactgtgcgctgctgttatgagcaagtggccgccaagcactaggttcccttacggctatggtaaagtcgatacgctgtcgggttttgcgaatggaattttcctcatgtaaggacagtcagacatagttcttcgtattgttaactgaccatctacaggattataagcgttgaaatcatatatgaggcggtggagagactctcttcaggcagccaaatgcaccgccttggggaactcctcgcagtcagcgtagcgggtctactcgtgaacctcgtcggaattatggcctttgatcacgggcatgcgcatggacatgaccatgggcacgggcacgggcactcgcactcgcactcccacggaaacgagaacatgcacgggatctttcttcacattctagcagatacgctcgggtcggtagctgtggtgatctcaactatccttgttcattactctggctgggcaggatacgaccctatcgcgtcttgcatgattgcgattctgatttttgcttcgaccgtccccctggtcagtagcacagcgaaaagcctgttgctcactctgccagctgatgtggagtacaatgtccgtgaaaccctcgccggcgttagtactcttcggggtgttgtcggctacaccgttcccaagttttggttggatgatacggagaagtcctctggacatagtcatggtcatgaccatggccatagccacagtcacagtcacttaagtcacagccatggctgtgaccatgaccacggccacaataattccatccatagccatgaccatcatagtcatggacgtgaccacggccacgcacatgaaaacgacactccaccagtcctaggcgtaatccacgtcacagcctcccgcgctgcggacttagaagacgtccgaaaaagaaccgtcgacttcctcagagaaaagggaatagatatacttgttcaagttgaccgagaaggcgaagggcgctgctggtgcggtggaggtggaagtggaagtggtagtggtagtggaagaattggtggcgggaacaacctcaaggcttcctagaaaatcagcaacgtcctttgcttgatctgatgttccctgacccactattataacaaatatagcttgtctagaggcagttagttctctacttcatcgcctcctgtatgtaactttggacatgatatgtggcggatagagagagttcaacctggttctgacatcaagtacataacaagccaatctatgattgcacatgcaagtaaatgctgatctacgtagtgcgtgggggcagagcagaaaccaaacagacaccgtgaggagggcgatatccctgtaacacctgttcagcagggcaacagttcgggtcgtttctggccggataatattttgaaaaccgtcgaggtaggacaggtgtcgtttagtacgtggggaccatggtcctaccacgttgatcgctttcagaaacgcgccttgatggaagacggcatgtgggttgatttgcttatatatgtcgcgagcgctgaggtttgatttgcaacattggcattatgttatgtattgcgtacaatcatcttctaagaatcgtcgctgctatatctaaattgatgaaa

SEQ ID NO: 4106 - DNA, 5823 bp, Emericella nidulans
cttatgtaggacggagaatatattagggatgtccaacagaccgttgatgaaactactgtatacagaaatgcggtgttacgcacgccacaatcttgtgtatactcacttgcagcctgaggcactaattcagcttacagagggcaaaccactgacacttcgcgggctcactctcacgtcgacggtgtatcgagtctgcaccccgttctgcacatcgtcttttcctgggtaactaatcataatcccgaactgcaagcgttctgccccattttgttgctgtccaggctatgcacgtctcaggagtatctgcagtctggaacgaaattagatccgttggcgtatcttgcggctcgcctatcattaatggctcttcctgggccgtctttaaaactttactctgggtatggtttgcgttctgcttttgctcctaatggtatagacgctcagttatcgcatcggaccgttattgccacataatgaccatttataccgcctatccgcctaggtaagcttggacgtctaggaccccggctcaccgcgggctcaccgcgggctttacctgggcttcgatagtcaggaaccagcaatagaccggcctttctgggagggttctgctctttggtgctacttttgatcgtcactcagaatagactgatttgggattgatcattaaaggaaaccatactctggcggtggtcaagagcactggccagctgaacggactagacctctctatctcgaaggcctagaatttccttacagcctgtatcctttggctttctttgctggttataacagggtcgcatctctggtactatgtacacaattccagcagagctgtccaataagatcgctgagtcgatcctgccaggaaccggtgacagttcattcctcagcaatcaacagaaaccgctcggcgcccatactgcattctgcgaactgcagcactcgcatgtacgctgacaaatcgaaagcgcctacccttcataatgtatgggcagtttcatggttgacaaccccagtgcataaatccttaggtacaactagttctgttctcgtctgcgggatcgtagtacatcaattatagagaactatagcctggcagtgcttgttagtagcttctctgttgccaaagtcgcaaattattactcaataccatccattaacgagaggaaagtagtcaagccgttgcctgccttcggaaaactggttattaatgtatggatcgagaggtccaccgagcgaggtcaatgatgactcctcgtctttcacccgacaacacctccccaacccactggccaacttaacatcagaccaccatttgtcttggttgtttattgaggcataccgcgtcaactgtctctggagttcctacgcatcatcaaatgcgagtgtgagtgtccggtcattttcactttccatttctcactcatgtcgatggtgttacagatatccctcatgtctactgcgccagcaagtacccagaccgagtctaattccaacgagacgcttgtctatggggtcatgagttatggcccgaggagtttccaccagcacacagcagcgacgtgcttcgagaatggtggattgggtactaccttcaattaaaagttcgtgacgttttggaactcaagttctggaattcatgggtttagtcaaagagacgtaggaattgccatctggagacaagggacattcgcataccgtcgagtagcggggaggtttccaccagaatgcacttttccactatcctagcattgttgcaacttctcgaaagcattcacgaacaaccctcctctgccattggtctctgccttcacttgccgatcccgaggcaggcagacagcctgcactgcagctttataagcagtgttcagaatctcatactgtcaactgacggcatatgctacaacgcagaagcgaactcgagcaagatagacagggctcccaacaacgagccgcagggttccactccattaaaccgaaaatactgggcaacagcacagatctagaacatctgacaagaaaagaagcacggggcaacacaaggtcaacgcctgcatgctcccaagcatacacaacccggggcaacccgaagaagacgaaaaccacgtgccggcacaaacggcaaaaaagcatggacactccaaccacccaaaattcatttgtaaaatttgccccagttcggcatctgcagttgtcgagttttcttgaaccatgtgaaaggtggtgtttacgttatgggaacagctatgcaaatcgatccgttgcgagcaatcctaacttgctgacggatttatgggacaagcagctcggcccaaacctcgactgcttgggttaaccatacggttcggttccctatttcagtgtcctgaattagatgaaggtgtatgggagctttaggtttcaatcccactcgatatctgtgactacctgacatgctggatctagcctaaggcagttttgacacggttggcactccgtataagaggaggcggtgcggtttggccagattatggtttgcttggggccaacccagtgaagagcttgatgatccctttcacctcatttattttaccgtgtattcggttatccagagcgataatcacccagcatggcttcctcccgacgctcctagtccttacctcagttgttctaacccagacgctttccaagggcatactggattactggaatccgcacccgcacctactcaagcatcagactcatccacctcgagactcagcttcgactgcgatatggtctgcagagaactccgggagaaaaagtcaaatgcatgccaactagtacgggcgatgggtcgaatacaacccgagccagaatgatagtgaccggaaatgcaagcagacttcatgcctgtcacgcttcagacagttcacaggctgagcttggacaaacagactttcctaatccaatgatcatcccttacggcaattccttccatgaagattgctcacagattcgcaagcactactacaccactagctttcgtcttcaactaacttatgtctgatcaatgaccctcagtatgaaagcatgaacattcgctagagcagctatgctgtgcacaccaaagacgagttttttcctatcggagtccacaattcagttcttggtgaatctatctcttgtttgatgatacaacagtctaatctgtatggggtcgttcagatgacgatgatgatggccctcaagctcggagtgttgtattcagctgcttcttaatgcttgtatacgccataactgcgcaggtacgatcgtcgctagcaccgctgtcatgggccggcccctggacgaatgatggagttctcaaacagatccatgtgtaaggaattatattcaatatccattttgaatctgaacattctttatttaaccagagaatatttattcgatagagtaaactgacagtgatcttaacacaaggtctgattatctgatagagaacgcatgtcgctgcttcgaaattcaatctaaaagtggtccgtgcaccgacgcgaaaatcgcgtcctccttcagtttgagtagtctcacatgagagaacatcaacggcgaatgaccttgacagctgcctgctgttgatctgggctctatataatcttctattcatcttggcgtccttaccttcatagcccgcaaattcaatttgctctctctaccagataaaagattgaatattggccctctttgttcctctatctacgtcgggtggcgacacgctttccggaatcatttttcctgcatcgagtggatatgaaggggaatttctcctgacaaacgacttatattattgcaagtttcgcgcacgaatctacccatctttgatcgaacgtctcctcacccctgcccttctcgccggcaacaacacgatgcgacaggactctgcgcagccgtccgttgcggatgtcaacgaggatgtgaagatggaaacagagactggaaacgatggacagagcgaggctgtagagaatgaggaggatatggatgtcaagacgaaggcactcatgcatctgctgaatactagcgaggttcgtcattcttggagaatacaagagcgaacccattccacccaattgctgatcgttgcgcactgcaggttttcgtcgcaataatggctgagaagatgaagaagcagcaggaggaggcgagactggaagcggcgaaaaagcaggaacagcagcaaaaggaacagcaggccgatacatcggaggaaagtagaaaggcatccgcgcaaccgactgaaaggagagggactcgagcgagtacgcgacaagcagcagctgcagaggctaccgataataatgaaaagaaggaagagccggcaaagtcgaagcgagggagggggcgaaaggcacccgctaagggcaatactatctccaactacttcaagaaggcggatttgaatgtcgacgaggccaaaaacaccactgttcaggaggcgcttgagcatgccgcggatgagttcgaagccaaaccgacagttctcggtgagcaggagcttgttgccacgcagcagcctgcccctgttaccgggggtaagatgaggaagtatcagctcgaaggacttgagtggctcaagtccctatggatgaacggtctatgtggtatcttggcggatgagatgggtcttgggaagacggtacaggccatatccttgattgccttcttcaaagaacataatgtctctggaccgttccttatatcggctccgctgagtacggtaagcaattgggtggatgagttcgctaggtggacacctggaatcaaaacagtgctgtaccacggcaccagagacgaacgggcacagctcaggaagaagttcatgaacctcagagaccagaaaagtccggatttccccgtcgtttgtacgtcgtacgagatctgcatgaatgaccgcaagttcctcgcccaatatcagtggcgatatatcattgtggttagtctgcattatgtttctagatttggcttgctaacggttgcacaggacgaaggacaccgcttgaagaatatgaattgccggctcatcaaggaactgctgtcctacaattcggccaacaggctcctcatcaccgggactcctctgcagaacaacattaccgaactatggtcactcctgcatttcctgcttcctgaaatcttcaacgatctcaacagcttccagaattggttcgatttctcgtccgtattggacaacaatggtcagacagatatgatcgagcgtcggaagcggactctagtctcgactatgcactcgattttaaagccatttttactccggcgtgttaagacagatgtcgagtctgctctaccgaagaaacgagagtacatcctctatgcaccgttgactctcgagcagaaggacttataccgagagatcctcaacggcacgggtcgtcagtaccttgaggagaaggcaacagagcgtttgatggcgaagaacggaatgatctcgcgcccaaggagcctaaagcgcagtgcaagtagcagcgtcgtctcaacacctaataagagcgtccggtcaagccgtgattctacccctggcagtcgagccagctctacgcgtagacgcaaggcaccgcagacctacaaggacatcagcgatcgtgaattcaactcaaaactacgaaagctagagcaaggcctcgaggaagatttggacattgaagagagcattgacgagtccgaacaagaagagatcgagagagcaaacaccattaagcttgccagtacgtgcactacacctgcaacgcccagccttgactgccttagctaccttccaccatagagcggtaaattgatcaacgg

SEQ ID NO: 4107 - DNA, 1981 bp, Emericella nidulans
  unsure (1)..(1981): unsure at all n locations
tgccaccattgttctgctgcgtatttcggagagaaagaatggaatacgctcatccatttctcgttggtgaaggccaagggcgaacaccaaagatacaacgtcgccttgcctctgccacgtcctgtaatctttgacaagatgagaacttcgtctcagagttaggcggacagagcacttaccattggacccatgcatttccatcatgagaacagtgtgttgaatggctgcccagcacagagggtcactgattgcacctgctttattgcagaattgcaagcacatatcactaactgctatggcaatttcccgcagctcttgcttatctttccctgggactgcatcacgcttgaataccgcttcgtcgggcgcaatctggtacgttgcggcacctatcgaggcaaaaattaacccaactgtctcccatttcggagttatttttgaaacaaattcagacaaggtcatcgcggaatacgtttcggtcgtcgctgcagtgttgcgaaaaatcgttctcgaccactccaggaggcgggcatgtctatcatcagctctcgaatctccgacaaggttgtggtataaaacttgcaacctatgtagagttttcctcaccagttgtggaccgaatatccatccctcgaaaagctcaaatcgcttttcaagcacctctgtgtagaaggggagttggtctaatagcgagaggatctgtgctcctatttccaccattgtagaatcaaccgccccagggtttacatcacagagagcaccggactgcgactcgatagccagcccatgatcattgaagaccgtcgaatggcttgttgggccaaggaaccccaggtgagtgaagaatctgtcgccagtttcggttggttttgcctcggatctgcgagcaatgacggacggagttttgtgtacccaatcgaaaagttctgtatgggatgacgtatcatcataacgtgtgttggtcctatttttgccgttatagctgcgtgcccgatatttctttggtccggttttagtgagagggcaagggtgataagtgcattcaggtgctcgacggcgtgcagtgcaccgctgacagattggaagagaatgatcacatcggagtttggatttgcggcatggctcgcatgatgataatagtccattccgtcgaggagctgccatgatttgcgaagtacagtcctctcagtcagggaagggttatctgacggttatctggcgacaaaggagatggcgggggatagaagtgtaactaggcgatgattcgcagtggtccgtcatgcgatctggccatgtcgcgcaatttcctgcagctagccaatgccatcattacttactgcattcaagtatttttcaaactggcttctgatcctgggctggcctacctacgctggctgacagccctttgcttacggaacgctttggtggcttagacactgtgtgcaccggcttaccctatagggctaagtggtcttcagcagattagaaaaatgctgatcttatatcataactatgacctgttttgaagagaagaaatgattagcacagcaatagtatggctcaatatataaccactaagcccgcccagacatttgcagtcacaatcctactccctttctgtcatcactccgcttcttgtctatgaaaagaccagcaatgggcgggtaatagctaaattctcatagaacgtcacgttccacttctccaaaagagcgcactgctcatctatactctctatattctgcagatgcattcagcagctcccgcggcctaaaccttagctgtgcattatactcatatacccagacacccttgccgctagatggccaaccaaagactgactgactactttctggatctgctatggttcccactcgccgagatccatcatccaagcgctctcttcatcctnctatatatgggcaccgatgggtcctaactgctttcgtaaatcaagcctcttcttgaggaccttgaccgc

SEQ ID NO: 4108 - DNA, 2267 bp, Emericella nidulans
aaattcattccctcgcaaaggaaagttaagaatcgagtcggtggcaatatctggtttagaagcaaaaccggcatgtatgtaacagaacggatattagagttcgttaggcaaaccgacccaccgcgggcgcggagagccgcttttgaggaagatagtgatgcgtgatatgtcccgcgttatgaatgcctgtctcgaacttctttatacctctctaaaccttgtgcattcgccttatccaaataatatggctactcaagaaaagtaaggcacgcaatagtcaagtatcatttcctaggggaaggttggacaggggattacgtggagttcgatatatataaaggatatatgggggtcttattacccgagaagagcaggatgattatacaaagttccgcaagctcctaggatatatatcaccgcctgtgcagtctaatcaacgaaaaccaccagttcatcaaagcaacaccgcgagaaagattataaaagcagcagcaccaatcgtaagtcatacgtttatgcatatctatatcacagaaacgcaaaaaaaagttacaatgtagtttccacgatccactagtcgctatcgctagcacttccctcatccccatcagcgaggtcctcatttctcaaaccctccgcaagaacgtactccgcctgctgcagcgtcgtcttgatatcctggttgttatagaccaaatccgccggcttctgtccatgcttattccttactcgtgggtcacacccagcctcgcacatcatcttgatcatctctgcacctaactcggcgtctttctccattgcgtaccgcactgcaacgtgcaggggagtgtcgctgtctagacgggtgaggggatcgcattcgaagaattggatgtcgaaaagcgcgtccatcgtgtcatcttaagatagcgaggattctgttaatatcacctatccattcagaaagaacgacaagagaagcgaagagacatacagcttccgtattgggcacagatatgaagagcgtggttgcccattgcgtctgtgacgttgttgaaaatttcggcaacctcttcatttgatctcccttcgaatgaatcaagaacttgttctatcagatgaggctggtctcgccggcaggcttcgacgatgagttcacggggggaggcaccctgagtaaagattaggttgttatgcgattcgaggattggcggtgtacctcgtctgacatgttgttcagattccacaaacttagaagatgagaaccagtcagtagagtttcgggtgatccttattaactgaagaagtgtaagttatgagttgactggaagatagccgccgaggttctggcatgacttacaattgtttggaggtcagctaaggcaaatcaaacacagaatgacaacaaagtaggcagctgaaggagagttttagctcaggaagagattaaagcagtcgtacgaaatgtcatacgtacaaaaaacctttggttgaagctgtatcagcctgtacaggagttctagagtaggcctccttattgattggttgccccgctggcatgccgacattctgcactcgctccgaggtacagttattgggcgcagcagttattcgcccctcctgccaccagagtccgagcgacaaacatggattcctgggagaactaatattgaaggatgccttaaggcctcgcacatgatcctgcgggccactactgacacggactctgactgatacggctatccgccaactgataaggcttcatatcgcattgcgcagtgggatagtgctagctatctttattaacaaccccgtgaaggcgctcctggcgaatatctagaggttaactattagcttctgtggttcatgcagtcgttgaattccgcggatcaacaatgcctttgacatgtacgcaaccgatgttcaacccgtcagctaatcagccttttagtaacgatgatttctagtttgccccaactgcagcaacgcgctgactatttcgcgcgctgacccttcgcccaagtatcctcttgggatcaaccgttttgaatgccgtacatgcccgtatcagtatgctcttgagcaggcctggttcgaaaagacacccatgaagcaaaaggaagtcgaggctgtattcggaggcaaggccgaattcgagaacgcagatagcatggccagtatgttggggcatctttatccatgccttgttacattaatgattgctgacttgacgttctacttatgcagcacaatgccctgcggaaggctgcaatggcgaccgtgcgtac

SEQ ID NO: 4109 - DNA, 2899 bp, Emericella nidulans
tcaaactgggattagataaacaggatttgatataatgcggtctcgtacagtctgaaagctgggttattctgtgacttcagataccggcgccttcttcagtctacctcattgcaaagttcatgtatagatgggcttcttgtgtttcttttaagggcgcccgcatctggaagctacatatatattttatagggtaagtaaattacgaagttcaactgattctccgcgctcgcgagaaaaccctcaagattcgaaattattcgagagtacagatatatagcaagtagagtgctacaagctttcaagctgtttgttgagtggttgatggccctccttacagatccgaggcgtgatcagtaatccgatcgggcaactcttatgacggcatccagaacaacctcggctccgagcctacctacctatatcaaaccagcattctcaccttctcagatgtgcaactacaattacatctagcaactctacaatgtccctaaatccctcctccaaacccgtcctcgccgtcatcggcgttggtcccgggatcggcgaagcggtctcccaccatttcgcgtccaaaggcttcgtcgtcgcgctgatcgcccgaacagaatccaagttggagaaggtccaaaaaaccatcaatgacgacgtcggcacgaccgcatcaaagtactacgtggccgatgcccgctctgaatcgtcgcttcaatccgcttttgccgcgataaaggccgaccttggccccgtcgacgtgctaatctacaacgccggctcgagacgcttcaccccgcgcaacattctcgaaacctccagtgaagaattcgagaatttcacgcgcatcaaccttttcggcgccttcttcgcgacaaaatgcgttctgcctgatatgctggccaaatccagcggaacgatcatcttcacgggcgcaacggggtcgatccgcggcaatgcgggcgtctcgtcattttcaccaggcaagtttggactccggtcgttatcgcaaatcatcgcgcgcgagtttcagagtagcggtatccatgctgcgcatttgattgttgatgggcccgtcgagagtgacattgttggtgggtttgtgaggaggcggtgggagcgagagggggagcagggacggaagaaggtggaagaaaaggatctgtatctgatgcagccaaaggaattggcggagatttattggtttttatatagccagccgaggagcacgtggacgcaggagctggatgtaaggagtatgaaagaagggatggtctcgaagctgtgatcacactctgcagaagactgcaatctctcggagtcgttgaggatctgcggaggggaattattagtcataaataatcctgactaagggtatcacgtggcaggcagttcgacaagttttgagtgtccaccgtcaagatttcgcaaccaaccagaccaaccagtgtcattctatgcctgatttagagaaacgtcgatcacaaattgtgctccagagaagtatctggttatgctttctagggtcatgttatctcgcttaccgccaactcaggggctgccaagccacgcccgctgtgagacctggcgaaggcacgtagaaacgcggactaggccgccaaattgtcgacagcgtttgcgccaaccagctcgcctcctggagaacagcggggaagtgaacaggcaccccttttccatttgactggtgctcctcttcttcgccccataaggccagcctatcggtcgatcgcgtcatcgactagtctgctccaataattttttgatgggccatggcccgccgcccagtgttcagtggcccagttgactctttgtcctatcttttttgaggtgccgggaccctgactgctccaggaactccggatttgaaaattccagctcagctggccccttcatgaagctgcgaaaccggcccgaccgtttcgctcgctatctgaccggtgcacgacgatgatgttgtttcgctttctgcttgtggccctgctgtggtcgctcggctcggccacgatcatggagaatggccagccccgagccgatccttacccgggccagtgttcaactatcgatctggatagcagctggaggagttacgatgccgatgcacctgagatctcgtacaagggaaggtgggatagtaaacatatttcatgtgcgtctttgccactggctttgcgattgattgatcaactggctaactgactggttgtgttgtagggtggtcgtctgtctctctgcttcttcctctcgtttccggggggcgtccgctcactcactaactctcgtccagagctccggggctcaagttacagttctcaggtaaaaaggtgcgttgtcaatggcaattaggtcttgtggtggctcaataataatatttgtctgcctagcttgcgctgagtttcggtgaacacaccagcgaaggaacgctcgtcgcttaccggtacgctccgtcgatacccgggttataaactggagctggttataacgattggcagaatcggaacgctggattggctcttcacaaacgttaccgcagatgcgacgtatcagttcgtcggggagggaacacactacgaggagttacccggtgatggagaccacatttttgagatgagaggtacgtctgacataaaaataccacttcagggaaataatactgaccgatgcagtcacaaactggggcataggataagtaaaaccgtctgttcgtttgcgcctccgcttaccatccgcacagtccagattgctggggtgtccgttgatgtcgatgaccacctcacgaaacctccgactttcaagaagaaagttgaaattattggaggatcgtatgttcgcttggattgatatttgcgacccccgctaacagtgccagtttgaccggcggtcagtatgcgac

SEQ ID NO: 4110 - DNA, 6048 bp, Emericella nidulans
  unsure (1)..(6048): unsure at all n locations
gacccatatccaccttgcggtcagtgggcctcagggccgcgtctcgactaccgtgatgccacgcaaattgaggaaactgagaagttggtcgcctaaagggcgcgaccggtcattgctctctgcatctcgtaaacccgtttccttccaacgtcgagacttccgttcggttcggcattgaaagttactactagatagtcaagagctggtgaatatggcttgggactttagcaccactgtccgcaacaattttcggttcgatgacaaccctcaatcataggatacctaaccgtttgtctgcctgtttgatgtttgccaggagttgcacctagtgtttgctcagttctgcgagtgtgttcttagtcgtcatgaataccgggtaatacccggtcctggtggatcagggctcgtaccgttaatctctggtgtctagatgggaggtaggaagagactcatccatcctgttagcatgaagtcagatggcggtcatagtgggagttatgagttgtcttctgtgattttcatactttttcccccttgcaatgtggaggagaagagatattttttctccggttgttaggcaggtttaatagtcaagtgcaggtgcttagagcgtattgtctattcaattcagtccttgcatcattgcaataaatagacgctaattacttgtggcagcacttcttgcatctatgagtggtgtataagcaggctaataatacatatagttgcatagaggctaggtcttgacctttagccccataattatcagagtatcagagagacttcatacggcggagctatacctctacagagccgccagcatctcctctactcgtccaaacttctcccgtggcttgctcttgagcgatccacgctcgcgctccgcacggtcaattcgctcccagtcttcccaggtcgttgctcttacaccacgctgctctgcctcggcacggacgccctcccatccgaggccggtcctttcgttcgatgggttgagcagagtgttaccatgctgtgccacatccgctgcgatcgcgtccgccgtgctgaacgcgtctgtcattgttgtggcaatcacacccgtcggtccccgcttgacccacccggcacagtatagccccggcagatgcgaaatcagggacccatttgggagtgtatcatgagtcccggcctctgacgccagaggcacagtgacccggccaaagccgtcgttgggaattactccgcggctctcatcgaatggcactccaaggtcttctagtccaggcaagggaagacctttgtagccgacgctgcgaaagaacgtgttcgcgggaatgttgactttggccggcttgccgtcggaaaggtgcttgggcctaaccttggcgcttgcggagaacggatccgcggggtcgagttcgttgcgggcgaagcgcacatgagacaggcggtaagggaagacaggagaccagttgagacactctggcgagaggaggaagtcaagagaccacgacttggtggttgtggtagggtcattggtagatcctttggagagtagctggatcagtcgtttctgcgcccttgggagggctgaaatgacgtcttctgggggaagaagatcacgaggaatggggtcaaatgatacagaggggagctgtagcagttctcgaacctctttaatagtaaacgacgcctatcggggttagaaaagtaatgtacggccaagggactgacgtacctgcaacgggcctctgcggcctactacccggaccctcttgattttgctgctggacagcgtctccaaggcgtaatcggcgatgtcagtctggcggagacgatccactccggacagtagtatcctagctacatccaatgcaacattgccttgaccgataatcacagcatcctctcccgcggcaaggtccgggttcaggtctcgatgctccggtagcccgttataccatcccacaaactcccgcgccgaatatacactgcgcaatgcgtcctctccttggatccccagcttcttatccttcggagcgccataggcgaacaggatggcgtcgtagtgtggcttgagcacccgaagaggcagcgtttcgcccaactcaacgttgccaataaagttgaagcgtggagatgctgcaacttccgtaaacttctcttcacagttctgaccgccgccgttagtcctcggttctcacccatagctgatgggagacagacctttacttccggatggtccggagctacgccgtaccttgccaggccaaacggcacaggcagcttctcgtacatatctactaccgcatcctcgaccttccccaagagccgatatgctgcgtaaaaaccagcggggcccgagcctacaatggctactcggaagggtcggttggtctgaaccgtttggctgatattacggcgttgtgactggaattgagagaaacgcgcaagacgcagaggccgagatgcgcgaaaggtgcattgcgcacatatatatggagcatgctgcagactcatcgttgaatgtaggtagagtctaattttattatatgtcaagaagttcgggttgactcaatcgcgtaacacgtgatcttatcgatcttatcgttatgccagaccaagctagccggcggtacttcaaccttgggtcttccactatactagtactagtatacaacccgctgttggcctccttcgcaactctcagcattgcatctactagggtcgttgcctcttaataactcttattcgttaatttacggctttctttccggtttcaagtctcgtacttccgcattcacactcgtaacccagtaggtccgtgtgataaggcttatcggttgccaggacaacccagccagtgttgttgacggttcttgtttcagcctcaatagacactgcagtatctcggctgcccccatctcactccacctgaacctcattttgggagatctcgtggtgcatgcacgagctgtcggcgatttaagacgcagcctgcttgtttttgtatcattcaataggcttgttctgtcctcattccttctgacttccagtcttccaatcttccattgttcaatacattccttctcttgcgcacattccgctccttccccgcctcgcgtgggtggaggctgtcattgctgtgatttagctattgcaaccatggggaagtctcctccattcctttacggacctcctgatgctttcagcttcagagggcctacagatcctcctttcaatccaaaagctgtgacgcaggcgagctggactcggcctccacccaaaaagaaacagaaaggcccgctgatcaacttcaatcgacacccagactcggtatttcgcacaaaccattgactattgaatattgctgacagcttgaagtactgtaacctccccgatggtcggtcgcgatggactccgatgagccctaggacaaagtcaaaggtcttttacggtcgaaagatacaactgggtctacgaattctgtcgttgattggggctctcgggtcgttgttttgcgctattgtgattaagaatgtcgcggcttcaataatatggatcatccgtgtaggggtgagtgaggagcactctgataatctttcatcctactgacttgaacaagcccgcagtagcaatactgcacaccctctacgctgtttaccacttgtgccgttccccagttaccagacctccgggctcacaagcgagctatatgctgttcgccacaaccttggatctagggctagtgccgttttatacctttgccgcttacttaggttataaggagtataccactggcacctacaattggcaaacacttctgagcacggatacgggtgtcatcacgacaatcgcaaaggcgactttttatcttagtgttgtcaatggagggcttcacttgatttctcttggaatctccgccttcctattcaacatcttccgccaaattgctcagctgccccccgaccttaaccccctagaagataatctgacgtctcgttctcacaagagaaccaaatcagagattgctgagaagcatgctagcagctctactctagactcaacaaactcagttgcacagcctttgatcggcgtccctcgcaccatcccattcacacataccagggtgaagtcatcggaaggcaattcgctacggccgccggttgatatggtcaagcagagagggaactcacagtcttctatcccagagatgcccttccggtaccgcgcgaataccctcgaagaaccttacgaaatacccctgcatgacacggactttgaggcccgtcctacctcttctatcccgtccagtactccactgcgccagcggtctcctgaaataccaactcgctctcaatgcgtcacgccagcctcggataatactacctcggacaactgggttgcgttcccatctcgctcggtttccatgaatgaggacgttgataatggcggtgcagccccacgtgagccgtcgtctgtttacagcaggacgggcacacctggatccttaaatggcgtcgtcgattggatgggcctcgcccaaaaatacggatgggatattggcgagactatatcagaagaccttcgcggtgaatatgagtctctagctatgcatgagtactacgggaatgacgacgatagccacaatgtgcccaaaaatggtctctatgatcatgacgagatggacgagcatgacattgggaaccatcgcatcgatatatatcaggatcacgaggacagtgacggagaacatggaaataccctcagagtcaatccgctgggactgaaccctgcgacaccccagcccatgcccgatatcactgagactaaaccggcatctggccgtatggttctgggcgatatccccaatttgagcccgactccgccaaagcacaaggttccccctcttgagcgcccggagaaggaacgcttttacaacggagcagacatacacactgttactgatgatgactcaaagagtgccaagaaaaccaagctttataagcgcaagtctcataaactcaacacctacggccctctccagcagcagagcgaagatactgcagagaaagaccacgaaccccgtccggctaccgatcttgctataaccgatagagatcgtaaaggccgtgttgtcagtaactcaggggctgacttcggtctccgcgtccgccaagggccaaatttgtcgtacggaaactacattgctggtctgggtgttgggaggagacgagacgttagcggcaaaatggctgaggagggccgaggcggtatcgatagccctaactccaaaagcacgagcggaaacggaaacgccaactccacgcctagggccgctggatgggcgagatttgctgggttgtgatttgataagatctatactcagactgcactttcggcccaatatgattgagtgaggaaagcaagcagagaatatcattgcatgtaacatggagatggaattggaattatttactgaaatgaaatgatggatgagattctcattaaggatgggtggaatagggtttcgaatttcgttgcgtgatactcatttgctttttgtatctactgtttggcgtactaacgactgatatgtagtttgggctaggaaagaataccatgacacctcttatgattcctctgtttttgaatgaactgtagaaccaccgggaatgatagagatgtgcctcgcattaatagcagtggaagaatagaatgttattgcagcagtgatgcttaactgaggctcttaagatacctatttttaagaaggtacaccttcgtactcccatccctgaataacccttctgtttcgtctcgagtttcgccggttcgcattacatttgacgaacagtgtcagcgccgcaataatggcagatcactatacccgcgacagcagcaaccaagaaccgtccgtctctcaagttggtccggatctgcggtatacgggcaagttgcaatgggtccgccggtcaccagcaagttttcggtatcattggagttaaaatcaatccagactggcggtttgaggggtgtctgaggccgacggntcgattagatcat

SEQ ID NO: 4111 - DNA, 1117 bp, Emericella nidulans
accatgtgtcaaagatcacaagattgctgaaggcgaacgcgagaaggaaatcctggccatctcaaccggcgatcagttcgaggaattctacaaacgactagacgaactcaaggactttcacaagcggtatccgaatgaaccagttgagaacctcgagcgagcctacaagcgccgccaaccaggggagggcgagccgacggggctggaggttgatacgatgtttactggtgaagaaggatacgggcagttcctcgatctcacaaccttgcatgagcaatatttgaacctgccaggagtcaagaggctatcatatatacaatatctcgacatattcgatgctttcacgcccccgaaattaccgattaagcgaaacaacaagctctcggacaaatatttccaatatgtaggggaacttgcaaactatcttgaggaattcatcaagaaagctaggcctttacaggatctgagcaagatctttgctagcttcgacgaggattttgagaaacagtgggctgcgaatgaggtccctggatgggaagaagagaagatcaacaatggcacagcaggccccaaaaccgagggatctggtgagggtatatggtgcgccgattgtgagaaggagttcaagaacgagaatgtgtacaggaatcacttaacaggcaagaagcacattcgggctgctgaggcccgtaaagctgctggtggttcgggcgaaggacctacgccgtccgccagcgggccatcggcagctcaccgcttgaaagagcgagcagttgctgagcgcgagcaccgcgttcgttctctagcaagagtactcatcaacgagcgtcaggcaacaaagataaatgttgagcggagacaaggtatgacagagcgggagcgtcaaatggagcttgaggctatgctcgcagagaccgaagacgccaagggtgaccgtggcaacgagtcggatgaggaaggcgaagatcgcatttacaatcctctaaaacttcccctcgcatgggatggcaagcctattccgtactggctctacaaactacatgggaagggtgtggagtattcttgcgagatttgcggtaactatgttacatgggccgtcgcgcattcgacaaacgtt

SEQ ID NO: 4112 - DNA, 4573 bp, Emericella nidulans
atgatgaaacagacaatcgtttcgatgattctcttcctatcatacggggcatttttccagatgatgagctccccgacacagtcagcctgccggatctcgacctgtacgttctcctgctctcctccctttcttcctctattatattatcaaaaccttcagaccccaagctaacatgtcaaggcggcttggctatagaccacccactccacaaatcaaacaagagagtgacttgctctctctcctacacaaccaagacagactaagctggcgctccaccttctggacacccagctcagccctcaatttccatagcttctgtcttcaagattgcttcacgaacttccccatacaatcggaggaactcctggactacgctccctcgctattcaccagatcctctagcaagccgcaaactccaactacaggtatttttccggtcaacgatcctactctgttggatacagttcccgagaggcaacagaggaatgtctttgacgatatgctattggagtgctacaaaggcgaacgtcatgtctttgagatgccctaccactcttactcctctgttacctcctgatcgttttgctgagattaggcgacaccacccattctctcctacaagctggtcttgtctcacctcgcacttgactttatcttcttccttgcacatttccacctgtatcatactgtctcgattatgctatgggtataccggaccctacggcgttccgacctgcatttgtgctgtacattaccttcccacggttggagcatctgtctggcggatggcgaccttggcgttccaaagcgtattttgcacttgtcactactactgcttttccattctctctttatttggttctactgccggcgatgggtgcgataatttatgtcggcgttttgtggttcggctcatagtccaatatgttgttctattgtctagcccagtaatggcgttggagctcggttgtctcgcgatgcctaattgtaccaaaagtgtactatggattgcgacatgtgcaaccgattacttgggttcttctagaatttaatgatacttttgcaatgttgtatatttcaatctgcctcccgttccttgatttgtttgttagcccataccatctcggaacatttttgcgaagcatagccctaacttcttatgacaatcttggcatcaacttaattcagacgacattctactgtagaggttaagtgggggaaacaaagacaagaaaaccaacctttttctaaatcaaatttatgctaatgcctaaaaagaataatcttaagccaatgcaaaaaaaaatccatcagaacaaaacaaggctatctaaactcgaaaatcccgttgcaacaccaccctcattcacaccttcagccttagtccgcatcaaccatccgccctgctcattatgaagaatcattttattactctgatcccataaaatagtgccataaacgcctagttccccaataactccaccagcgagaacctcgccgtcgctacggagagcaatgttcttcgcggccgctggaggatgaataagctccataagaatccagcgcttccactcgttctcagggatggaattgaggaaatctgggatggctgttttatagatgttgttgccgccgccttcacgctggggtttgagaacgtggtttgccgccgtcgaggggctgagtgcgagttcacggccctttccagaaacagagaggtcgtattgcggagcgaaggttgcgcggagacgggaaatgagagctgggtcagtgtcggcaaggaaggttgcgagatggtcctgtcccgtttgcgtggcaaggacctgctgaacaattttggagcccgagagttggttgaggactgttgggcatttgattgctgcggagcgctcaaggtgagttcgggcctcccagtcacggttggagttgtagtcggttggtgtgtagaaagaacggaggtagacggttgttacttcaaagtgtatctcttcggcatatggcgggcggtagatcagaggacgtgagggattggagctggggatgtaggtatggtcgagaatctcggagcttagcaaacggaagaccggtatcttgtggaccttcgtgagttggcgcgaaagagccaactggtcgaatatatttcgttcattttcttggaccacgaacaagatacatgtaggcagctgtggttgcgacttggattgcccgtacgcggtgtgagccgttgccaaacctgcggacaacgtctctactgcagtattttcagggatggcttttggcttcagcaaagggtgtgacgggtaagcgatggggctgcccgggggagaatctaagagttcagaatgcaaggacgccactagtgacgacaatccgccaaaagatgaagaaattgtgttgaactccacttgttttaactcgggaatcgttgaagttgacggagcgtgtgccatatagtcagatcgaaaaagaccgagagaaagtgtttgagcgtagccctcttccttgacggcaagatgcactttccagaggttcgagatgaagtcatcaacgtcaataagactacagtcagaggccatgtttagtctaggttctgtggttctgatagagcatgtctccagaaaaatacaaaggacgcaaggaaataaggaaacaagatgaactcagaagataacccttactcttccataattttgccaatccattcttcattgcatgttatcgcggcatagagcttattgtacagagtctgcagcgccttggcctcttcgaagcacgtcctcggaaacgggctaggaaacagagtcaccggtgcatttgtcgccaatacgccgcgagggtcggattctttcgagacgaatgtaggtgcaggtctgaccataaggccattttgtgtcgcccaatccttgaccgtcctcacgaggaagtccttctgtgcggggttcagagagggggggtaatcggtgtagacagattccgccatggtgatcggtgccaattcgttgtaataagagatttatggggtatatagtcataataaatctctcctgagcgtcaactttagcagcaatggatttttgccagtttcaatggacgctccaacttcttcaggccctccgcggggagaggggtttctcaattactaatccaagtcgttatcgtagctatcagcaccgcctgcatcaccgctttccagcggtaatgccggcagtaagactacatcgcgaattggcgcggcgcgctttgtcttatatttcaggctattatcacacgactagtaattgcatgctgatttcagtttggattctttttgttttattacattcttggttctgcttcaccagcgatctatgaatttcagtttttcttgtcacaatttcaactctcttttctactttctgttcacgttctgaagctattcatctctttagcgcttctagaaaaccttacgatcaggttcccctctatgatcatctatttctctgaggatattttgctacatcattgagctttctgtcgaattattagatatttagtgtttcttctcccaatgcctgtgtttgcatgatgcaattcaacagcagtgaccctctcgactggaccgtcgatgaagtggtagcttatctttgtcacaatcctgagacaccatggtcacggtcaagttctacggtaccacgaccgcccgcttctttcgaggcttcgcttcgaaagaatctcataacgggggaagtgctcttgcaggatgtggggaaagaggcgttgcgggacgacctaggactgaaagctctgggacaccggagctttataatgtctgctattcgctatctcaagagactatcccctaagtatcaggcttccatatcagagcagactgctgaaatgttttcactgtccccagtgcacccgcaaccgccactccataccagtgcgcagtcaccgactgctcaatattcaacaccattgccccctgtcggcccaaatactcctgctctggctaaatcagtcaccacttttgtcacttcagactcatcggtcgctggcgaagtacgtgataacgtcaatgatgtacgccaaaatagctcaaggttcgacatgcctattccagaattgtcccagaatttgctccaagattcgtgcggaaggatagagcacattcataaccgttataatgagcaaattgtggttgacaaacatggcaacaaaagaaggaagcttgatctatgcatctccgtggaaccaagaactgacaattcgatacctaaaaggtctggtaatagtgaggtacaaagctggtatatgggaccggatggcatcacggtggaacaaattttctatgatcctgaacttggagatgatgatcagacattcacactgatatcacccagactccccaccgcccagcacacgttcgtgaataaccgcctgaagtatttcttccaacagtcaccaataaagttaaacacaaacggcaggtcatcatatcatgccgtcatcccatataacctgtcagtggcaaaattcagcaaggacatgcatttcacaatatacaccacgaggcagggtagagtcaacgcag

SEQ ID NO: 4113 - DNA, 6967 bp, Emericella nidulans
atcgtccatcactatctcaatttctcttttcaaaaggacagaaaaagtgacgtgaccacagagaaatacccgtactttgtccttgcatccgctgcattgggagtaaggctcccttcggcaggaccgaagacagaccatacgaagcccctccaccagcttaatcctgggctccgcacacggagtcctgcatagcacgcttctcgaacaaaatagctgtagacgcacaatcctcgtcgttacgcttccagccaagtcccccgggcagggaggtcattacttagtgcctatgcttactccctcggagccttcccggtagtccatctagtctgttaaagtggcagatccatagaactggctagacttgagaatctgatttttttttttcttattttctggaggtcacggatctgtactaggagtaagagaatgtgcgtttgtatatttaactatgggaactagctgcatggactttgctttcatgactcgattctttcggattctgctctgtttcgttctatgtttgtgggatagtcatggagtataaaaggattgttgagtgagcatggcgtaagagggtagatggtgaagggatttctgcttggagtgctgatgtacagagtatatataggttctattttatccattctcttgaacgctcggcttttggcgtacgtacttcttgttcttgtcaaagtatcctagcataagtgctaggaatggtttacgagccaagagtgcaacactactgggacaataagtagtcccatacatacaagccacgaagtaaaagtacctagtacaagagccggaccatcaactaataatctgtctattctcttcttcacttagcctacgcagatcctcgagtcgttcgagctcgagttcctctcatcccggtcatgtatgtgcatgcagtgtatgtaggcaaagcgcaagcatagcggaggaaagaggggtaaaagtacgatagcaaacaacaatgccgaaagtcgactatcccattaactccatgcatactaacacgtactgtatgtagcaaggctacgtacttctggcctaggtaagcacagcaggggccacaacaatgtccgcacgtaagcaaacatctcacgtggcttgctgggggaaaaaacactgtgacctgcgcctttgaactggcagtacgttacaccgcgctcggaggtccattcccggcttctgggaatttgcaggtcctctgggggttctttccgtccctttctccgctgcgctcatgcgtacccttgcttctatctccgcgggagtgcgagacggaaggcgccggcgcggcattgtccgagcaaaaaggacaagtcattggtgagggcaaccctgagccctgttccacgtcatgtttttcaagatgagctctgcgtcgtaggggttgggcagcatgtcgtactcgccgaaagagatgtggagggagatgttgtgtgatgtgaccaattccgggaggatggagtagacgggtggttgtgggggttgcccgctgccaagggtgaccagggccgcttggttacagtatgtccggtgatggcgttggagggacgctgcttgtagggctagctgctgagtctgattgacgctgaggctgaagaaagcacattcagcagacctgctaaacgccggcacggccgaagtactgcgcaacgaggctagagtgatcgattgtgtgacagtcatgactgatttcgtagaagtcgtagttgcatagcttgttggctctagtccgtatagtttcatgcggtggagaaggttgcacacgagccatagcaggatgagtagatggatgttgaacaccttcggctgtaactggatgaatggtaaagattccactgaatatggcacttaagactgcgccggcgcttgaaggtttcgcgttcccattcccaggaatataaatggcgccctctggagggagtcgagctgcttgtttcaggaatcaatgaagccgcatgctccgcttgcaactgaaatcggtcataatattatcaggaacatcaacaattaacactgcaactgcagaatctggcaaatgtgaccgacgccatagcagctcaattgccaatcgagccatcacaaatggtaatggaccggagatcgatggaaatgagtcctggttgtcgaagatggtcaaggcaaacggtatgtatatgcctgccaaggctctccaatcaaatcgacctgctttgactggggatacaggaagtatgcgaagaagggttggatccagctgcataagcgaagttacaacaacgatgtcaacagccgggtagcgctcgctcgcggccaaaaatcccgttccgacgggttggtcgacataaaggacatgtccaatttggcccaagtatatggaattgcgactacgcgagtgggattgccatcaaatggaatagaccgttcctggtggtgattcctatcgtagaagagcagccggggccgccatttgatcagactgttcaaactgttgttagtgctgactagaaaccgtccaagcaagaaccaactgatcagtccattatcgcagacagagtcttctgcttggaaaggccagataatagcgactctcccagttcaacaaggggacaaatgccgtctgggccagctagaggaagcgggagcccgtctggcaggggctggattcccaaccgagagacatcccctcctgcacatgctggcctgaagagtagaagcaagattgctgctgaagctcagagcagaatgcctgatgcgcatttcatgcatcatccaggcagcaaaagacactccacagagccacagagccacagagccgtcccatatgaggtctcgatgcacgatacaccaagaaaaggaaaacatgcatattgatgaccactcgcaatggaagatatccagaagcaattcagcatctagaaataatcagagaccctgctgcaaatgataaacacttccgcatgctggcctcgataagctatagactctattgagaccaaaaaatacttgaaaggacacggtcgacgaggttttgggtgccatataagaagcgtataggtaagtaaagcagctggttctgtttgagactttgtctctctctatcagagcaaatatgctattttcccactgaacattcagaggtcagctagtacaccaagaatgagggatgtaagggaggctaggtatcgtcagtcactgtgatatagtcaggattgatgactgcactctggaacaggtcacattctgggtttgcaagtctcacaagtgaatcgacatccagagagcgagaataaagcatcatggacaaagccattacgactgaggaacagggagaccgatagaggggggagtacactagagtagatgtccaaattacgcgtcaagctatagttaactagttaactaattaattagctggcttataactatatggcaaagcttattctctatgtatcacatgatggtttggttggtgtcccttgatccttctgaggcgtctgggcctttcctcgaactcaacacttgaccttcgttctattctgctccttttgagaatcgctgaatctcaaaaggtcgaagagacttgtctctttcctatgtatcttccacattctgaaacaaactcgtacgttacgagtaggctgcgcccgaggcgccgcctattgagatagggccgtgccgggccatgcccaccatcctctctcagccctaacgagcttaccaataagtatccaaggtcctgatcgataagagtggtagcactaccggtgctacgcggcatccgctgtttcgacacgaatcgcacgggactggagacaaagcgggttcgaaacacgagaccgctgcttcgtggtgactggatgtaaacaacttgtttccagttagatcgcaccgctctcggcccggtacgagaatgaggcgacctcgcatgtggtgggcgagatttttagtcgagtttgaccgtaaaaagtaaggcgatagacggccatattctgtaccactctgctcgctccttattcgtgtgttggtcttggaggatccaaccacatgattttccaagcttttacgggcttttactccgtactccgtacgccgtcctcgaatgacctccccatcgacccgtgaagcgggagccagcctatacagatcattgcggaggatgcagcaagcggccatgtagacggcgacttgcacgatctgcttgccaattgtactggagaccgcatcccggggcggcgtggccacgtccattggacatcgactctggctggcatccctagaacgagtcgccacaaacggccacccccaatgcgcgtgggttggctggcagcatttactctgggagactgcaattggggattcgaccgccacgcaatgttggctagtatcctgggctccggtcggtaaatctgttcgaaaacggagtgtaacgcgatatcatgatatcacggatccccaggcgttgcccgcaattctcattcattctcgctgaaccgaaatgtcggtgacaggaatgggtctacgctagggttacgaagtataattatagacttccagagttcgactcaattgctgaggaaacgagcacaagccaacctacacagacaaaagtttttttttttcagctggacagctgaaacgcagtaagccagacagggatactgagtaaaaggccagcagaatgaggaggcgatgcgtacgccgtaggtatggtaaatatgtaaatatggtaaaaaggctgcgtatctgatattgggacgggaacgaagccggtcggcgtgttccgagctgtggaggagccgagagtcgaccacaaaaccgaaaatgctggtaaggcgacaaagtacgctggctggcactgcaactggcagaggcaggttgggatgggcctgtcaggaacacagttaggcacagaaggcacagaaggcacagagatgattgcttttttgacgcgggtcgcgattcctcttgcttcagaggtcaaaaagtccaaatgagttcaaaagagttcaatagagttcaaaatctcccactgaattctggctgcatcacggtaaggtgcgtcaattgcatccagcaccctgcacagatcgaggatggactgcggagtggatggagcaatggatggagcgatggaatgatgggcgatggagtggacgatggagcgatgggagtgaaggaccagtataggagccacattccgcttaaggttctcgcagtcctgttttcggataggggcatgagtctgtgtccagcacactccttggcctcattcctctcgtcagtattccgtgctatagctcagcagggattccacttgcaaatcaaggcgtccaccgatctcatcattgcttctgtttctggcacactgatcgtccacacgccgcttgcagacaaagcctcaccttttgcactcgctttgctctcgctgcctctcagtttaatcgatttcttcttttaattctttgtcaagcaatttggttcttagttttccttgttctcatctgaaccatcacattccaattgctgttctcgtcgtgtccagtatactcgttcagccacacttgtctgatctcagtaataatagacctgctgcctctatccgcatctgctttacctactgttgctgttttcatgtccagatcaaagtagtagtatgtctccttcaccttgtcattggctatatcagagcgccctcatcccggctccttccctgtgcttctctgactgatctgctgaagtcctatacaagcagtcgccgccagcgctttgtttgctctctttgacctgtccacaccctacctgcatcttcccttttttttccccatctattgctctcttcgctttttcacctcctgcgtctcgtcctttcaggattccttttcttgctgctacttcgtctctatttcaccagatagctcgttctgggtcggtctggaaaagggagggcaagcgaaaagcatcggaagacggatttcgcactatcgatatattatcctggcataatcattgccaatctgggaagcacgattggcgatcgactattactagctgctgggtaggtttgttgaccgtttccctgagcccctccctcctgccttacattgtttctcccccctcaccaggcaaggactgaccaaagggcttctgtgaagggattctattctcctcggttgatcgacccgacaaaagggtgaagatcactgacagtgccttgcatcggtaaagaggacatgctcgtgaccctggcaactacttagcgcgctgccactattcctggtctcaactctctcgactccaggttcccgggccacctccacgatcgtgccttccaccgccaacggggctccgtgagtcaggcgcgaatgcaagatggacctccagaagaccaaggaagcccgtcgtcgggacgcgccgggaaagcaggaggagggctcagagtgtcctttgaaaccctataatggaaatggccactctaaagattcgcccaaggcagattctctaagtcgcaactcggatacgaggaatacgaaagagcctgcaaataaaggccatcgacagcagaaggatgagttttattctcaagctgctcaccaatcttcgccggcgccggcgccgagctcgtccacgactccgcagtgcggacacccactgtcttcaaaggcgatcaggattcctgcggctctgggcctctctcccaaagaaacgaccttgttgatcactgcgaacagataccctccggttaccaagagcacgttgagtgagctcgatctcccttgcatcatgggcaacatcaacctccgcatggacgccaacttcgaccgcgacctacatttcaaaccggatctcgacggtgagaaaggcaggaaaaagaggaaagatgctgcagactattggaatgcgatggctgcaaaaaacaaagtctatgcgttctgcgcatcctgtgggctggataacaaatccgaggaccaca

SEQ ID NO: 4114 - DNA, 3441 bp, Emericella nidulans
tagaagtgaccattgcggcgacgccactgtgtgcaggctagatgatggtgttgtgagagaatgaattaaacggagggatactgaatgagagacgtggtcggaaattggtaagggagtttaccacatgctgtcaggacggcaaggagcgcaaagacactcggttatgagcaggattcaagataaggagagttgctgcttccgagagatcttataaagttgcagaaaagcatgtgctggggcggagagttaacagtgaacacctcgaccgcagccagtagtagttcgcagtaggcgtagcagtgccgacctaggcacgagcgcagtgaggcaggaacggggccgacgaagcagacaccgccccgcagcagaccagtggcaggcaggctggtagacaactgtggctgacctctccttcgtcatcgtcagcgaactctcaacaacgttgccttatcactttaaaccattttctctgatagaaaacctgcgatatcaaccctcgaacacctcgctctatcttagctagtttcgttaccctattctatcaggcgctgatcgacccttccaacctccctcatcgtcgccctagatattcgaaccatcggagagctcattgtccaaccgtccccatcatggcatccagagccgcagcaggcgcccgtccaggtgctaggttcgctcagttcaagctcgttctcctcggtaagctcgtattgcctgttctcttgtttatctgtttacatgatatatggcaaaaatgctaacctcatattgctactttcaggagaatctgccgtaggaaaggttaatccaacttctagttctggtcgttctgtcggtcgctgacttacttcattatagagctcattagtcctgagatttgttaaggggcgctccatgactatttccctctatctgtcgctcactcgttgtaggaccaattcgacgactatcgagaatcaacaatcggtgccgcattcctgacacaaaccatttcgctggatgaaagtacaacagtgaaatttgagatctgggataccgccgggcaagaaagatacaagtccttgctcccatgtactaccggaatgcgaactgtgctgtcgttgtatatgatatcactcaagctgtatgccttcggacatgatctcctatcgctcaagatacttgctaatactcgggaatccacaatagtcatcgctagacaaagccaaatcatgggtcaaggaattacaacgccaggcaaacgaaaatattgtcatcgccctcgcaggcaacaagcttgatcttgttaccgagaaccccgacaagagggctatccccactgctgatgctgaagcatatgcgcgcgaagccggtcttcttttcttcgagacttccgctaaaacgtcttcaaatgtgcgcgaactcttcacagccatcgcaaagaagcttccacttgatcaagctggaccccgaaacatgcgaacagcacctcgccctggtgtagatctccgaccggaagcaccgggaacccaaagtggcggagcgtgtaattgttagagcctattcgatccgtccgtttctgtatctcttgtccgcggatttcctcgttgtccatctttccttcgctctttagacaaggaaggcgcacgcctcctatagtgactgttcgccttcgttatgagcatgaagtcgcttgcgccgatccattgcgatgatacatgtttaaagcggtttggagctgggttaatctgctcgcgttggccactcccgtcatactgcgcttttctaataccccggttcccatgatccggtatctcggtctctttgttactggaacaaggcatctgatgtcggtcattgcgtgtaaacattcagtgctgtgcaatgatccattggattcgaccgttggccagtaactcaggcagtttgagtgctgtttcattgtgctttttccgtctgttttttttttttcccgttccatctgctatcggcgtctgtatccttcctcgattgggtccaatctatgctatttttctaacaccgtcgagtactctttagtttcagtgtgtgatgaccatataatatctgctgaatctttaggtttgacttgtcttttgcgtaacagttttgcgtcatatgaaacgcttgctacggcatgcgaggcacgcaaagcatcattaggatagttttactaaatgggcttttttcacctattgaaataggatatggcgctaaataaacccttgtgtttaagatataaacgccccgactgccccaaaaacgtactcatgccttggtcgtgcagctcagccactgccgatggcggtgcaaaatcggagcggaccgcaaaaggtaaagcaccgtgaggtcccgatccgccgttttctccctctcaatatcatcattccgttaaacgactcttcacctagtctttaccccaacagttgtgcggctcaacatgctgcgttcatctgttctacagggccggcatatactgtcgtcttcggctcgcccacggccagcacctcaatggcttgcgagagctggagcaagtagccgcctcgccggtcaggtatggtgacgaaacactccgcttagttttcatattttgctgacggttgctaaattatgtgcagagattcttcgctgatgcaaaatctcctactcctgttacaccttcatccgccactccagttcccgcagagaccgccgcgaaatcgaccgcaggtacgaatacatcgcctgccgcaacccggcaagggaacaataacattagatactaagataagatgcaggccccagtgctactgagacacccactccagcgccaacccgcaagactggccgctttcgaaagtttctgatctacctcatccttacatccgggttggcatacggtggtggtgtcttcttggctctcaaatccgataacttccacgacttcttcacggaatatgtcccatacggcgaagaatccgtgctctactttgaagaacgagatttttaccgtcgattcccgaacacgctcagaaataagaaccgtctttctcccgcatctcgggatgagggcagtcgggttactatcccaagcaagagcgggctttcttctaaggaagttgaagaaactggaactgatgtgtcccaacctggcccacacatgagtgctgttactccagccaaggccgatgaggcgactatcaagcctgcggctgcaaagcccgaggagaagactgctgcagttaaagaggcgaagaagcaagcgcaagaacctgagaaacctagggaagagcccaagcaagagcccaaactgcctggatcagcccccatcacaacccttgaattcgccaatgttagcgaaggagacgagccgattgttcaggagctggtcaaacattcaacgacataatcaccgtcattagcgctgacgagggactcgctaagtactccaagcccagtgctaag

SEQ ID NO: 4115 - DNA, 3844 bp, Emericella nidulans
ttcttgtaaggaatggatgttggtagaggacattgtcctgtaggagttatgcagagcaagcgattgattgaggctgggattgcactgtacagtaactagaagcaatcgaacgagttgcaattttctttgtcaaacctatttttgcaaggtataaaatgaggcctcagaacgatcctgccaacggttcccctcccactatcttcgtcaacatcctgcccttttcgaagaaacatactaccaccacgatattctcgaatcacccccacagagcggtttggttcggttcaccgagtctgagaggaggtcgcctggcggaagtccttccgctttaggaaagtactatggtctcacttatacgcatacatatgagaagatattgacttctcaaagacaagaatctacttcatttgtaaattttaggactgtgcatgatcaattgatgccatgcagcaagtgtaagcgcgaattgatatgttcccattgggtaggaacgcaaacaaggaaatctccgtaaccaaaatacccaaccgtgaccgtcgataaaatacatactttttttctgaggtcccccacccgctactcccatgcgctcagctcttcgtgtcttccctcgcttctccgcctcaacttcatctttccttctgtctctccgttccagtgctttactgcgtcctgtcattctctcttattccccttattccctccggtctttcaacttcatcacaatgagcgagatcactcaccccactatcaagggtatgtatatttctcccactgcccgtactctaccccgccctcaacgtaaatccaaaccatcactctcattgcaccgtttcaggacgatctgaagtatccagactttgctttttagtacttcgggtaacatgtatccttactaaccccaatctaatccagatggctggatctccgagcagactgaaatgtggcctggtcaggccatgaacctcacagtcaaccaaatcctccaccacgagaagtccaagtatcaggacgttcttgtcttcgagagcagcgactatggcaccgttcttgttctggacaacgtcatccaatgcaccgagcgtgatgagttctcgtatgccgtacccctcttcccctcccctcgttaaaacaaacacctctcatgcgacgaagagactgacttggtttttttctttccagctaccaggaaatgattacccacctggccatgaactcccaccccaaccccaagaaggtcctcgttatcggaggtggagatggcggtgtcctccgcgaggtagtcaagcacgagaccgtcgaggaggccatcttgtgcgacattgatgaggtaacaaaatctgctttttcctgccttaccttgccaattacctacatatgcaactgccgctgcatgcaatttagtcgccaaaaggctgacgggcttcatcattgcaggccgtcatccgtgtctccaagaagtaccttcccggcatgagcatcggctgccagcaccccaacgtcaaggtccacgtcggcgacggctttgagttcctcaagcagcgccagaacgaatttgatgtcatcattaccgatagctctgaccccgagggtcccgccgagagcctcttccagaagccctactttgagctcctcagagacgctctacgtgatggaggtgtcatcaccacccaaggttgttcgtcgcctttctttttatattctgcctccatctgctttttctctataccttgacttctcgtttttttcttgttgtcttgtactctcccagccttcccatagccctagcccgcactttttctccccttattctctctcttccatttttccttatacgatatttttgatataagggttcccgggctaaccaagtctcgacccaaaccacccgatcccgggatcggtttgggtttcacgttttctccgttacagccgaaaaccaatggcttcaccttcctctgattgccgacctcaagaaggcctgcaacgaggtcttccctgtcgccgaatacgcgtacaccacaatccctacgtacccatccggtcaaattggtttcatggtttgttgcaaggatgccaaccgcaatgttaaggagcccgtccgcacctggtctcgtgaagaggaggagcgtctctgccgctactacaaccaggatatccaccgcgccagcttcgtgctgcccaactttgctcgcaaggctttgggaaattagattcagatgagatgagcatatctttgtttttgtttaaaagaataccatatcaactgaatttctcctgtgattatctatttcactatacttttatactccgtgtcctatattatgagaggattgaggatttaggacccaaactaggtgatctgataacgggatataaaccaacacccaaaggtcaaactacgtcagttactcactcctggatgcgcataagctttcagccagaagtattcaagaccgagagcaaatatgaacagatagatggtattcttttcgcagatgtctaaaaatatcagagatggccagaccttgaaataagttcaatggtggcttttattcttctcaaaaggaaattcgtaggacattaaaccaagtgtgccacgcattcggagtttctctccgtatggccaccccataacccatgtaatactcgttagcaaggaaagatgtcgaaggaaaatgcaagcgagtcatgacgctagaacgagacgtctacaggatctgctggaaagcgcggttgatgggcgaccgaacgggaacacccttatagaagtcaatggtggcaagggcgcgcttgctaataccctcaggagtgaactcgaacttggcgtagacctccttgtagggaccagaggcaccgaagcggttcagaccgaactgctcgtgagagtagcgctcccaacccatggtggagcagacctcgacagacaaaatggggatgccgtcggggaggaccttgagtctgtactccttgtcctgagcatcgaagacctcgaagcaaggaatagagacgacacgggccacgacgccgtgcttttcctgcaggtacttggcagcgtcgatacagatactgacttcggatccagtggagatgatggtaaccttggcgtcagcagcctcgaagacagggtaagcacccttgagagcagcctcaatgcttgagttctcaagctggggcaggttctgacgggtaagagccaggatggagggagtgtgcttagcagtcagggcagaatagtaagcagcactggtctcgttaccatcagcagggcgccagaccatgcagttgggaagagcacggaaatgagcgagagtctcgataggctggtgggtagggccgtcctcacccagaccaatggagtcgtgggtagcgacgtgaatggcacgaacgcgagagagggcggacagacggacagcaccagcagcgtaggaaacgaagttcaggaaagtaccggcggcagggatgacggtaccgtatgcagcaagaccgttcatgatagcagccatggcgtgctcacggacaccgtaacggaggtagcggccagaccactcaccaatgccgtactcgggtggctggaagtcaacagcgttcttccagcgggtgttgttggagccagtcagatcggcggaaccagacaaaagttctgggatgaccgagtggatcttctcaaggacagcctcagacagcttgcgggaggcaatagcggggtcagaaggcttgtaaacaggaagcgacttctcccatccctcaggaagcttgccggagagacggcgggtaaggtcggcgtgctcgttggggtattctcggcgttttttgaggagctgttcattcctgttctgggcac

SEQ ID NO: 4116 - DNA, 4171 bp, Emericella nidulans
gggccgcgcatcctcaacagcgaactcctatcccctacgctaactagaaaatggctaaaaccaagggctcacactgctgatccggccttctcagtcggtgccccgtgggaaatatttactctgagcgagccgcgaatgatcgacctctacacgaaatctggagacctcggtagctactcgtcaatgatgggcctctctcctgaacacgatgtcgggttcacggtcctggccgccggacaggggacacacaacgccgtatgggcgctaggcgaccttatttcgacgactgtaatcgctgctcttgacgcggccggcaaggaggaagcacacccccgatttgcgggaacatatacctcaggggacgacgccttaacgatcataaccgacgatggtcccggtctaaaggttacagaatggcgaagtaacgggaaggatctgatgaaatcaatgaatatgttgcaatggggaggcccgtacgaggatatcgatgtccggctgtatccaactggactgaggagcccagctcaatgtggacggagctctgagaacttggtctcgttccgcagtgtcgtttcccatccaatcccagttggagcagggcctatgacaaggacttgcctaacgtggttgacggttgacggacaggtttacggctcggttgggatagacgagtttgtgtttcacgttggtgagaatggcaaagccgttcgagtgtcgccgcggggtttacggacatctttggacagggtcaggcaatgaggtcgatactattagaatcctgatcggcgccgtcaaaatagatatcattataactctctacactgagagaaaactaaacgatagtccggcatcaactgccattatctctacatgacaaaaatggaaaacaatctgtttgaacagctgatccgatttacgtacgagaatgcatagtaaaatagaaatcaactcaaggatatctcgcctacattaggtcagcgaagccaacgccagtgtgcattcagcacttgcgatcaagtaggaaatgctcaggagatgactgatccttaatcgacctcgaaatacagtctgccttcgaagagctggtgcggtcgctgaagtagaagagctggttctattttaagatttgtggctgcataggttcgaagtggcgatctacaatgctagtactgggccccgtagacatgatcaatgcagactcgataaacaaagctcagaaagcaaacaagcaacttgcacaagcacctcatgcagtggctatctcttagttaactgagtaaacgtgcacgctcacccaattggcgtatctactttgccgttgctagtaggatacgttggcatccaccctcgtcacccatattatataaggggagtcttcacaataagctcgacgaataacacacgggtcaatttgtctccgtataaggtttctccatgacacaggtatgcaggagtcatgctgcgctctggctggggtcaatgtgagctggtaagacttctcctgtcgagaacatcgatatcgaggtttccctctcgccaaatatgttctatccagccaattgacgagaaagaacgtggcctgtagtcacatggcttagttattagtcggagcatactgccctctgcaggggcttagctcggcgtagttgaggatttaggcatcgtggctcagaaatgaccatgggtctctgacactgcctgcccccataccggccaaccaacaagggtcaacatccatgttttccacattttctgagtcggggcatcaacgaccagcccagctggtgcaggctaacttatgcatcccaggaaccttgtagtatctcaccttcttctcattcctcccttcattcatcaatccacttccatctctggagctctttccgtaaaaccagccagcagcccttacctttgcagattaccagcccacaatgccgctactcaggccaatctactataccattgtcctcctcggtgtcctcgtcgacgcctatacaggctggtacgacttcaacccagactacgatttagactcatcagcccaatcttctgtcctttcttatatacatgataaaatccccattatcgtctgagatccaagagtcctcactatcattctcgcaagaccaaaaaaagactgtttcatcctcttggcacatcccacggcgtcaaatatgtctgctaggccgccgacgccaaccgactgaccaggtcgcgacgggatctggttggtgacgcggtggctaaatattttgatacacatacgactgggtaaattggtgcgtttatagaggaacggattagttcactagggtcaatgccgaatcctcgaccctgggaaccgggacggtgtgtctgaagcttgacgataaatggggcccagagaaccgatggggcctgctggagggatatctaaaccggggccgcaggatcactttgacgaggacgttcattgcgggacgacgtttatgttgactatcgtgcagccacaattcacgtatgcgccggcagtaaagcagcagaagggaggtggaaacaaaaaggctgcgaacggaagaccgcgagctttgagggcaagtaagctgaagctgaagtctgacttccttttcaccaacaagccaactgccgcacacatattagactgggacacctagttagaagctggtcaatacaaatcatgttctgtcaatcgcttaccctcctccagagactgcttctcccctaaaacacacacacacacacacacacgcacacaacgtgcgcgcgactgtccctagtgcgtccacgcgtcatgtcatagcgtctcaatggcggtactattctgcggattacagggatagaatattataagcatatacaaggacaatctagggattttgaggacatcagtctgattcagtaaaaagctgtaaagcgatcagtacatcataaaacaaattcaatcatcaatcttcaaactcctccccgtatatcccgccatgagctttcctcatatggtcgtagataccatttgcgacctccttcccacagaaataacaccagtcgatgccgcagccctccaccgggcaagtaatatgtccacacccggatatcttctctgtcattgtcccacacttgggacacggcttgatcttgctaatgcgggtagcgtcagcatcttcatcggcatcgacgctctgcagctccgctagacagctctcgcactgccagtcctgaagttctggcggcatgccgcgggcgcagtctcgagccatgaattcctgtgcagtagaacagaccgaacaccatgcgtagatccacattccttgattctcgatcgcccgattcaggtctttaaccgcgtggatccctctaccatatttagtcaaggtggttggaaccgggaggcgccgacagaacgggcatacaagggcagcggtgtttataatcgaccctgatgcgttgcctccataccaggacgccatgcaggtggtgcagatgcgctgaagacatccacggcgaccgcaagctgggaccagggcggacggccagaatgacgagaaacagagagtgcagtccacctttttcgcctccccactggcaacaagctccttgagggtcgttattagctcattggtatttagaattacttttcctcgctgtgttagcgggacctcgcgatgaggaaatattgtgatgcggctcatgaactcatcggttcccatcgttgataccgtgtgatacactgaccggttggtgaacggagattcatcaggcctcttcgagtcttttgccagccatgacgtgccgttctcaattgaaagggcttttgccgatactaataactcaatggttgtcttccgcccagactcacacgcgggacagacgaacaacgacgcgtcaaatgattctggttggtattcttctggccagatcatgcggctggtacatatgctgcactcaaccaagggtgctacaagactcttgtccccggccttctgcacggccaaccgtcggcagtagtgacatttcggacgaacccgaagcgcttcgacgttgtagacagtatactgagccctgcatgaaggtacattgcattcaacccacgtggcatctgacgtcgaggttgtgccatgcgaggctcctattttgataccagccttgtctggcttccggataatcctgccctaac

SEQ ID NO: 4117 - DNA, 1258 bp, Emericella nidulans
atgcgccacaatatataaaagcactggtcaacctttggtgaaagcaacctggaaggctatgaaattatttgtcgttggcctgttccccgaaatttttgttgtttatgattatgacaagtccaggtgcggagaacgcttccatttggagcagtcggattttctattcgccgagattatgttcactcttgttcatccactactaccacgaatgttctatctacaccaatatcgctcggtattgtggccgcctttcctgactaatttagctccgattgcatctcatataaggatccaagagctgagctatctagaattggcgggaaacattaccatgcccgcttttccatccaaaacataccgacgggcaaccactgcctcctctacgctaggggaaaagcttggtgaggcatatcgggctagacttccacgacatccatttctgctattcggactaccattcatcatggtcattgtggctggttcctttgttttgaccccggcgactgctttgaggtacgagaggtacgaccgcaaagtgaaacaattaagccaagaggaagcgatggatctcggtctcaaaggacctgatggagaggaaggaatcaaaaggaatccacgcaggaggatcattggcgatgatcgggaagagtactatgtgcgtggcccagtctataccggtcatattcatacgtcgttatgaccttcaactactaacttgttttcccacagaggctcatggcgaaagacctcgacagttgggaacaaaaacgtgtccagcggtttaagggtgagccagatggaagactatgagatatggacgagagccgagtcagcgaatttatgttcagcgccaaagccatgagcagtttattggcgctctcagaattagccgcctggcttgctatcacgtatattgctgccgctggtcaggtctgggcttcggcactgttggacctcgcacgttaccgcctacacggatatcgagaaaacttcgggtacacccggcgtgtgatcttgtgtttgtgtctactcattatatggagtagcgaggcatctcaaacctggggctgcacctaacatgacataagctagccaacatactcgtggtatgtcaaggattcgcgttaccgcgtaaggagtgctgtttagaaatgactagcgagtcaatgacgatctcgactcctaagatgcatcaatttcattcagctcatttttttgaatgctagaatataacgatcgtcacggactggtgctgagc

SEQ ID NO: 4118 - DNA, 2040 bp, Emericella nidulans
ttattcgctacttgagcaggagggggaaatagcgccccattgcaaaaggttcgcctaggaacatttattgaatataggctacagaccaagcttaacgctcataaacacctctaagagcttgggataaattggcgtcccaagcccagtaaccgggtcccagccctcaagcgctgtaaacccgtccgtactgcaacccgggttattgccctctgttatatcgcgaaaggcctcgggatgcgcatagagcatcggattgacaaacccaaccgtcggcattccagccgcaagtcgctcctcgttgattcgggtgagtatggcagcgaaaatcggcgcagacgccgaggtccctccaccaagaattggaccccctctccagaagacgaaattgttcaccgcaaccgcagaaatgtctggatacgcacggcctatgcggttgtagatgccgtcatttgccgcaaagctatcgttgttgatgctttcatagtacgggtaatttaggttcgcgcgggaaaagtactcttcaaccgcggatgcttgatacattggtcgttcgtagatgttgctgaatcccccaccggatgaccaatttcctggcgtggtgctggggtcaacagcgacttctagaggattgtacgggtcgcccccgggaagaaggtaagtaccgccaacggtcgtgatgtacgggcagatgaggtaaccgggagtgaaaacgcttctgtctttgccgagacacccgccagtcgccacgccgttgtttccagacgcagccacaacagaaactccttgaaggcccagcttcatccattcgtagcattggcggcggttgtatcgaataggaagttcgaattctgcgaaaccgtatgagatggaaatgacgttggtgggtttgtacacgccgcattgtttctggcccttgtagcctccaggggcggggttaggatatggggggtcaagctcctcctcagatgggtcacagtatgagccgtcgatggcgtcaaggaagttattgaagatgcctggaaatttggggttattgatgtccgcccaaataggatcgtccgtctgaaagataatgggattctgaggccagataatcgggtatgacattgccaagtcaagcgtagactcaggtccggcattatccagcgtcgtgggagccgtgcctccattgatactatgcacaatcggctgagtgccgtttgggatgtggcttccaaaatcagtgctgctgtgtgactgtaggactagagacgtacctggcaaatgctgaaaataacaggtcgaggtcaccttggctatacatgtcaccaaacgcataaatcccgagctcgttgccaggaattgcgctggtgccctcggaaatgttgtacagagctgtcctgttagctgggacttgctacaagaagacagggcataccacggcataccacggatgcaggctggcgttatgatttggtcgcaaaaaccaagcgcatcattcgttacttgcgatagtgtgagattcgtcccatcaattatgggggacgaagcatctgcggtatcacgcctagtcaagcttcgctccgtgggtaaaatgggtaaaggtccggcgatctccaggaatttaacgcctggcgtaatatagtcgatatgtttctggagagcttccgggacgtggtatctgttagagtaagcaggggacaggcttggtagacaacactaggacatactcccggcaagcgatgtgagaccgacgggtttctgcgtgtgagtacagataatattcagtctgcaaaagccgctctagttcctgcgcggttgcatcgaatcgcaaccactgtttgttcgcagactgcgagatacgagtgtcggaaatgccctctgattccagccatgcgcgtactcgttcgacggtctcctcggccggggcgaacaggtcatgaacctcttttgctgagagatactttccatactctggcgatgaggggtccgagctgcgagatcagagatgccggtttatagattcgcatggagacttacattagcatcaacaagtcatga

SEQ ID NO: 4119 - DNA, 3053 bp, Emericella nidulans
acaccacgacgtcgaggacaacaaagacatgagccacctccctggataggaccacaattctaccgatacgggcgcgaatcctaaacctgcagttgccaagatgctcggctgccatttcccagttccaagttgacccacacacagccacattgtgcggctgctgaaaatctgatcgcgctcggttgccttggggagctgtgcaggagcgaagctcccgagtggccttggacgccaaggctattcatctccctcatctccttcatctcattagaagtattgtccagggttagtcgctatcgtcagagcaggggtcgccgagagactccggcaaaagagaaaagcacgtagtcccatccggacaggctatgaacgaagcatccaccgcgaaatggttgggaaatttagccgcacatgcgttcgcctgagcgtgatttcatgatgaggttgtatccagcgttacttgtctgaattgccagcacctctattgatgttttagcttgcggcctgggcttcaggaagtaatgagcatcgatttggagaccaacatcacagctacaaccacaaagaccggcgcggcctgatgacctattggaaggagtcctgaacaatgtgaagatatcgaagatgtacccttattcacttggcagtaatttgacattcttcgatttatatctttggcatagccactccccattagctatacttggcagtttatagtatcattaactagggctagagaaattggcttccattcttcacaaatgatagggaaatatcctcttggcactttgtctaccaactctcatattgcagcaagggtcatgtgacatgaacatcctgtgttgtgaactcctacaaacttctcaacgcaatataaccatcttgatccctcgagagcaactgaagcactccccacatcctcccggctggccaactacggcgcaacatgttggatgaaacatgaaaagcacggcaaatgcgagccgagtagcctccaaatgataaatatattccctgacacaggtgcaagcatacgaagtatggggctatatattggatcctgacgaaccctggcagccggatccacaccgactcgacataaggaagaaaactgtaccatgcggcattgcgaggaacttgagagctgcccttcgaaatggagcaagatcaacgaggaacgtcgactgaacggaaacgcgcttcacactctttctatagaaaggcatgtcaaggtcgtacgggtacttttgaaggaggcggaggtgttaacaccaagggtggtcgctatggcgatacgttgggagcagcctgcttcggtgaatatgtgggggtcgtaagaatcttgttcgctgccggcgccctgagggattcatatgatccattcatgctcttcgtgttgcccgtcaagtaggcaatggcgcgattgagcggtaactgctttcccaatatcgaaacttctgaagcggtagggaatgcagacctacctcatgtcggagtcatcgattgtcaacagaagtatttatccgaagcaccaggccaaaacacggatggagaagactttcgtggaatttcgtgaaccctaccaaacaggctggtcaatggtgaccctcattttctgctaacggccgttgcttaatcttaatgaagccgtcttatctgcccttctcctcctgagccctgcctgaatagtcaggccgagcttgttatacttggcaattgacatgttgaagcagtaagtcaggcccattttgtgcggacaggacgcaaggaaatgaacaggctctctggtaagtgatcgaacattacgagctcctatattgacaaggacaatgactgatgtttctatgcacggaggcactgttatacctattcgtgggcagaggcggaacatgtctctatgtaagatgtgccaaatgtaatgacaccgatgcacaccggatggactagtatgccacagccttcgtttcaaacatggcgatgctccagatatatcacttatggtaggtcatggtactccaacgaacaagtatgccggcgctgaaggcaaacacccatcaccagactttatacattacttccgtacccggcaaatttagaacttagtcggggtccggcaattcctgttccaccggtttggatcaggtctttgggttttgtgagcatttgaagtacccgtactaacctcaccactaaccacacaaatgagtctcagaacgtcacctaagcatgtggacactttatatattagatcagatgtggatttgctagtagttactgcctcgggcctggaaggctccctgtcgacctcaggtaccgagccaggacggatagctaaatgtgttattgtaggtaatctaccttatccaaatcgttcgcagggtaaattcctcgcttacatggacaccgtaatccttcttttgtcaatgttttagcttcttacgaaatttgaactcgccaaggttctgccacaggtattgcatggagtttcaaacgtctttctatcgccgtcactcatccaccgtctgtatcgccgcttgaaaccatgtctgctgttggtcggcacacaggattattgcatgtcgttcaaaatgtagcaacgggattatttttttttatctttgaccagcactcggaagggatctagtgaaactttagcttgaatgccttgttcgggccagacaagcacaaaccttgagtccctctcccagaccaatatacttgggaagcgaatcattctggaatatcagcggatattgttgggtatcgacaccaacgagaatcttccgggactatagccagcctaacctggattgagacaccggattttggcagcaaggggaggagatttgctccaggccatcccattgacagcctccctccagttctcaggtttgcctgaagcgggactgcgataacatacaactacgcaggatggcaaacatgacggatttccagagttctcaaagactgatttaggtgcctttcaatctttccgagcggagaggtcggagccgagtctctatcgacttgtcggtgttacacgcatgagggag

SEQ ID NO: 4120 - DNA, 2638 bp, Emericella nidulans
gagaaaggatcttctgcgtacgaaaacctcagctccgggtgttttcatcagcacaggcttggtcattgacaacgggcctagggaagacagagtcgggcacttggtagacgttctcatccgcatcgtagattttgacatgaagtctttgatctatccaccgtcagcgtcagaactcaaacaggtagtcgactcactcgtatcatagtcggtttcgagcctcaggttctcgatatcaactccatacacgttgcacggcgtaccagcgagtgtcagatccgctgtcagtccgcgaggtcgttcttcgacgtttatcaccctgtatccaggacagtcggtcaaaggcaattgactgagagctctagccatcagagctagagccaggggagtccatgagaggagagttccggccattgctgcctcagggcctagtcaatccgcgcgtgtgcccccatattgagcgcgcactggctcttatttatacctctcctccctgcagagccaaagtgtcttacatctcgcccaattttccgttgtttgcacatagccatttctgtcacggacatctaaggttcggaggtttaggtacgattgggcacacgaggtttaggtgagcggaattgttgttaagcacctttcgttctcaagtcgccagtacctttcggaggtgagctacgttgacgtagtacctgggatatatctccggtgatccggcgcgtatcacggtagtcggagcagccaagttcgtgatcgattggttgtgcttgtcggatggtgtttgttggaaggagaatgtgttgcagcgagaattttagcgaagggaagccgtcccgcttacacactctacaggcgccacgccacgttgatttgagaagtacatcacacagaaagatactttcaggagaaggaacggttcaagccaacaaagtggacagtatagcggacaaccagacaatgagtctttctagagatacgccgatgccggtcctctgtgttgtcatctagtcatgtttcgaatgcaacgaacgacatcccccgagttactgcggtatatgaggcatatgagctcccagagcgagaatatcggcggggaagtcgtatgaaatcccctcgtatctaccagactcatctccgtcggccggaaagattgatacaacttcaacgccaaactccgggaagacggcagagagatccccatctcttttgcccaactgcagtatgaatcctctcttgtcttcagaccaatggtccacggtcttcagatgtggagctaagtcattcgcttcagatatctcatccgaaggtggcccttcagactcttggtcgtcgctttccgacaaagcttcccttggggctggggtaaattcaatctgcgccatgcggtggtgtagtttatccaatctctcagaccgtcctccagcaacaacgtccagtaagcgttccaattccacgattgcgtggcgaggtccccagttggagccgtcatatatcttagataaggatgggacgtataccaggacatctattaacgagtttgccagttgagatagtttgatttcctacgttccccgtcagtactgctcgcaggatacgagttgggaaacgtaccatgccatagccatgtggacgaactgagtcgagcgacgcaccgcataccagtgagagaaagtttctcgcaacaatgaatggataactcggggagaagaaaacgttcgacgaatcggatgtgagcataaaatgggacgccgaatattgccaaagcagggagctcaaccaggccaaggtgatccagatgtccacgcgttgtacttcatcaatgatcgggtccctggtcgctccggtctggagagatgcttggatatctgtgatcttgtctctggagtatgtcggacacgtggataagtgtggtgcttggagcagtggcccgtcgattcgcgtgaagagccggaccaagttgcaaaacccattgagaaacgctggatcagtgtcaccgtcatcaaccggaattggtaagtcgcctattgtttgtagcgtgattgggaggtcatgctgcatgcagaaagtactacgagacttagctcggtcgcacgaatgaagacaaagttcttaccgttctgtgactagcaagatccagtaaatgcgaagcctcaactgttgctggtcctgtgaatccttgaatagctctacattccccaggctgagaagatgggcgtgggtaatggcgtcacgtagagcgaacgtggcaagcgggatttgatctatgttggcgtagtacatatgcaggaacagcgacgtcagaagagaatccaaactggcactgctttgagcatcataatcggctcgaagccgaatgcactcgcggacaaagtcgcccgaggtgacgagaaacggttcctgcgcctgactatgaccgggcagacgcagctgggcgagcgttgccgcgcacagcgcggctgccagggcgtgggcttgtgtattcttaatatcgtttagtttcgccttcaatgcattggttgagacgattggccacacagtgtagagctggctccggaagatgtcaatgtaggtgtagtaagtggacagagaaatccgccgtcggacaagcaggggatcgtcgctggaggcggaagaggtaggcgag

SEQ ID NO: 4121 - DNA, 2796 bp, Emericella nidulans
tccttgtacaaatgacgagctggacaatgctccccatgctgccacattgtgacatccggggttgggctttctactcgtatagcaggcccagaccgacaagactagtggcgttaagctctgaccaagatagactcattgtataataaccgacaaactgccgaggatgttctcaactgtgggacgctcaagctatgctatcgttcgatgctagctctgcctaacgagacgtctaaaaccacgtccggctgatgtggctaccagaaaaaaacaagacgttgccaagggtttcccctcatgcctccagccagcggacgctttgatttgccagtctcgagcgagaggcggttgtcaatgagacatcagagatgcagctagccaggctgcatatcctccccgtgctacggatataaaggttaccgtgccaccacgccgtggtcccaaataggtgacttttcagatccaatctgaaaatcaatttcaattccattcgcaatcgttaacatggtgaacgatattgaaaagacatccggcgggcagatctcgaccgagaatgtcgagcacattgagagttccgccgatgtaaagcgcatggtggatatcgacgatgacgaggaattcacgtacggagagcagaggaagatcatccatcgagtagaccgccggctggtcaccatcaccggcgctgcctactgcatcagcttaatggatcgcacgaacgtgtcaatagccgcgatcgctgggtaacgttgtccgtgctcgtctgctggtctctctaacacacggtcgcccaccaggatgatggaggacctcgagctgtacattggttttcgatacgtttgtggccccgacccattctggctcagccggctctgacagatacgtacaacagtcaactatggttctggtgttcttcgtcacctatatcgtctgtcagcccattgccaccgctatgatccgcaagattgggccccggatattcatctcggtcattgtaatgagctggggagcctgcttgatcgtatgtttcggatattccctggtctaaagatctgcgcttaccgtcgcttactcagggatttgcgtattcccccaactggcagaccctgactggcttgcgcgcggtcttggggatcctggaggcgggcttcttccctggggcagtgtatctgctgtcttgctggtactcgcgatgttcgtctactgaccctgactattgtatgaatgcgcgagctgccactaaccatttatgctgtagatgaggtccagaagcggtactcattcttctatctgatcggctgttttgatccgcgctatcaggtatcctcgcatatggtttcagccagatggcacctctcgaaagcctcagtgggtggcagtggattttcatcatgcagggagtggtaaacagacccttccgagggaccaaagttcaatagcaatgctgacattcccagttgacgttcattgtcgggatcctctgcatgatcttcgtggtcgacttccccgataagggttacaacacttggggcttccttacgcagcgagaatgcgcattcatcctccgtcgactcgatcgagatcgatcagacgccaaccccgagccgttcaacctcgtcaaatttcttcgccccgcattggacctcaagatctggggatttgcgtttatcttcttgtgtgtcacccccagacgactatctctcctcggactaacagtttaatctagctccatcacaacggtcacgtacggaatcgcatacttccttcctattatcctccgcgacaatatgggcttcaacgtggccgaagcgcagtgtctaaccgcgccgccgtacgcactcgccggtatccttatggtgagcacatcgtgggtcgcagacagataccgcatgcgagccccgatccttgtcttcaacagcgttctcgccctgatcgggctgccgatcatgggctttgccaaaagcgcggccgtccgctatttcggtgtgttcttgaccaccgcgggagcaaatgccaatatcccggccagcatggcgtaccaggcaaacaacatccgcgggcagtggacacgggcttttgccagcgccacgctcgttgcgtttggaggaattggagggattgcagggagcttggtgttccggtcacaggatgctcctgaatatattccaggtatctgggctgttattgcgtgagtactaatatcttgcttatgggtaatactttactgaccgagactagatgccagctgtgcctgcttatcgtcgtgggggctttgagtctttacttctggatctgtaatcggaaagcagaccggggagagaagatcattgagggatcgccggacttccggtatactctttagcattgtggctgataacttccagccactagctaggcagtagccaatctgaatgatttgccctaaatctaaagcttgctggggagagtgcgctaggggaattctcgaatgtccgaatagggaaggagtggacgcctgctattgagttattagtaagcttaattagtcagggctgatgtatcccggtcggtccgccatcccaacccaattaatccgcccacctcagagatatactacacaactctggaacaatctccgtcatcgacaactgcaaaaataaatcaacgtaactatcagcaacatgacagctaagtcagatataatgcataggacatgtattggagcttgctttggttgttgcaaaggttcgtagcattttagaccacgcctgcttagttgttttttttgctgaatcatgtctcctgcctcttatatttgag

SEQ ID NO: 4122 - DNA, 3700 bp, Emericella nidulans
gatttacttaaaggccatgcctcgacaatctctacatataatcatggctactgctgtacgagccagtccagcaatgcaggccctagcagactaggttagaggtaggcaggttgaaggcccatgacttttaccgccacgcatcagagagtagggccacaaaaatggtagaggttttgagtggtattagggtagcgtaggccctattcgatgcctacaccgacgtatctctgggcctccccatgcctaggttcttatatccccttcatatgtctagacttctggtatacatagacgttgatatctgaattcagacacgcattatctatccagtgcagatcatcatctggttgagtctcatactcaaatctaaccagcttgtggagcagtcaagcttcactctaaggatcaaaggcccatttattatgctaaaaagaactctcacaaggtataaacaagtacattacacagacagtagctgacagagaagtcgttgcttggactggtcttgatcactatctcaagtaagggttaatttcctgcgctagcttacaccgagtagcgcctcccacaatagtcccatggggaaacctcagcatgattcagtagctcagacttcttgttacaatggcttcccatcacggaatgtacaagttacccctttggacggccaggaagggttgacatgttttcatataaagtgtcttgtgagtgagccaggtgtcaagtgctttaaagagcggtgctcgtggatttttgctcaatagggttggatactagttatgagttatgagtacttaatagcaaagtcgcagcttcccgtcaccgtctgttatgattgttctcaatctaccagttaaccggtgctactataactctagatacactcattatgtgatactagcaaactgtaatcctagtctcttggctgcccaacctaagcaaggcaaccatggagtccaccacatgctctacatccatcttttcagtctcaaacaactgtagcttcggtgcattcgacttgaacataaccgccagagcccagtacacctccgcatacgccaggctgcgttttgttctgggcgttagcgtgcggaaaattcaagaactcgaacggatctgggtagacctcagggtcagtgtgcaggctgtatgcagccatgcccacgggggttcaggcgggatggtccattgtttgtagtgcagggccgcgtctggaaagcgcgggggagacggcgcatagtgccgtagctgagtctattccagtttagactgccgttacttgactgcacagtttgagtcgaaagtaggcagggaacgtacctcagcccttcttgaacaagggcgtgcagataaggcagtctctcgagctgttgccaagtaggcatactagtaggatactgggccatgacaccctccagctccccggctcgccggtctcttatatggctatcacgtagaatataatagcagataaggctgagcgtgctcgtgactgtgacagtgcctgcaccaaacagcaccatggtctcgctggcgaggcgctcagcgtcaagttcagactcaggcagcccgccagcgctggaaggggaaaggagttggcggaaaagagaattcttggtttcttgttggacctttctagcgtcaagactgaggctctatctctttgcgtcgttgatgtgtcttgtagcaagctggtttaattattgacatgttaggatggctttttggaacgtcatagagaaggagatgtacctcgtgcgcgagtctgtacgaggccagtaccgggaatatgcggaggagtgtgatgggtatcagttgagcaaggctggtttatcctgttcttagtcgttgtaatgctcagggctatagggtcacaaacaatatcggaatagggaaatgcatgaggagaggaagtcggtggattcctgccaggaggagttgattcctagacacttgctagccatcgcattccgctagggcatgctgcagacagaccagtcttttccaaactccggcttgttcatcatcaccggtcctgcctccgagcagatatgagtgatcatgtcaaccgcaaaggcagagaagacatcggcaagtcggaggacgcgccctgatccgctgtagctctgcagccggtggttgagcaatttggcttctttgacgatcagcggctcgagccggtcaatctccatacgagagaagaagggatctagaggcttacgacgcagcctgtgcagttcgtggcccacggtcatcacaatcgagcctggcttgttagctgcagttggctttgatacctactccatagaaaaggtaatacttgccatcaacgccgatatttgatggcgcccatttctccgtgcggcgcgtatttccagccacgtatatctggttatagaactctgggtctttaatcacgatctcgtgcgggttgatccggacaatggggcctacgacttagttgatattgacgattgactatgggtaggttcaagacataacgtatttatcatgcatctggttcacctcgtaaacatacttgccctgccggatcacatcatagtagaactcataccatcgcgtcgcagccgcaagcttggggcctggataaccagccagtgggtggaaataaagccggtagatgatgagtgaggcgcagtagaatgtgactcctgcagcaacgacgatgtatacatcattaaccagaaaaggggcgaagttttcagagtcccggtctccgtagtttcactattgttgggagagttatgcactgggatgggggctcagggcgactgtagcccttttatgcagttcaataccattctcatcttgacagaccccttcccgagaacaggagagactagactaacattaagaataagaaggcggcttccacatgaccctaaaacagggatattgcagtcatatcatctgctaggatgtgcattggctctcatgaacgtatgtaatgcctatcttacgctggctactcttctcagcccagcaacgagctgcagggtcggaggtatgcacaaaaagtcagtttgcaaatactcatcagcagtccatcttcctcggtggcacgctgcaagtagcacagacctgacgtgttcgtcattaatttcgtatgtgggtattaccgcacctggcagaggaagtatactttgggtgttatcaggagcacacttgacgggctgtctgtttataacggccttttggattgcgagatagctaggtacgagttaggtatgtatgtagaaacttactgtggttctttttcatggagtgggcattgtgcactaaagatgcattggaaggatggattgaccttggaagtgtgcagataagatagaatcgttaaggtaattggctgcatgccggctcgtttatgtcattttactttcgccgtagacaattcttatgtttggtccatcgtgagtagcatcggcgccggatacgcggatttgctctctttggccaggccagaatacgggctttcagtatgtacttagtatgtgccaagtacgcaaggagacgacttcctgtatttagggcctgtccgcgcaatactattagtagatacaccacggattgtaaattcggtaaaagaagaatcccatatttgagagcatctatgccgataggacaactgaacaagcctatacgctttgacaccaatgcatagacattcctcattcct

SEQ ID NO: 4123 - DNA, 1830 bp, Emericella nidulans
agaaggaaaagagaaaggaagggggggaaagaagaggagatggtgaaggggaagagggaggaaaaggtaatagaggagaaaggagaaagggtagtgaagaaggggggaggtaagaaagaaggaagtgggagagagaaggaaagaagtgggcataggggtgatgagggaggggaagagtagagagtgaggtggaagagggggagaagaggatgggagaaggaaagagagggtaggaagaataaggggaagaaaaaggaggaaaagaagatattaaggaagagatagtaatggattaagaaaagtaagcaagaagcggagaggtagaggtggggaagaaggatgaataggtgggagagggagaaataagtgggagttcaggatagaggaaaacagacggaaaagcaaaagggggatagagcgcggtggagagaacgaggaaaatgcagtaaatctgatggataaaagaaaggtgatttctaagaaaagagtcaattgcaggctcgtgttagtttaagtagggtcatcaaaaattcacccggtctatggcaacggtaccattcatttctaggaataagcaccgccgctctctagaacttgcataagagtctctcgaatagactcctaagggtgaaagtacagcagagcattacttcgtagtgcaaatcactcagaactattcaatgtgatggctaatatgagagtgcaagtactggcaagaagagaggatcactgcatcactataaggcttggaacatggagaattgtcgaatatttccaaacactgtctctctctaccttgaccttgacctactatggagtgtatctatgctagaatgcattctactagtgcattcgcttgtccgtgttgccgtccacagtaacctggtgtacgagtatgccttcactccttccctgttaatccttctttgccgtcctttcctgcatccttccaaccccttatgtgtgagtagacccgaagtaaagataatgagagcgaggactgcatggccaggctgactaccgacaaggattcctctttactttaggaataaatctccgcactaacatcatatcctgtctccttcttctcctgtattctcccccactagctcgtacattcagttatctgtcctcttccttcaattaccatccagaggaaaccatatatatgcaggatgtcacccagtccccatcaaatcctgcctggtgtgaccacaacaccggcaaacctaccgtggcagcccaggtctatcaacggagctaatatgatcagtctactttgtagcaccagcttctcacctgagcattgctagttctcaatcttacaccggcgatttctcgaagccaagagtcctggagaagccagaactcagccaatggttctctctccgttcttttatggaaaccctccctatacttaagtaggctatcccagactccaggaagggacgccaatcttctgcactgagaagaggcctaaaaacagcttcgggatcattttcgtagaaaattactctgggctgtctacattcagtatccagagcacccacccggcagcaccggtgtacgacgccgttgattgcgagctcccaaactattgcactgggtgtgaaaatcattgatgtaggaagggccggatgttctcgtccgggagataccatgcctgaaggaaacctgctctgaagcaagaaaccgggacaatacagattgcttgcgtaggttggacatagcccggtcccattttagccctaaatgggaaactgccactcatcccggctttgtcgatatctacgcgtagcatcacaacagtaatcttgactatctcaatct

SEQ ID NO: 4124 - DNA, 1416 bp, Emericella nidulans
gaagtttaatgaccatgtggactactgtttatcgaagcaaacgatcaaagaggctatcctttattattcgccgcaactgcagccgcaagctcaaccagcaccacacagcacacgaaagcgaaagactgcttctcgagacagcgtagacccgcgacagaaacgtcttttcttcacttaaacgaaaatcttctttttttgctactcaaaaccagccaaggccgctaccacatggcttcgcttgggcaccacgcctatgcttggccgctttgaatgcgcttcagctatgtgaaactctaggtataacagcgaatctgatcccgtaaagtctgtttcaacaacttttctcgtcgaccaaagcgctctatatcaaatatgttacggcgtcacctagaaggacccactgcgggctaactccttacgtctggattctaaccggaggtccagcacatgctatatgagcaaggacggtggaatcgtgattgtatctgacggcctacccatatcatgcaactcaatgtatgcaccttcgtctctcaaggatcaggacagcccatgccagattggcctggtctctcacccaattactgggactctcgttgataagtatcggttattctaccttttttggattccaatggatagacaaactacgttctacttaatgcacggcagcttctatgcgctatgcatatgtttttttagttttgggcagatataattgtagaatgctgttcagaataagttcacttctccagttgttgatcagcccatagaggcggggcatatacggagtagaatgatctaacaaccggagtatcggctcagctgaagcgagaattcccggtaactcaagatattaggggtttatagaactaaaccactgccagatgggatttctagcattcgtatacccattcaagagcagttactgaacccctttggaatgctatttcagttgcggtgaaaaacagactagacctaatttggcggggataaacatctcggtcggcgtggtatttgacggcaaaatagttagtttccacgctgcgtcctcgtccaaaaatcttcatcacgaccatcaggcgactccctctgcgtcttcctccctactcgaaatatatcaggggtggtctcgcctggatcaaacctacgctgtcggctggctggtgccaccatgctcgcagatcctcgaagagtgccgcaatgccataacagctctcccttctgtctgcccctcgaatctagcagctatgacttacgataaacaacacaatggccatcttgccaaaccttttactccgacccttagtgcagcgttcagcagagcgaataacaagacccctttaaccccgaaactcgccaatccttccgccgtccgcgctcccaaacgagttgctcctcggaacactctgcaac

SEQ ID NO: 4125 - DNA, 3817 bp, Emericella nidulans
gatagcttcttatcggtctgtatatacctactatactcatactcgtacacatattctaccccaagtaccaacatcagcagctcacgatgccatcgccctctccatacccacgcatctacgcctcggccattgacggccgcgccgtgaacacgcggtataagcaggctcaactccagcggctgcaaacggctctgctccagcacatccagcgcgtaaaagccgcaatacaaaccgatacgagccatgacgctggcgagatccaggcggagatcgttctcgcacttacggaactccgcaagcattatttctctttaagtctcgaacaggacctggaaaatgagtatctcgtcgcaaaagggaaagataaccctaatgcgacaagaccggcgggctcggggatagtgtacatcgtgccgagcacgcatactatgttctttgggatcatctcggctctctctgcggcaatcgtgggcggttgctgtgttaccttgaagtaacctagtattgatagtcttggtgcttgattgtgctaattagggcttgcaacagttgacgaagaatacaatggcccatccgcctctcctgcgacagatcctctcagacgctctcgacgcagacacattcgcggtcgcagaagaaagaccgagctcctcattcctggaaggagtgctagtagttgcgcagacagacattccgtctctgccacaatcattgcagtcccctgtcaacgccaaaacggtagccgtcgtcgaccgcacagctgatctcagattggccgccgagtctctcgtgaccgcacggttcgcaattggcggacggtccacatacgctcctgatattgttctcgtgcaggaattcgcgctaaaggcattcgtcgaggctctcatccaccattcgtcaaagtacctcgccggacccgatggagagtcaagagagaaagctgttggcgcgtccaacccgcgtcgaccaggaccgggctcatcagtgctagacgctgcgtataaagatcccagcacccgggtcctggttgcgggctctggatggggcgttgtggaggtccatgaccggcagtcggccttgttgcagaggaaagagaagatagccgagaaagtgctaattctgcatcctgttagcagtctggatgatgctattgacttttgcgctgggtacctcccctaactcaccccccataaggaaatcacatcctcaaggcctagggcatgtactgactgttgacagattcgaagctctagcagcaacttacgcctttgctgaccctccatccgccaagtacctgacccaatttatcgaggcccatatctcattaatcaaccacctgcctgtcgaccttgtaatcgggcctgcgtatgcgatcaccactcaactccctgccgacaggtccactcggtacaatgcggccagctttctcgtcccgcatccgcaattcgtgactgaaagcgccagttcgactctcctccggagtgtattagacaaaccaacctcggcagaggcagtcaaggtatgggatgacgcgctcaaaccgttaccacccacgggacagagatccggcaagaggatcgggttcttcgagcagggcattctcacgggcgtggggatcacgctgttttctgtgattggggtcgtgggggccgtcgggtattattcagtctggtttttgaggcgcctttgattgtgtctatttattcgtttgtgtaatttctatcgatatttgcagcgggtataatatgctattctgacgcttgcattggtatggagtgttcacgtggacttggggctgaaaagacaagtatagttctatatcagactgcaagtatatacaagcccgcttacacctcaaccagtctactaaccaataatacttctctagagagtaaaacatatgtataagaaccaattaacctggttggatctcaaaacattggccactacgaatagccacctacacctctacctcgacgaatttccgcccaccaccattattgctcccattccactccccaaacgtgaactgcgaattgcacatgttagttagctcccagctctcagcgcccagcacagtcttcgtgcccacatgctcccattcgcccaccaaccccgccacaaacatcgccgccataaagtggtcgtccgtggcatgcgcatccctataccgcggatgcttcatcagcctggtcatcgcccgtcgcaagcccggcccgcccccaaccttgacgataacgtcctcaacggcctgcctgaactccagcgcccagtcttcagggggcgtctccattgcgaagttatcccggaaccgcagcatcgggccccatttgttgcggtagaggttgtgaacggcgccgccggtgccgatcagcagatagttctctgcgcgcaacggccgtagtgtacttccgatcttgacgtggtagtgcggatcgtaccgtgcgttcatggagatgattgttgttggcggcgacgtaccgggaaacatgtggatgaggatgagatagacgtcgtggatccagtcgaacttgtcattgcccgaaacgctgaagccggccgactggagcatggaaatgcagcgctggcccatcgagagatccggagtcaaattatagtcgacgtacttggaagggtgcacgtatgcaacgggcgatttgcccgggttagggttcatggagacctcgatcgcgtcaccggctgtgtcccagtgtgcgccctgaagctgttagcaaaggaagtaagtatagaggtacaacgaagtaccataatcaccacgcccttgattcctcgagccagagcttcggcgccgcatttgcgccagtactcggcggacgaggactcttcgcccagcatcatcgtcgagccatgcgagaagaagtgcacgggagtgaggcctgcgctgtcagaagagcactatagatgtagactgtatacattggggtgcgtacccatgatatttggtgattgatctgaagggttccgcatccgctttgctggctattgtttggagaacgccgcataaagtagatctcggtttggtatcactatcacgaagttacaggaaagtgtccattaatgtccacttaccagataggttggattggagatccagtgctggagagggctcgggaatgcatccccacatcccgaccacttcgggcccgctggagacgggattgtgagggcgagagtgggctgatacaccgggccatgaccataaatgtcgagtatccttttatgagatcatattttctgagtgcagctgtctcgctgcatgtttgatatgtatcctctctatttcctgcggcatcggcgtgccatctaagctgtaaccagtaaacttccagccccagaccccgcgaagtctgccccatattcccgcaaaaggctgttgctgtgattggtccccgcatattgttttccccacgccatacagtcgaaaatgagtggaggctcggcgcaggaaatctggagcccaaagtcggcttccgactccaactcttcatccccgctgtgtccgccctctcctcagtttcacttcccacctagacatccatgcaatgcagagtgccctcgactctccgggttccaggtcgcggcaaggctacttccaatgcggcttcgggtcgtgtcgcaaggcctataatcgggcggaccatctgatccgccatgtacgctcacgtctgtctatgtgaacatttatcttagaaaacgttcattgacaagtatagatactcgagagaagccatacgtctgtcaagtttgcaacaagggattctcgcgaccgtgagtgtcgcctaaaagtcttgcccta

SEQ ID NO: 4126 - DNA, 2918 bp, Emericella nidulans
aaaagagaaaatgaggaacaataatgtaataattataaaatttgaaaaaagtaataataaataatgataaaaaaattgaaacaggaagaagataaaaagaatagaatgaaattatttaaataatgataataaatagcacaatttagaagaaactatatgaaaaattattatagaagaatgatataaagatagaaatatatatagtaaaatagatagaaaaagaagtaatagactagataaataagacctctattaataatatatcaacgtttactttctaagccataatatattaatgactggaaggatttaagtacgtaactgctagcccctacacgttcgtcaagtatatacgataccttatgggatgcaacccagttctacagcaatttagtaccgtatttcatccgtacccaaaatacaagcgactttgtcgcatctctcgcactcgtaattagtgccctcggtgtagccgtcggcggcgtcgtctgcggactggttatcaaacggtaccttccatgcggatacttgttgccagaagctaatagagtgttcacagcacgaaacgcagcaaatccataactctcttcgccctggcactaaacctcctttcgcatacgctcatattctttcgatggcgccggagtcacggggaaactccttggcagcatatgcaggacggcgtctacctcttcgtcacgggtatggcaccaggcatgctgttcccagcattattcactgcaatggcctctgtcgcaccggagggggaactacacagttgtatcgggacgtactatctctttcagcagctgggaattattattggacctgcagctggggcggcggttagccagcctatttttgaaaaagggctgtggagggcgctgcatggcgtcgaggagaagaggatggtaagtagctgatactttcgagagcgataccgttactatggagtatgctgattctatggatgtgcaagatcatcaatcggatcctgaacgatgttcgatacgcgaacagtcttccagtatcgctacaaacattcgtgagagattgctatcttgcgagcttccagtatctaccgcgtatgtctatcccccgtgttggctccatgggttgttttgctggttgcgttacttaccattctataattatctagtatttccggtcgtcgctacggcaattatgtttccattcctgtttgtcctcaaggagccgagaatcgcatgagcatgaaggcattacctagcgaacacaggactagtcggtgaggaaagtagatgttgtatcgggccttggtaatgtagataagggcgagacaaagtggaatggcttcaaggtaattatactactcagacactctgatttactcctgccccggcaggcaagtgtcaggactggactctgggatcctgctgggtactctctgcgatctattcttaacactcgttttcctcctacaaattgttatagtctgttgcaacaaatgaattacccttatcttcgtttctgtagctcatcttaccctgcataggcatctagggtttcttgcccagaacaatacaacttctactaccaccataaccacaaccatcaccaacaccactactgctacaacaattactattacatcatccttacttcaagatagccacggtgccagtgcgcctgtagtacaactcctgcataagttcctccgattggaccgactggttcgcaccgcatcttcgtgactaggtatctaagcctgtaatcggcataacctccacttgaaatcattctcgctagaaagaaggaaccagagaggctctgagaagaggagcaagggtgacttctgttggcttatgggcatggagcggtcaggcgtgacgacggacgtagcttggtttgtcgctcgtgggatggcatcctagtcgaaaccaagaaggaaatcaagtagtagatagtcttctgcgtgcaaaatacgatggcaaaatcgtcgaacttatcgctgtggttttgctgtatggactagtacacacgagattgaccaagctcgagaaccgctgatgaaactgtccccgcataggtggacagggatcatcctctaatgcgttactcgagaaataagaggaaaggatatatggtggatacaagccagcagcgtagccttgatgccctgcatgagaattggccttctcagccccaacggtccggtaaaggtttccacaaacgcaaacagaagttaggggttcttgcggccatgcgatttgcggctctttctacactggcctgcctcttactagtctggccttccatgagggagcttcattgtgtgtatatatatacataaagaggccagcatgcaaaaattaacccattcgtcccgatcgtactttatctggaagccgcattcgttgtcgatttactttgacacatacaatgtctgctaccttaatggaaccgaatgccctgaacctagtcctatgatggaagggcacttgaaaataccaggatcgtggtaggtctaaaggtgatcagggttggatatcgtcgcggctttgtcagcggtgtcatttgtcatgagcatggccatgaacattaaaggtagtaaaggcagttagcaagtaaagacaagtattcagccaaataaaatgagagtttaaagcttccagaagcctttatggatagagacacatctctagccccggtctatacgcgcattcgccgtgcgggaaccggattccgacgctgaacgaggagtttaaaacgccagtggcctcggacaatgtcctggccatcaaagtgaaatgccattgtgcgcggccgtcgtcggctacggcttcagcgcaaaaacatttcacatacacctttcctcctgcataatccgggatttcatctgtacgcgatcgtccagcgcgcatcgaagaagggaaacg

SEQ ID NO: 4127 - DNA, 5880 bp, Emericella nidulans
ctatgctaggacgtgttgtggccattcaagacctggttgaaggcttgtttgaccaagtggaatcgattgacgcccgaatcacaagcttttttcatcacctccctgaatctaaagcagagcttttgcgccccgacgggaccgttgacgagatgatgttccaggcgacaatggtggtgaatggcacggcgatttacctccatttcccgcgttcagacttgctttcatcgccagccgttgcggccgaagtcatttgcggtcaccacgggccatgttccgtcccggcattttcacaccactcccacgccatgaaagcccttaaagcagccagcgaaatttcctcgctagcctccatccgcatgcctgtagttaagcacacgccgttcttcatctgctcgcttgttatgagttcgattgtgcaacttgccgcctgctcagtcaaagcagggcaaatgccagatcccagccgcgatcgcttggcgctgactatcggagttttcaaaactctggccaacacctgggcaatctcgcagtcgattatgcgacagatcaaggctgtcgctcgggatgtgatggatatgggcttgcggccgacgatggccatggatcagattgatttgaatacggttcttgataacaatggccgattttggctcgcagaggctcttccgaggtagagccatggccaactttcacctacctattaccatacagcatttgcttcttttcggtcactttttcatgatacccgatacataatggcaatcaactccacccaaaatcttctgtgtctgcgcattggccaacgctgcgcacaagtttatcaccttggacagagcagccctgaagcccacatagacggacgacaggttctacctttcaagatagttcggattggagacaatgccctctccgcacctagaagacgcttgaaaagtccaaatgcgtctacctagcgcgaataatgcaatgttttctgtcaacccaatcgaaacgagaggcggggctctggatcatgcacctggactgcatacatgcgagtttatccaccactgcccggtcgagggatgcatccacctgaatgcgttgtacggtctatcacaaagcgtcaagaggctaggaagaggattaccctgtatttttggagctgaaaactgacattggatgcaattgactgctcgattggttatggtgccgctgatggtcttagatgggccgcttatgcagaggtacttggctctgttcgcccagtgcccggccgaattggtacgctaggggacgcgtggtcatagcgagcatgtacctttggctagctctatcgttgaggctaggatcgattggatctccggccatccccaagctcgaccccgcattcagccggggatcccgccgtttccccaccattccaaacaccgttgattcagggagcaaggctagactttcttaattggaaaggcctgattcattagtgagtgtgtccatttataaatgtgctctgcgcatggagattgcctgggtctcggaattatctttctgtctatgagtgctgctgtcctgttacttggccgtaatatatagaagagttccacctggcttctggttattatatgatgacaccgactggggaagctgtcagtagctgtcttatctgtggggttccgtcgttttactcccctgttcgagaggtaaaaataacactgcaataagcataaccccgcaagcaggatttagcctaccggcatttctccacctgtgtggagcgcaaggcagacgtacttcgtccataggacggtagactcgagatggataactgacttctgtacagagtcaattcctctgggagaatggcactctcgtttagctgattctgatgccctctttcggtacgggattgtcaccagtcttctgtactgagaagagagagtagcctcatatacacgatatacggatctgcctcccaacaacgatagcctagcctattctgatcgttgtctatgcacgctttacattgccaacggatcacagacgcacttgcatcaagcggagacagatactctcttggctcagaattggagactcaacaggagtgaggaggtatatctccaaatgtctttcagcgtcttacatggaatgaaatccgcctctcaccaatcccctgggcttatctcttcgtatcaggtctgtctccgcataatccatgcccgattgccataacatcgctgctaagacagcggcaggggagctttcccctccggcacaaggcgagctgtatggacctctccagctggtttaggagtgtgcagagagctctccgcttttcacgcttcatctgttcttccccgcgcgtggggttagatgagattggggttagtgaagagggagagtgacagatagaagagcaagcggggaaagacgatgttcattccaggtctataaagacccagcaaacccccggctgcagagtgctttcactcttctatctataaagatcaggtctcctggccaagagatataattgatctttctgatcctgggtaatagcaacaatgactatccccgaagaggtcgatatcatcatctgcggcggaggcagctcgggatgcgtccctgccggccgtctcgccaacctcgaccataacctgtctgtgctattgattgaggctggcgagagtaatctgaataacccatggtaggagtgctcttcactcgaggctccgtgtgaagatgagctcattactgacaagcccagggtctaccgtcccggtatctaccccgtcaacatgaagctcgactccaagacggcctcattctactactcccggccatctgagcatctggacgggcgtcaggctgttgttccctgcgcgaacatcttgggtggtggtagctccattaatttcatggtattaccagcccatattgccctaaatgatagtgcccccgctaacgtatcagatgtacacccgagcttcagcctctgactacgacgacttccaggccaaaggctggacgaccgaggagctgctgcctctaatgaaaaaacatgagacctaccagcgggcctgtaataacccagagatccatggctttgagggacccatcaaggtttcattcggcaactatacctacccgatagcgcaggacttcctgcgcgccgctgagtcccagggcattcctgttaccgacgacctccaggatctgaagactgggtatgtgatctcattacaggtgccgtaccatactgatagcatgatagccacggagcggagcactggctgaagtggatcaaccgcgataccggtacgtctggtgttaattccaatctaccctttatcatactaacaccagttaggaagacgcagcgatgcagcccacgcctatgtgcacagcacgcgtgccaaatactccaacttgcatttgcaatgcaacaccaaagtcgacaaggtcatcatcgaagacggccgtgccgtcggagtcgtcaccgttccaaccaagcccctcgacggcaaagagccaccgcgtcgcatcttccgagcgcgcaagcagattatcgtcagcggcggtaccctttcttcacccttgatcctgcaacgatccggaattggggactcggagaagctccgccgcgcgggagtcaagcccatcgtgcacctgcccggcgttggccgcaacttccaggaccactaccttacgttctccacatacagagccaagccagatgtcgagacgtttgatgacttccttcgcggagacccgaaggtccagaagagagtgttccaggagtggaacatcaaaggaaccggaccgttatccacgaacggtatcgaggctggtgtgaagattcgaccaactcagaaagagctcgaggagttcaagaaatggccgacccctgattttgtcgatggctgggagacatactttaagaataagccggataagcctgttatgcactactctgttatttctgggtatgcagcccttcttgcagttccattctcatatttcctgcactgctaacaacgtactctgaaacagctggttcggtgaccacatgctcatgccccccggcaagtttttcactatgttccatttcctcgagtatcccttctcccggggcagcacacacatcacaagcccagacccctacgcggccccagacttcgacgccggcttcatgaacgacaagcgtgacatggccgccatggtctgggggtacatcaagtcgcgcgagacagcacggcgcatgtcctcgtatgccggcgaggtgacaagcatgcacccgcactttgcgtacgattcaaaggcgcgcgcggaggacatggatctcgcgacgacgaaggcatatgcgggaccgaatcatctttctgcgggcattcagcacggtacgctttatctcctttcttttatttccctctctcggagtccgtgggtatgctaacgaatgcatcaccggcaggctcctggtctcacccactaacccccggtaaacaacccagcccaacaaccctcagctccaaccgattcgaggcccgcagcgaactcgagtattctaaagaagacattgcacatatcgagaaatggggtacgcaatcgtccactattccttctattcctcatactaacattgacgtcccggttgttccagttcaacgccacgtcgaaacaacctggcactctctgggcacatgcagcatggccccgcgcgagggaaacaacattgcgccccacggcggcgtcgtcgacgagcggctgaacgtgcatggcgttaaaggactgaaggtctgcgacttgtctatctgccccgataacgtgggctgcaatacatttagcacggcgctacttattggagagaaatgcgctgtcctcactgctgaggatctagggtatagtggggatgcactgaagatggaggttccagagtaccatgctcctggagagtttttgaatcttgctaggttgtagggtcttccagtgaccttgatcatgtgtggcggagtgcattgccatatttagctagcagggctagttaggtttttaagtaggtggtagcttgtcagataggttggtttattgttatatgcatgtcaataactccgtatcatgacttgttgaatgtgtttatgatgtgaaaaaattagtttccaaaacagcattagagggcttgactgaaccggtgagtgttataaattgagggccggccctagagcattcattcatagctctcattaaagtacagcatattatctcgtgtagccacgatcagcctagcaagcagtgcacaaacaggaattgtagtcagacagccgcccaatgtatgcacaatcgtaaagaacaatgttgaaagcagggagtagatagtaaatgttttccctgcataatcaaccaaagaaaagaaaaaggtggggaaggggaaaggcaatgcattatacatcattcgtactcattcatatccgaaccgtttccagctagcgtcggctccgctgttcgagtgccatcactcgtcttactcttccttgatcctagagctttcttcttctctgctcgccgcttgtctcgttggctggtgtgttgctcatccagccgactctggttgcggctagaccggaggtctttgacttctttgatcacctcgcggaacccttcttcaatgttattcattcgggccagaacgagcttgctgagaagatcctggtttctgttggggctatctctgcgtcgaatgccgcctgttgcgtacgccatttgggtggtgaagcttgatggaacgcccccgacgaacccgttggcgattgccttaccgtctcccatgtctgagcccagaccggcgagcgcagatgcttcgtgatgccatgagctgtggccgagatccggtccgaggatgtc

SEQ ID NO: 4128 - DNA, 1755 bp, Emericella nidulans
gatgagaccgatcttcttcctgtttgcccttgcggggccctgtgttgttccacgggcggtcaccggggttgctgtacgtgaagggattggttcggcgggttttctggaaaatagtctcgacaagataatcggtgtagtggttggcattcgggtagttgaagccttcagaaaagcggtaaataaagataccagggtacggctgctcaatctcaatctctgggttagacccatcggcgtggttgagggggaggaagatggaacgcgtgcggtcggcatcgccgaggccaggcttggactcttccaaaacgtggtcgccaacgacggaatggatagtgacacggccgaggaactcaccgcgggccttggccacgcggaacaagagcactgccacggatatgcacacggtacagtagacaccaatctcaatcgaggtgaaaacagtgacaatgacaccaacaaagaagatcacacagtccaatggtgaaacgcggtagaactggtagacaacattgggaggggtgatcaagtcaccgactgcgtggatgatgacaccagccagggaagccttggggatgtaccagaaaagagccggcagagcgtagatggcgaggaggacaacaacggcagtgatgacaccggccagcggggtccgaacacctgccttggatttaattgcagttcgcgaaaaagatccagtagctgggtagccgccgaggaatgggccgagcaggttggtcacgccaatggccaccagttcctgagacgggtcgatcgtgtaattgttaacacgtccaaaggacttcgagatggcaatgtgttcaatcaggagaacgatcacggcggcgggcaattcactggcaaatgtcttgataatttcagcattgacagtggggacggcagcatgcttgaaacctcgaggcacggttccaaggactttgaatgccgggttgtctctccggtgaaggttggtggcagcgctgatcatggtgtagaataagatgacaaacacagtgcgcagagtagagatgaagaaccacatcttagcgcgatggggctgttttttggcggccgtgttgcaagcaaaacggatgatatacagcatggcgcaagcggtgacgcccatggcagcatcgagggtggaagatggaagggccctaagcgtttggataatagtgttgtaggtggcgcctcgggtgttgactttgtcagtctcgccaagcatggtagaaacctggccggaacagatgttgattgctgagccggtcatgaaagctgtgatagctgggagagggatgaagtcgacgataaatccaagacgggccagacccataaaggtgacaattccaccgcagatgacagctaagcaagatgcaataacgtgcggctcgacatcaggaagagtctctgcggcttccgtaacgatgtttccgaccaaagtagacatgacagcaacaggctaaccgagttagttacagcaatcaaaaatggagagtcgtacgtacgccaatggtgatatccttggaggttgcaaagaaccagtagatcagcactcccatgaaggacgagtatagaccgtactctacgggcagctgagcgagctgagcgtatgccataccctggggaacaacgacggcgccaaccgtgataccggcgaccaagtctcctatgagccacgtcgtgttgtaccgggtgatcaggacaggaacgggaacagcctgtaaaagtagaggcggatttccttctacgatggagtga

SEQ ID NO: 4129 - DNA, 5792 bp, Emericella nidulans
ttttgtaatcttgacgataagataaagatgtgtttgttcagtttgcatataattactgtttaacccacataaaataactatcacatgatgacaactaccagggtttatcattcccctatctcaatttgtagaactttggatgcactcctgtatatatcagtgagtatatcatctcacggtaataattgtttccgtcagggataatgctactccacccacttcaaccgcatgttcaataaggccgtgctgctcccagtctagttttgagtaactcgagaatacaatggttaaggaggctgtaagcgctgcttcttcacgattgcttgtggttaggtcagtctctgtggttactgattcaccgccgtctgttttatcttcaacagttatgccacaatatctctcgtccttttcctgaaaattcatataccacccgccgaagacgcatgaaatgcttccagtatagttactatgtgtttctgatactgcctcttggttgctctcagctatactaacgaggttatttatttcacaaatctggtcagtgtagctggttatagcgtagctgctgcaatattgccagttaatcaaagccttcgcttgtagctcccttgtcttcaccgtttttgacattcaaagttgcgcaatgagctggtttagggcatatatatatggcagttaggccatgggatgcagcagatggcggctcttaatccgtctgatgtttatcatgagaatgcaaggtacatgcttgcagaagatcagtacacatttttttcttgcaccgaaaaccgaagggtgtctctttaggatattcttgaagtggtgaagcggaaccattttgtatactgcgatttacatactatgagtctatagatgaaagcggcggaaaaaaaaaaatacgccttaactacctacccaacaatccccatatcaatcgatggatatcattgtatctcctaacttttgattaatctttcctcgcttacttccccgcggcacctttctcgatcttcctccgcttagagcgcaacttggcagactcctccgccgtcttcttgttcgaatacatcatcttctccaatagctttcgcttcttccggctcatcatcatcttctgtctctccagctcctcctcctcttgacgcttcttggcagcccgcttcttcgcctgggacttcttcttggctgctgcatcgtcgccagcaccactagacgagaaggggagacctgcggcctcggcttcgagttctttctggtgctgggtgcgagcggtctcttcttcgtcctctgattcggagccagcatcttcgtcatcaataccggcaaactcatcttcttcctcctcttcttcctcgctctcgctgtcgtcgtcatcagtttcagcgacatccatgccgccatcaacggactcatcctcagagtcttcagactcgttggccgccgtaggggcgggtttttcttcaccagcttcttccatttcttcatcgctctcttcctccgcatcaatatcagcttccccatcttcttcctgttcggccaagctagcacgaggatcgtatccacccttcttggggttgacccatgggctcagatgaggcggcagagtggcgcccggcgcatatagatcaggtcgaaggagctttccctcattgatacaatcccaaacccactggggctggacgtatgttcggccgggaacacgagtgccgggcttcaccttctgtacagctccgccatccgtggcagcagcagggatagagggaagagaagactcgggcagggagggacgatccacaatctgatgggtgatgcgaggatcagcctcattatgtgtgaagcacccgccaccgagaacagtgtcccacccgatccgcttacagccaaaggcgcgaagaatgaattcaagaggggttttgggggcttctcgggaaatgtagaacgtgaacggcgcgaagagtgagccagcctgatcgccactcatgtcgggttgaggaagagtgtcggcctcaggagccgtagtctcaaacttgtcgatcgcgtccgtgacttcctcggctgtctcggtgggctgttcgctgctagcctggtccaaaccggccttcttgatcacgttgtcgacctttttttgaacttcggcggagacctcctggttggcagcatcgcttgaggacttcgcgggttcgatcgccttgggagcatcgccaactgtgcgtccttcaagagtgaaagccgccaattctgctccgttctcgtcaagccgagtatcgaactttggtggatatctcaggccgatggaggagtacaagcgatagttgacgaaacccaaaagggtcgtgtagaactcaacaaatgtagccatgattcgataatccacatcgccgttgactcgttgcacgaaccggtaaggaacgagccacataatgtcctggccttgaattgtcgcctgataataaatacccttgattgagaggaatgacttgcgcagagagttggttgtgatcaggtaatgttgaaattcgtgcgtgactcgttggcacaaagcgatggttttgggcgggacatggctggtagaaggcaggttcgcaaagaggaaaagaagagacagcgcatcgtcgagatctctcagggcatcaataaatgtcgggtaacgctccttaataacatgatccagagtcaatttcggcgcatggttcttttccaagcgcgccgcatcgctaacttctccacgtcccaaggatcgagcaattttcttcgctagcgctttttgttcacgaaattttcgaagcagtggctcgtgcaggaggtattggatgtcctttgtgtagtagaaggtagtactctgagtcgctgattttgaggccttcttcttgtttcgaggctcacgaggatagattcctacaaaggtacattagcttttggctctgctgtcccagaagagcacgttcactcctcttgtcatgatgtctaagctggatacaaacctttgaaaatgcacagtcgacggaaatctggcagcgaaatctggagtttgcgcaccgcctgtgttctggtgatatagtttttggcctggccagaggttcctatgaggtggtggttagaaacatgatgtctagtattgcccaggatctgccccttacccttcttcttgattttcgccatgattacgactttgatggtagaatggaagaatgatgggaggaaggtcttctagtcatccaaaaatttgaactttttttccgcagagaaaactcgggtggcccgtgcacgaaagaccgcggagtcttggcgtttgaatagcggacaagggacaggtggagcgaaaccacttcatatgaacaccctttcatcgaagggaagggccattcttgccctgcattgctcgtcctcaacagttgaattgaaccatcatgccggttgaccgcaggaaggttgctgtttttggcggcgcctcgcgctgcggctgctactcctactcctgtttccttccctgcctgacttactgacaggccgagtggaggtctcgacaccggtgaccagcttcaagaggcgtatgttcactgagagtccgatgataactggcgtcagctgacacatttgttgcagttcaagaaggtcttttcctctacaaccgcaatgtgtcaccttatgacggaggcgtcttccaccaggtaagtgacagcggtcaagcacctaggagtcctgctaacgcatagtgtacgaaggcaccgcttctgcttccaatattctcgctgttaccgaacgctcaacagtatcctattccgaccgcacttctctactcgttggtcgatttgctcaatgcgaatgccttagtgacgatctccgactccgcccaggcagtatccggaaggctgtacacttcatcgaggaaactaatcaagtgggacggaattgcggttgcggcatggtagagaaaccgttggtgtttgatatgcatgatactaataccaaacaggttcctgtttaatccttttactatcgcaacctgccttggtcggtcgacagctgtattcacttcgaccggaattctctacgctatttccgcagctgttcagggagagagcctcaatgcgatgttcgcattaggccttgcttcctacctctcaatctatccggccctcctgtttattccgctcatcctcctttgctacgaccggcacgctcagcgcagtcaaagctctccgtccacgcctcttttcgtggcaaaacacctcgccatccttcttgcgagcattgcggggctccttggaatctcggtcctgattattggtgacttctcgaatcttatctccgcaacgtacggcttccagctgcttgttccggaccttactccaaatattggcctttggtggtacttcttcatcgagattttcgattctttccgggactttttcctcggtgttttctggcttcatctcgcagcatacgctggcagtctgagtgtgcggttacgccgacaacctttattcgtcgttacaacactgttgggtatctttgcagtgttcaagccctatccgagcatttcagatgcctctttatactttgctgtgctcccgatctaccggcatctcttcccttgtaagcactcctatcacccttcctccatccaacatcccgtatcctgttcttggaactgactggattagtaatgcgctacaccttcttctccgtttcagcgcttctctacgcctcgctgctgggtccggctttctaccacctgtggatctacgccggctcaggaaacgccaacttcttttacgcaattactctcgtatggagtcttggtttttcactcatcctcgcggatatgatcttcgccgctcttcgcgacgaatgggagcaggagaacccagacaagcgcggcaaacccgtcaaacaagtgtaaatatactttcacccattaaatgtctatcatcatctagagttgctagcgcaagcttttggacataatcatatagtcagcctcttttaccgtcccatttcgtagtttccgcggcctcggagaattctcatcctccgcataccccatcctcgagtagaacttaattgcccgactattcgacttgaaaacagtcaacatcgccttctcaagcccaacgcgccgacctatcttctcaaatcgctcgatcaactcctctcctaatccctgcccctgtacctcaggcgtgagatgaatctcatagcaatataacacctcatacccatcttcgtatgtaaccataaactcgagaaacccggcgaattgcccggttaatattgagctcgagctatcgcccttggtatcttgaacgctacttgatgcaccccgccgcaggatcatatacttcatgtcgggaagtttcatctcctttctcttttcagaggacgaccagcctatactagagttcttataggcatttgaagacgtaagctccagcagcttgaagcaagaggttagctccgtgtcgggtattgtggctgctgtgtggatggaaatgtcgtatgagtcggcttcgagatcccttttagctgctggtcccggttttattggcatattctcattcggtgtagtaatttcaccggcagccgcatgagtgtcatttgcgttcgcttgcgctttcgaaggagttacatcttctattttcgtttctctttccttctggaagctcagttcggaaaccgggatgtacaatgatgtaagctcctccagggatagtgcgtttgtacgctccactaagggaagcggctttggcttcagtcttcgtttcccttcatctgggccctgttagttatga

SEQ ID NO: 4130 - DNA, 3587 bp, Emericella nidulans
atgcctcgccacggattgccttgatgcggctttgatcatagagtcacggcctaaatgagacaatattcaacgtagtctcatcctgcacggccgaaggatcagaaacatggcatatagtatgctgcttactacgtaccgcaatagtacaacagtaccatggagaatcagcatgtcataagcctatcaccagatgcggctagaattctccacgccaataattgcctgatcccagcgtcggttcgagttcatattcagcctcgatcgtggaccatgcatatcgttctacatcacccgacttggagtagacgtgggcaaaacagggagagccatagtttcgacctttggcactgcctaaatgcaagtatgtcatgtggttttacctaagaataaccgagttcactttcgttctccagcatgtccgccccagctcgtacggctctgccatgtctcacttgatcgggactataagctgggcctgatctgaccgattatacccagaccagccacaataactgctagtgaaatggcagtacagtccaccatggagatttctgaatagggagggaaaatttctaccttctacaataacataatcagcatccacggaacccaccatgatagtattgccacgacaatagactccatacccggccttgcgagatccctcatgaactgttctttatatagctaagacatccactcatcccactcctgtcaacttcctgcctgcctatacggagaaccggaatacgagggccttcgggtaccgagcgcctggtccaggaccgcaacacgaacgcccagaccaaagtcttcttcaacagggatgatcggcgcagcactgccgtcgattccgagccttccccaggttcagctggcttggctgacgcatagacagacctttgttagtctggtcttggaaccctgggcttcggcaatcttccatgctcagcctcgcgaccaggaacggctttaggcgtcccattggtcagcggaaccttcaagcgactggcgggggctccgcagctgggttgcgtctggggtaggtaagcctgattcctacaaataggcatctttttttagagagggctgagtacggagtataaggtaggggtcatttgatatataccaaggtcggggcagcggcactagcccgggctgtatgctaggtcggtaagtaagacaaggtagcgtttttgtactcgatgcctgtcagattaggttaacggaaatttcgagactgcggttcgatgctcgatcaactctgcaattggattcgatcgctgccgtcctaccctccatgcgtcgttgcacgtgcgcacatgactggtagagccctattaacaccactgagatcgtagtccgcgacaataactaccgagctttgatatgatttaatcgactattaatattttggtctaccatatcggtgaatcgtaagactcacaagacgttgacggtaggtattttttctttgacgcgaaccccaggcaataacgggcaacaacacgcgatcaagagtgcttatggaatatggcagctatgtacggtatgagaaattgctggcatacatcagccagttggaaagtgctcttcattttacagtgaccatcaaactaaagtgcgcagaggcgagcccctagagtctgcggccgaacgcccagacagcagattggtaaattaaactgatagcttcactacatgttgtagacatgaagctgaagagaatctgggatagtgtacccgatatacacatctcctctgcagtgtctatcccagtcttctgccgagccaagcacagcccccggccggttgtcgactgccagattgacaagcgtggtttctgttggtgctcgttaatagattttgtctaataggatatgctccggtcgtcacccgcgagagcagttgggaatcaactaaccattaaaggtaaacaacggccatccgtaatcttccaacccagtgtgacggttctgagcgaaggcgacccatgcgcctgcgattataacgaggtaattagcgacaaccatttatccgaaaagccatggagagaatttcaacgtactctgaacgtatttactgacgtccacctcccgtaagctcggcggctgcggtatagttgtcatattatatgtgccgaagagtataggaagctcggcttcaacccaacacccggttagaagcagtcgaaagcaaacttgagatcacataccactatgataagcacctagccaaggtttgggactgagattggtaaagttgccgtggtagacgtaccgccatgtaggaatatgctgtcgcagtcgagttctgattactcgtaagcttctggatagaacaattttgaactatcgaatagacagatatagatacgtactttacggcttgataggctggacaactgaaacttccgaataggtcttcagtcactgccgtctcgttgatggagctctggctgagggggaagccggccgaaaattcgcgggcgtttattcctgctagagtaggctgtcgtagctcgttagccatcctcaaactatacctggcaacgggttaatggggtacgaatacgaacaagacgcgccagccctccagcttttgctctagcaatatagtccgaaaaaacagtccggttgtcggccaccggcgtgaatgtgtagctcccgttgcccagaacttctagaattcgggaaaatgagacactccgcatgcatgccagagacccatctcctgcgctacatcccacagcagtcgacaggcggttccagttggcatgggccgtgtctgcgttgttgaacagagagacggtgccggactggagtacaaatccgcttacgagagggtcctctggatactatagtacggttagctgttactcgagccatctcagagagagatgaaagtcacatacagcgtaagcataagcatcaaccgaagcaccaccggcagactggccgaaaaggaggattctgtccggatcaccgccaaaattggcgatattttggtgtacccattgaactgctagtctctggtcttgtgagaatgcatccctgtctgataatcggaactaggtaatggctgacacgtacctgatctaacagccctaggttttgctctgccggatctaacccaggtgcatttggatatccgaagacattgagccggtagctgatccattagcaccacaaccaaaccgatcacgagcatcggaaggagatttttgacgagctcacttgaacgtgacaacaacaacgtctccgctgcttgctaaatccaccccatcatagaaacccacagacccggccccctcaccgaatccacctccatgaataaagagcataaccgccttcccctttctcccagccccgcttttctttgtttggtgttccgccggcgtccagatgttgacaaaaagacattcctcgctcatatcctcgacattccgaattcgataaggaagaacattccagatagactcattgtcatagttgtagacctgtggacatggagcaccaaagctcgacgcgttgattgggtgctgggaaggggctcttggttgcggcggtgcgaagcgcaggtctcct

SEQ ID NO: 4131 - DNA, 2703 bp, Emericella nidulans
agtctatcaaggtctgggaggggctggaaaagggtataccagagtgcaactggacgacgacgaagactctatcaacagcttggatgaagatacaagctatcttttcaaagagacggccgcgactgctgccggagtggaaggggaggagcttcgtgatactcttagccagctgcaagctacgaaagatcttctaactgaaggccagaggatagcgtatgtgggagtaacccgcttgactatatttgagatggtcatggatatggagagagcaccgtctacgaaaggcacgcgcaagtggaagcagaaggccatcgactcagcaagagggtggggccaagccatgatgactaggttgtactctcacatggacattagcaccgccgaacaagtgatgatcgagcagctcgctgaacacggggttcggcctgaagacctcgtcaggccgctcatggagaatgcccgcgtcaagaatccgttggccgaggtggatggatctaacaaatcactctcccctacatctggcaagttgaaggatgaaattcggtctaccttatctactgataccaatcgatcttcagagtcaagctctcttccaccttacgaccgggaggaggatgtcccagaggtccagacaccatcccagctaccgactactgagaagattgatattgatattcgatggacagcactttgcgatcttttcctcgttttaatcaaatgactcaaattatgattcacggtcacgaacgctactggagagagtaggggcatcaatggacgtttcgtggttacagatagccaagttcgagaagcgtgtcatcgatgctcttgagatgcaagaggatgccgacaaggaaacctgggatgagtctgagcacatggagaaacgtcgaaagtcagcactgaaacgcaagtacatgataatgggcttggccaccgttggtggaggcctggttattggcctttcagccggccttctagccccagttatcggcgctggccttgctgctggattcacaacaatcggtgttggtggaaccagtgcgttccttggcggtgctggtggtaccgctctgattgcgtctggggctactttgacggggagcacaataggattgagggcgtctcaccgacgtaccggggctgtgcagacgtttgagtaccgccctctgcataacaacaaaaagttcaacctaattgtaacggtgtccggttggatgaccggcaacgtagacgatgtccgattgccctacagtacagtcgatcccatcatgggagacatctattctgtcttgtgggagcccgagatgctcaaaagtatgggtgcaaccataaatatcttagctaccgaggtatggtctattccgtcacatcatgttatcttactgactcaagtaggccttaacccaagggttgcagcaagttcttggaagcactattctcacggctctcatggcatccttacagctccctcttatccttacaaaactctcctaccttattgataacccatggaacgtgtctctcgcacgagcgactgcggctgggctcattttggccgactcattgatggaccgcaatctaggcaagcggccggtgaccttgctgggttattcacttggtgctcgagtcatattttcatgtctaaaggaacttgcagacaagggtgcgtatggtattgttcagaatgtctatctgtttgggtcaccggtggttgcgaataaggacgaatatatcaaggcccgtggtgtcgtttcaggcagctttgtcaacggatacgcttcaaatgactggatcctgggatatctgttccgcgctaccagcggtggtattttgcgagtggctgggctggctccagttgaaggcattcgaggaatcgagaatgtcgatgtcaccaagctcgtgaatgggcacatggattaccgggcagctattcctcgtctattgaagcatgtcgggtgggaagtcctgagcgaggaatttgcggagattgaagatcccgaccctgaaaatcatgccgagcggcagcgagaattaatccgcgagattgacgaggcgcgtcgagaagcagagaccaagccggaaaagaaacgattcggcttgttcaagcggggaaagttggcccagaaaaaagcatgggagaagtatgaagttgaccaatctgagtcgcctcaaagtcctcccagtggcaacgcggcaggaagcgtactctttgatattgacgctatcagagccgagctagcctcggaaatgttggaggtcaagcaactggaatcgacgctaccgcccatgaagttgaatttagattccccgtcgttgaattcccctgctacgccatcgtctttcgagacaggaaaaccccaagatttccgtcaaagcccacctcagccacccccagcagcatctccgggtcatacatccgccgcagcgcgcaccatcacccccgtcgcctcctaaagatgaaacgtaccaaatgactttcgatacgtcgtaccacgaacccccgcagcgctctctatcttatgaatcccctacatactctaacaacaatacctttacccggcccgtccttcgatcttcagcgacaactggtgtgcttggtgccggagcggctactggtgcggttggtgcgttcgctctcgaagaaaatgcatgggccgaccctgacgaaggcgaaatctcgatgactttcgagtgatgagt

SEQ ID NO: 4132 - DNA, 8968 bp, Emericella nidulans
ttcacgcatccttgtttggttgggacacctgtacgtggcggacaagaaacggccagctgggttcatcaattcccatttccctcataacagtggtatatacatcggtagctgccaatctccgagggattattctgcatcgatagggcattttggtggctggtcgccgacttgaataccccctcttttcttattgtcggcgtcagcaaacgggatcttccaacctccctcgctctgcggcaccgccaaccacaatctcatgaggtgtctctggggccgcgggttaccgtcttcgtcgactgaaccaggagggtagtcggtgtatgcagtacgggcatggaacacatgggggttgtgcaagaactggatatcgccaggctcgaggatcatatgtagcgacagctccttgcacgttcgctctagaacctccatggcgtacttttgcttgtccgacagcggtgggatctgagcatcagggccagagttgaagcgagccagcgatgtggcattgttcggatcaaacttgccgtatactcttgggttagggccagtctcaagccagaacaccgctcccctgtaccatggcaactggccttcggatacctcacccttcctgtcgaaataccagttcggctcggccaaagtccttacaacgtcggggtgctcacactgtaacttattgtagacgctgtgcgttgagacaatgtctgattcaccaccagaaagcgacttcgcgatacatagaaggccaaccatgtctccagcgtccgtgtggaagaattgtctttgatggttagatcatatttgacaagaacgacatatgggcatacctggcatttgtccggtagatgcggactctaaatgtctgcgtcgggtcctccccgagatccttaacatgaccaagtacatggccacgtccattctggctgacaaagtaccccaaatacgtccccaagcccatgtaagcgacagcggacttgtgaagcccccattgccggacaggcaagttcctgaaccggaagaacccctttccgttcaacaagtcctcgcgcagtgcatccaatctagcggagaggacaggaaggggaaataaagccctagtaatgccggtcaagggcgtgcccgactcgatgaagcggtccgccgcagcacttatttccgcgttctcctcgtctgtaaaggaatacgtccagcgctcggggctatctctatactcggcagcatcccagacagtcgggccagtcatttgcttagggaactcatcatatgggcggacgagcgaccagtctggttcgtgctgcccggaggttttgagcccgtcggggaacaacgacaatggggcagttgaggtttcggttgtcacagttgaagacatcttggcacattgaaactaagacaatgatcatggatagagactgcgacggtttatttatacctgtgctgcggagtatgggttgaggagacccgcggttgttcgctccaaagcggacttagtgccgacgttccaagcgacgctccgctctatattcacttgcgatcctatcaacaccaccgataactttgcggctattgtgatctgttcaaagcctttcttcataatctccatgtaaaaataagactggcatcaagtcattttgaaataaggtattactgctcttcaccgcggacgaaataagcgatgtggcttccgatccgatcagcagcgtcacgccattcagactaaaatatagcaatgcatgaggtcgctgcatcaatgtcagatgtcttggctaaactgacagtaactcacggttaaaagcccccttcccaacagtatttcatcaagccacacccaagcaaatgacgtactgagtgtcaagccttatttagttgggaaatctcggattgaaggctgcgttaaggaggcatgatgacgaagcaaaacgatgggtattatgagttccaacaccgagctcccttctttttgtgaaaaagacactgactctagcagttggtatctggtttggtttggttttattatttaacgtcactcggcggatcacggggcccacgtgatctgcggcctcccagggggcatctggacgtgctgtctaaacagaactccctaaaaaaatagctagatacaggtttgaagcagcaactatggacaatatatgttggaaatgagcggaagaagcatccggcgctaccctggccaggtcttcgagggcagatgcccgttttgactacctatagattgggggggaggggccgtacccttgtccaggtagatgtgtggactgtcgcactttcaagcgctccggcgggcccagttcgggcatatatccttgaagaagaaggatgattcttgcacgatgcggctgaattcttcagccccagttgatatctggctgtcatatcattatatgcacactatatatttggtcacgtgacgaatcgcatggtcgccgcatcagtgcctgttaacaattttgaaaaacgatgttcaagcctatgacaagccgtagatatcagataccgaagactgcccagcattaaccgagtgatctagcccaatgccaagatgagcgtggtcgactgccggggctgtgctcgctttctaaacgaagaccaatcagatcgcctgtcacgaacattatagtatacgccacagctctcgcattctcgcattccattgatctgctcctttacatgttaatgcactgctggttttagaagtgtcaaacgaacaatgcgagaaaacgaactcagccttgagccaggcagacaaattatgtccctaaatgaactatctcttaggtatgctatatattgggcattgtcgccgtgccgaatcatgaaggccattgacaccaaactaccattcacttcaaacaccgtcgaagctcgagtgccgacatgtatatcaagcaacaacttttccaaaagcgcgaaacagacgaagaggactggagcgtcttcttttacaacccctcgctagcagccacagtcctcttcagcatcctctacgtgattccgttcatctaccacatatacatttcctacagcgcccagaagaagacaagcaacaagtacttccgctacagttactccgtccctatcattatagccgccttccttgagatcatcgcgtacggacaacgcgcggcttcaacgcagtcaacgcaagacattggactttttgcgagtagccagacattgattgtacttgccccggtactagtctgtgcgagtttgtatgtgctcctggggaggatcattcggtcgacgtgtgctttccagagccaggaccaggaccgggttgcagggagacgagtgactggtgccggtataaaagaagaaactggcgaagctgaaaagcgcatagaggtcaaagtcggcggcatagtgagggtttcgtacctcccaaaaatcttgatcacgcttgatgtcgctgcaatgcttacgcagggcggtgggagtgcgattgcgtcggctggggagtggaagggaacgctggaggatatcggaacgagcgtgctgattggggggctggccctgcaggttgctacttttacagtatttctgagtgttgttttttcgtttcatcagaagattctgagacacggagaagagggaatggggatggtgttgaggggggtttatattggaggattgttcatcatggtatgtcctttttgagattctctggtttcctcttgctagttcagagaacctggacgctaacaagtgctttcgcagatccgctccatcttccgcctcattgagttcgcccttggaacggagtcgtacatcatgacgaacgaatggccgctctatgtccttgaggctgtgccgatgctcgttgcgtttatggttctgagctggtatcacccatctagatggctccttgccagtagtgctggtgtatcgaagacgcgagtgtggtatgagcggtataagggcgggttctttacctgagcaatgagatgaagtgagggaaattccggcgagtagccgtactatgacgatgttgatagatatatcagtaccggattgataagtgtctagctcaggttctggtgtttcagatgatgtgggagattgttcatttgtgttcctctttgtttatgtcttttggtttgaagatctgctatatgttgtacatctccttcatatccagcggcagccgcctccccagccactccgtaaacccctgcagctcatgcaaccactgcgggaactgccttttatgcttttcaacttcaggaagcaaatcgaaggcgatataactgaccaggtctctcactaagttcttcatctccctcggcaacgccgtatatatctcctccgcccaccggtagatcagaaaatgcccacctgtgttcgcaatcccccgctggtgcgaaagctcaaagtacaccggcctcatgaacgtgtcgatggtgatgtagtgcataaacaaagcgcgcgagatgtggttatctggcttcacaaatgccataaactcgctgttgctcatctccttccagctcatgtaaatgcctgccaaggcgatgaacgcctgtctctgtgaaagaaggagagcctcataagctgtcttcaaggtatgataaaaggaaacatgcgccggactatctagatgcaatctcaatgcttccaggctctgcatacaagccctcaccgtcagcgcctccgtcacggcctgcatctcgccgggaagccagctcgtgatcatttccaacatctccccctgagacttcaacttgaaaatcatgctttccctgctctgctcaaagtaccaatctgtaactagcccgcatccgcgcaccatgaccgcaaaatcgatcaccccatcggccatatggtgcgcctggaatgtgagcgtatagcacgttgccagtgcgccgtccatttcgaggaccgtacaggattgtcctttggagagggtagtactcaacgcctttagagcttttccgcggtgtgcgatggctagttcgtggtactgccgaccatggctgttggatgttatgagggcgcagtgcgaggcgccgagggagaggatggagtggaggagagggggacactgtatcaacgaataaatatctactgccaagacatacggtcaagaaagatatggaatgagcatacatcgtgtgcaaacgcagggatggttgatatccaggttccctcgtccccaaaggggagatgcggccgcgcgtcaacgaggaaatggtgccagaagcggagatcgtcgcctgagaaggaagttgctttaatacgggcgctcaagagggatgcagatggcgatgaggatcgttcagcgttgagtgatactgaggttgatgttcggtgattttgtaccacggcgtagggctcagttctgggagggggtgggtagacgcattctagctctttgaatatacagttcccacacgcgggttttgcttctgagcactgtcacgggaggtaactgataagcatgatgttcgcatcatttgaagatgctgcgtcttcatcgaaccataccttgatcctccgattcttacagttgtagcagcccctgcgggacttggtatgcggtcttttcaatctgttcgtctgggtctgtgcctccggtggggaaacatttagcattagggcgttgtatggtcgcgagggcattgcaggaagcagtctctggctcaagttgaaaacaggagacgaagaatggagcggtaatggaccaaaaaggagaaaaagctcggccagatatcctgcatttactcgacctgcatggcttagagtctcgccaggttgggaccgagagagtaccgaagagatttgaagaaagatcaggagtcacagcccgagctggctgcttaagatctggatcgagaccctgaaggcagcaccttttccctgaatacgagcctcgcctgctgggccaccaatccgggccacagccaagacatatgtcagacagagcctctgctagtattggtcaatattctttcttccgagctctaagaatagcttcgtcattgagtagtttgatgtttttcagtatgcggcagccaaaagagaagtgatgtcatggagaggatctataagcaagaggaggagcagtcacagttcttctactaaagaatcaatgctagagggtctaaattgataagaaattaagcaattaacttaaaaattgcacgtactgagcatgtccatcgatatttttcgacatattacatggagacgactcggcgaatcgaaccccggcagctccccgtcaagttgaatccgccataactttatcaagagaagtatttcttctaggaaaaataaaaatcaattagatatttaacttgctttggataagagaaattactactaatcaaaatacttatttgattttgatgtagtattcatagtttataaaaatcctgctattgtttgtccaattaagttgtccaatctgtaacgggcgtaggcagtattattttcaactggctgtcctgtataaacgagtattacaagcttagagaaagaaacaaaagatagaagcgcagatatctctcctccctttatcgacctttctgacttcccggacctgtatgccgacggatcccttttccaaagttatgaggatggatctcctttcctaagcttcgaggccgcaatttccgaagctgtacactgatgttgcagaaaccttatttagaaccaggttgagggcatggccgacaaccaagatccaggccatagcctgtgacacaatctgttcttcaagcgattctcattgacgtatctcaattttttttagtcagtcatattcttgtcgtacttcatccatcgtggttttgtatcggtgatgccgtcaaactcgtctgtcaattgaagacgaaagcactttaaatggacgagtagacacgcctctattgtctggtagagcctgtctatccttcttgaaaagacctcccaaggtccagtccctgctgatacgtgaaaagggcgccttgaactgccttatcttagtctgaaactcgaatcaagtgttctgggactgctgactgcattgtcacctgctatttgaaggacacaatgcagccggaacatgattaacctgattgtgagcatagcgaagaacacaaaaaccgtcttgtcgggttcatcaaggtcttgcaagcatcatgctggactgacttcaaaggactgcagagaagaaaccctatggagcagatgtacagatgttaaccttgtagtacactggagggtccagacactgaccaaacggaaatagagcccgatcatgctaataatgtgcgcatctacaaacttttccagtagtggcagaaagagcaaggaaccttaagacatcttaggctcgctgacctatctcgcataatcttttcacagaatccactaaagacccattgcatcctggagcttcctaccagagggaatgcgataagtctgccctcacagatatgccaaatactgcgagttatgatggctatcacagcacataattcgataccagagtttagtatggtatcaagcacaaatgcaggaagaatgcctgaatggctgggacaggttaaggggcacatgtacccagagtaattacatactgaaagcaagaaataaggaaaacccgaaataagttagaccagcggggaatctagcaagccctcattgttagccattagtgtgaggaacaagaatagccctaaacagaacattggtggtgactctagcagaggcaggtaaaaactgttattgccacccctacgcgccgctcgtgataatacgatgcttatcatctaagcctgtatagtataagatttcccagtcctatttgcagcgtgattgcttggctgcacctttaatcacgagtattagcgatggcgcaagatgacaccatcacccccgcacgttcatcagccttgaactactaagacttcaatttcatgcccgctctttatgcctcatcatactcacctcagcgccaaattatcaattatagtgcctacagtatgccctcactcgcgcaatccgccgcgctctcggcattggcggacctgaagctgccaaaggacgtccatgtctcccccgacggttcgaaagtcgtctatgcgctcgagcgattctcggaaaagaacaggaggtctctttcatcgctttggatcgcagatgttggtatagatcactctgcgcgtcagattacgtcagggctattcagggatgagaagccgaggtggtcgcccgacgggcggttcattgccttcttgtcagataggggcggagagacgggtgtgatctatatgttaggcattggagggtttgaagaggcgtatcctcttactgaaggtaaagacgcgaggcgggtgcaagacttcgagtggagtgtcgatggcagatatatcgcgttcctcagtagagaagggggtgacgatgagaaagaagtcgacgcagacgagccattagtatttggagaagacgaagaaaacagcaatcagcgtcttcgcatcgtcgatgtcgagcgacgacgccttcgagttttgacgcctgcagaccagaatgtggctctcttctcatggagcccaagccctaacacgacggaactcgcatataccgtcgccgacccatctgcgctgcactctagcagcagccaaatcgatcttgtctcggttgaaaccggctcaagaaggagattcatcagcacgaacagccccatcacctcgttggtgtggacgcagcgagatcgccttcacttcatcgctcgcccagcaccaccatatacacagccttccgtctacgaagctcgcatcaagtcaaagcagtacgggagttactttggatggactggagaagctatttcgttacaccgagcacgacattcagccatcgcccgcgtgagaaatcccacccacgagtccgcgcacgcattaggggtccagagcacggcctggccattctcgaggttcttcaactccgaatatgagatcacctcctt

SEQ ID NO: 4133 - DNA, 5906 bp, Emericella nidulans
cactcatcttctaatcggcagataaagaccatcagcatttttgatacggttaaagcataaaccatgcagtggtggcttcaatgcactagttcctgttgatatactgcaatgtccatatgtcttattcacatcccatggtgtacatgaacatccacctcccataccagcaaagtctccaagggcaattatgaaagggattaccagcctggttaatagtatagtgggtcctacagtgacaacatgtaggcacttggaagccactttaccagtgcttgagaactgtttgccgactggttagctcaattacagcaagaaactatcgactccacaatcccattggtgccaaactctggtcttatgtatcgtgccccagaacgtacatttctctgctttcgtagactgagggactttacgcaccttagataccagagcgacgttctgttggctaaggagacgcgttattgacttagtcagggctgtttcatagtcttcttgagggctgggtggttctaaacacgctcgcccacaaattgctgcgcattccaccagctgccctctgggtgttgttttgattcgtggtcaggttacagatcaggtggcatcgttctcattcgtggtcgacgtgctggggtcggcgaccttacgtaatatctcccctccaggctgattcactaacctgctatcccatcgttaaacacctccccacccaacaacttgattactagacaggtaagaaccactaaccagcacaatggcatgcctggagtatctaccaaacgaaattatcgaaaccatcgtttccctcctagaactaaccgacatccgcaatctccgcctcaccagccgaggcctcgccctgagatcatccggacaccatttcaagtcccacttccgacggaaacacgtagatatcactgaaagcacccttcgagactttgtccaggccacaaaacccggccggctcggtagactcgtgcaatacctagtcctcgtcggtgtggtcataacacaaactggctacgttggcgtcttgaggctcccaccttcctacagagaagcaaggcctcgaagcagaagatgaggcaaagacaagacaggatctagaagtacttgcgcagcggcgaacagactatagggtaatgcgcagttcagggacggatgtacggctactcagcgaagcattcgggaatctcatggcacaagatggcggcaacaacactgcaggtgggccgaggctgcgcacgctgtcgctgaaagtggtcgtgtatcacacagacgccgaacaaagacttcctccgaaaaccggcggctgggtgcccatctggcaagtggcgacagagacattccacacagcactacgtgccttggcaatcagtgcaatgccggtagcgaaacttgacatctacacccagcagagccgctccagcctggcgtgcagcgagctaagcgccgtagaccacgagtccagcggactagtagcttcgcttgcgtctgtgaagagcctgtccgttagcttctcagaccggatcatcaacgggagaagggagaatctcggaatcacaggcggctcggcggacgaagtggaccgtgatgcacctgtgattgacgactttcgagacaatgaggatgtcgaagcagaggcgtgcgacgagtcgactttcattggccttgtgaggttggtccagctctgcagtggcctcaaggagttagaactccaccattacaagctggggaatcacactgtttttgttgatctgcaccgggagcagtttctgcagcgcattgttgcaatgaccacgttaaccactctcaagcgctgtgcactccgcgggttaacagtaagagaggtagaccttctggcattcatcaaggagactgcacctgccattgtagagctaaccctgcaaaatgtcagtcttgtttccgggacgttcagggccatcttcgaccactgcacaagcgaagcgagctgtctgacaaggctgttctttgatgacctgttcgaacagaaactgctctattttgtaggggagcccgggcagtctaagctgcgaagcttcaactaccagtgtagcgagacgctagatcgcacggggccggaggtcagacggccgatttcctatttcatccctttgggcaggcccaaggggagccctgcgctttggcagtggaggatgcggcgtcgccgagaattcggaccgccgtaggatgctgactgtgcaatatcgttcatttcgtgggtgtatacttcttcgagatgacacatacaccaggcaggaccccctccacgtccactgcaggccctcaaggacccaaaagacacatagcctgcagccaaattcaatcttctttccattcttgtgatacgtgcaccttggcttgttcagcgtatgtaaagcatcaagaccaatgcactccagttgcgcattgttgccatccgggccgcaggagatgtactcataccttctgttaaagcataatatccgcagtccatcaggtcggcgacgttgaaagattccagaaagtggcgtaagcggcgggcacgctgtcgtcacccgggtccggcggctgcgcgaatgcttgaaataattaagatattacatagtttctcccgcaattgtacaattggtaagaggatgcagagaggataatacaacgatgctcatcctgggcaccgtgctcggaatgagaggcacataacaccagtccaagcttcatctcgggcaccgaaaccgcgattctgctgtcaaggtgcagggctcagaaatactttctgaactgcataacagagtagatacaacaagcaggccacagagtcagactatcaacagatgcatagacgagacaagacgtagctcagggttcggctacgagtcaaagccggagcttgtagagactcagttagctgggtcagcagcggcagaatcgtggcttcatctcgggctggcctcgcgatccagcttatcctaagcacggtggttagtgtaaccgggcagacactgacacatgagataataataaagaataagaaaaatcctccctgggtgttaatctatagcctagcccttatagaaccagaggtgctatatttaaattagaggaagcaaactctagagatagcttggtgatggcgaattctccattccgttactggatttgacatatttgaactcctttggtggatggtgggcccggcaattagcctttaacttctcagctgggccaccgtccgcaggaagctgcaccctggcggatagagagtcctcttcgaagaacaagggttagtcttacggtcgaggaggataaggaccgacccacgtagagggagtacggttctggataggcattgtggcaggacctattcagaccttgacttgcgtcaaagttttcctgcccggataattgagtttcagatcactcactgcctgggtggagaggtactttgcaaaccgatacgagttgctttaattactaacgtaatggacacaaagtaaacctcggaaacaacaaaacggggctccctcatcagctgtggcaggctgagtattgcatatagtcaacaatacttggccactatggtatcgaagtaagcacgctgtataatgcatgagtaaaacagtgttgtactttcccctctcgcttgcacaggttttatataagcgggcgcggatttctcttttttcttcttccaatgttcagaaaacacatcagcccttgaaaggcaacacgagaggtaggcccggggatctgaagaatttgtacgacctctgttgagaagtttatgttaacatatggattattggccagaaccgtccacagtcgaagtcgtttcaacatataccttgtcaagctccgcctcgctggccgattaccacatgtctcccgcacacggtcactgcgatgcggcctttcagcccctccgcgatctgttcgatcagttgctgagtaatgaaagtgagctcggcgcatcgatttgcgttaacattgacggacgaaacgtcgtggatctctggggaggctattccaatgaagagcggacaaaggcctgggaacaagacaccatcacgaccatctggtcgaccaccaaggtcattaccgcccttgcagctaatatcctcatcgagcgtggtcttctagatcccagcaagaaggtgtctacatactggcccgagttcgccgcaaacggcaaggagaatgttctagtatcgcatgtcctgagccattcctctggactaccctcttgggagtcgccgaataccataaaagacatctacaatgctgagaaagccgcggagaagatagctgcgcaggcaccatggtggaccccaggcgagcagttgggctaccaccttgtcacccagggctgtctcgtcggggaactggttcgccgcactaccggccagtctcttgctcagttcatcgccgacgaaatcacggagcctttaggcgccgactacagacttggggttccagaacccgagtggccgcgtacggcagatatcatccctccgcctccgcccgaaccaacccccgcgttagacccggagagcgtagcggccaaggcctacgccggtgtaccaataccagccgacgcagtcatgacagcatccttccgcaacgccgaactgggagccagcaacgcatttaccaacgcgcgggcccttgcccgaattgcatcaatcgttgcgcttggaggcactgtcgacgggaaacagtacctctccccggcagccattgatcagatgctccaggagcaaatccgcggtcaggaccaggtcttatttgtgaacctacgatggggacttggggtggggttacctgtgccggagaccgtgccctggcttccgtctaacagccggctatgtttctggggcggctgggggggatcagtgatgatcatggatctagaccgtcggatgtcaattgcgtatgtcatgaataaaatgggggccggggtgttggggagtgagcgaactgcggcctatgttaagaccatctacaggatcgttgatacgatgggcggctgatgagacgtgtctcttgtgtcactaatgacactgccacccggatatcatgcggattgtttcttcctaatgatcactccccactgaagaaatttagtcttaaagtgaatcggatgtttgagagccggacatccgatgctggagagaatgcagtcggcttactaagtggtggtttctttgtagacacagctgggccggggttttcgtaaggggtaacaccggtgtcagagtttaggttacacagtaatctctccgaaaagcccagcttggttctgaacggcctgctgcgaaattttccttatgccagccgtacattacggcctttcaaagattttgcaaaataccgacaaaatcaatgatcgcgggagccgcaactcatataacacaacaccaaagaatcgctatcaaaagacagctttttttttgtcattcttattttttttttttggtgactacctttgactcaggctgtaccagctcaactcgatcgagttactacgacgcaatcatgcagatcatcaagagcctctgggtgcagacattcccctccaagcccaccctaacagccgccacactcgcatccgcaaactggcaaagtcatcatcatcactggcgccacctcaggcctaggcttcgagctcggctgcatcctctcaagtctggcgcaacagtatatatcggcgcgcgcaaagagtccaaagccggagccacaatcgagaccatcacagccagtgcaagctcagccgcactatccgcctccgcaggcgaactccacttcctccccctcgaccgtgctgacctcggtacaatcaagcaatttgtgggatccttcctctcccgcgaatgccgcctcgacatccgcttcaataatgaggtgtgcct

SEQ ID NO: 4134 - DNA, 2150 bp, Emericella nidulans
tattattcttttggggaaataaaccccgcggattggccacggggccccaaaaatccccccgtggaaaagggacccggttcaaaaaaatagtaccaccagttacaaaaccccaggggtttttaaatggtccaacttacatccccttaagtcagaagggttattcagctttggaatcttagaaccaaatgaagtaggtcttttttgcttggccaaaagggggcacggggataaaaaaatggtgtaagcatgtggatccaagtaccgggcattgtattgcctcaaacgcccgcggtcgctttaagcaaggtcaggtgagcgcacggcccctcaaggtcgcctgaggtttaagcccggtcccttgaactgtagtcacgccttatccaaatgtctggtgttgatatcacatgacatcattcctcatctggtatccagtgcgaacatcatcccaaaggtgccctagcccgctagccatcagcatcgatatcttcgcggtcgaccagactccctggtcgactccccgctctctatacaggattttcaggtcaagtggccgggcaaatgaacgtgatgatagttttggcccatcgctagggctgccgctaggtgaaggtctcgtccacatacatgtcgccggaatctgtctcgcgacgcggacaggaaacttgctttttgtgtccttggggtatataagaagcgcgacggaaatactgcaaggccttcgattcaacatcagtacatgtcagcaaattggcgcaatggctcgagaagccttattggctgaatgctgggtcccagtcctgcaggacccgagcccaacttgcacaaggacaatacctaggcatttgcactcccgggaataccacaacaaccaataggaacgatatggcgtgtgccaaggcgttcagggcgatattaggcaagagaagcaattaaatgatgcctcggaacgcagcaagacatgtgtgaacacactggccattgaccaatagacggccctttaccccgggattcctttcgcatggttccttttctgatgcggggagggggcaatttagactgccactagggtgaggattgctctggggtagtattgaagttgggatctcatgagggctcaatgcggtggtaattgagataaatccccagcccgtccatcgttccagttcagtcgtttcgccagtgatactcgttcctgcagacaccgcgctgatcctctccgctccttcgcctgttgatcgccattcgctgtttaccaacatcatgcgcttccacatcccctttctcctggcgatctctgtcattgcccacgcatcctcagccgcacctccccatgagcttgtcagactcgacggctccgtcgtcatcgatgcccacaacatcgtcacagagtccatgatcgccctcaacaacaccgtgaccgcctacaagggcgggctttctcggcacgtttacagccctaacgatcgaatccccatttatcggactccccacccactctgcccatgcgatctccacgaccaattcttctcgcaacctcaccccaataggaatccgccaccgcttctggggccgtcctcgacattgccccccaccatcccatttacccttgcccatattgtctccacaaactcccacttcgtaaatgcgttgtttgcttttggagtctgcccttctggcacggccttcccttcgaaaccatacgaactctcggtgaactcgccaaccgtctttctcaatctcccctcccttcgctcctatctccctcttacccctcataaggctatcatcgaacatccttcgctctcaagtcaccctcctttccaactctcggcttctacattgtctctctgcagcctcacactcctccctttcctactctccccctccacccctctactctcattcacatatgttattaataatgttaataaaatatcatccctttcttacttactctacctcatcttcttactcctccctcctcctcctccccctcctcttatcacttctttctatccttccttctccttctcctcccacctccccacatccctccctctcattatttctttctcactccatcctctctcactctcccatactcctctaacctttaccatcattctatctcctcctcctctattcccctc

SEQ ID NO: 4135 - DNA, 6275 bp, Emericella nidulans
  unsure (1)..(6275): unsure at all n locations
aaagaaaaaaatttcccccccccttagaaaaaaatttaaatcatcccaccttacattttttccccggtaaaaaatacggacccggtttcaaaaacaaaaaaaggggggaatcggtttgcttgtccaacgggggcacattttcacccgggtcacccaggagtagggaacatatttcacaactaaaattctcggcggcccttaacttttttgatgatatcaaccaccgttgttgcatacatacacagtctggttctggtgataagctgggtcaagggccatgttgtgacaattcgcagctcgcaaaagcacaattgtcgaactgctgcgtacttacgttcatgacggttttcacatcagtctgggtgaagaaaagccaagattaggcaatggcagtggcaggaatagcgcatctccggtctctctgtatcgcagttagacaatgtcagtttgccaatttccaattaaagaatattccagcctggcatgacagtgtggaagtacgccctaagccatagttacactcactaaacccataacagagactggatcttcgtactgggcatcatgatacctctacttgtgttcggggatgcctgaatgcctgacaaacgtaggagaattgctctcccagttcgacgaggaggtcgtggcgccagctggtgtgatatcggctttctgccatacgttgcgtctttctctgaatgcgtttggtgtgattgagcccgctgggacagggaagagggaggagaggttggagatagagagtccggattgggtcaaacgactgcagaaagtcccttgtcaaccacgtttcgccccttctcaaccacagctcgctcagtaaatgacctttgcagcctattaccaagatctataaggtacaaacaagatgcggaacaaaatgtggaactagatgcggctaccccgtactggcccagaagaagagaaacccaaccaagccatgaacccacagcttcagtccaggacctacccagcatattcctttaggcgagaagtggcagagctttaggcaagcatacacctacgtcgtcacagttggtgcctactcccccttgctgcctcgcaaaagtttattccaactgcagtagtcacctataggaggctgacgcacctggcaaaggcaaccctcgaatccaacgaggtcacctagcccactagagtagtagccagagcctgccgttcgggtagaacagaaggctgtgtagatgacgtttcaaggttgcgataccgacccttgcttgctctctcgcgtccccactgaaggcgagctgtgccgacatggccaccagccggcagcaatgcgtttcaggagccgccgatggccgctcgtggcgggatcagaagatctcttgcggtggatattccgtcgaatcatcatcagcttggccccttgtatcgtggcttagacaatttctcaagctggacgcgtccaacaactgggactgtcatgcgaactgaaccgtataattgagaagaccgcgacgcagcacagcttttacctggacgtctgctccagaagttccacagaggcggaaatgcccattgagcgatgtaccggataagcgttggaagtcagaccgggtcacactgaccgacagttcacccatagcgtcgacgaatacaccggagagacaggcgcagacgcaggcgcggccccgctccgcgnatgggataggttatacagagtaatctgaatcctgcttcctggtcctgcttcctggtcctgcttcctggtcctgcttcttgattcctgatgcctgcggctcctgcttaggctatcccgcaggcgagcaggagaacatcgctggaaacaacagcttgaaactgcacctaacggggatgacccgcattggccgatgcggcatgaagccaagaataagcctgccgtaccgttggattgtcagctccccccgtcccttgtaaccctcgtagattctgcccggaaggcttagaggaagctctgctcgcggaggaaaagtgcctggtttcagcaacacaagcttactttgtcgtatggcggttcgcagcgcccgatacgaggctcctggatgctgccttcctagtcagtagaacgggtctatctgacggtttcccaccataaaccccgttgaatcgccgtctcttcgaggcctggccctgtcatctttctgctcagcctcgtcggatcttactgttgattcatcagtttaaaccgcgcgcaaggcagccggctgctcgcggatgaaccacgtgcgaggcatatttgcctgtattgccacccgagcctcaaaaagtaagtgtgtttgcataattcaaatgaaggcaaaacaaggtccgcacgctttcaggtggtagatcgactaaagcatcagccacatgtacatgtggcggtgcgcacattttgcccctgagggtgaagcattatgcgccacattcgtacgtggccacgtgcacggtttgaccaaagtatcccgtcgaaagaatctccaagtaacgtcatgagatgcggaaacactacccgtggctcgtggggacctatggtaaacctaatgtaagaggaaaatgctcaagctgtcaatcggagtacctcattgaatgcccactgacataccacgtaactctgggcatcggggcgcagcagtggccaatcagccaaccagcccggtaacgagatctgagctttttgcctgtctgaagaacatcatgaatcggccgcatcggtactattggccagccaatgtcagcatcattaggccttggacccaaccccctgcctgtgtctccccagtcaccagtgcagacgactcagactggatcctttgtcgcaacctcgtatcgcttgactaaaaaggaatctatctagtcagcgcttagaacaagaccagcagaagcgctttcatctagccccgtgtttcacaaaagcagcttttgccgccgtgctctgttagatgagacggccgagacgagaacagcggcaactttaaaaagtctctagcagcaacacactatcgacatttggaagaccctgccaaggagaccatagaaacgagaattgattgcgtttaattctcggcaggccaatcagaaaattcaaaaattgataatttgtcgctctgcctcgtcatattactaactgtctttgcactgccccaaggccaagaacataccctttataactcgaacgagtttgcaaactcttggatggctctctcgatggaagataatttaccataatatacaccatttctactttactacgcggcagttcgtctatgcttatggcgaaccctaactattttggatcctatgagggctcgtcgcgactgccaactccccagattgagatccatgaagacgaccaaagctcttcattatcgcccgggcaaacaggctcaagaacgcttatgccaactgcagatcgattaacggtgaaccatgaccccccgcgctcatcacattctctcccccgggacacgctccgcgctcgcgccaattctacggtgtcgagtgcagagaccattgtccacgcgaggcgccatcgaagttagagcctacaaaaggtgctctcaagactgacttttcacatcttgacgacgtaccgctttccgaagctcttaacccagatcctcaatatgtccaggatttcgaagtacaagataacaaattctctttctcgcctggccagctgaacaagatgttgaatcccaagtctctggctgcataccaggcattggggggattgtcaggcttagcccaggctttaagaacagatctcaaatcgggtttatctacagacgagacaacgttgcagggaaaagttgtgtacaatcttgaaacaacatcgtttgattacgttgaagatgctggcagctcagaaggcgcagatacgcagttctctgatcggatacgggttttcagtcaaaatagactgccggcgagaaagacaaccgggtttttcatgctgctgtggatggcttacaatgataaaatcatcattttgctgactatcgccgcggttgtctctctttctttgggtatatatcagacaatcgatgaagggcatggggtagactggattgagggtgttgctatcgtcgtcgcaatcgctatcgttactcttgtgacggcgttgaatgactggcagaaggagcggcaatttgcaaaactgaacaagagagtaaggctccttcccttgcgtctgttacggatctaacgagtatagaatgatgaccgtgaggtgaaagccgtacgttccgggaaggtggttatgatctcggtcttcgatatcaccgtcggtgacgtccttcatgttgagcctggtgactctgtccccgccgacggtgtcctcatttctggccatggaatcaagtgcgacgaatcatctgctactggcgagtctgatcagatgaagaaaacagacggatttgaagtatcgcgacagattgccgatggcacagccaccaagaagcttgacccctttatgatctccggcagcaatgtccttgagggagtcgggtcttatctcgtgacaagtgtcggaaagtactctagctatggcagaatcctcatgtctttgcaagaatccaacgaccctacgcctctccaggtcaagcttggacgacttgcaaactggatcggatggttaggatcgaggtaagatcgagatgccccgccccctgcatgtggtcatgcactgattgtggcagtgctgccattgttctcttcttcgctttactctttcgctttcttgcaaaccttgggagcaaccctggcagctcggctgccaaaggtcaagaattcgtagacatccttattgtggcagtgacggttattgtcgtggctattcctggtgagtattcctcgtccaggtattttccgttctatctaactccgactagagggccttccgctggccgtgactttagcccttgccttcgccacgacaagaatggtcaaagagaacaacctcgttcgtgttctaagggcttgcgaaaccatgggcaatgcaacagtcatctgttcggacaagacaggcacgttgactcagaacaagatgaccgtcgttgccgggacgttgggcacgaaaggtttcagtcaggatgaatctacctccatgtctgctgcggagctcttcaagatatgtccaagggaagctcaagacctccttgtcaagagcattgcgcttaactcgacagcattcgaagaagtcaaagagggcacgaaagaatttatcggcagcaaaactgaagtagcactgctgcagcttgctagagactatcttgggatggatgtggccactgagcgagcctccgcgacgattattcagctgatcccgttcgactccgctcgaaaatgcatgggcgtagtctaccaggtcgctgatgggcattatcgcctcctcatcaagggagcagccgagatgatggtcgacaaatgctcgaacagaattaattacgactcggacaagctgtgcattgaacccgcagctgcaaaggacaagcaagaaatccttgagatcatagagtcatatgcaaagaaatccttgcgtacgattggattggtctacaaagacttttctgcacctacctggcctccacccgaagctgtccgcgttcaggatgacccagactctgccgaattcgacaccatttttcatgacatgacgtggcttggagtgatgggcatccaggacccccttcgcctgaggtccctgctgctatcgagcgctgccatgttgccggtgtccaggtgaaaatggttacgggtgacaatatcaacaccgcgactgccattgctgagtcgtgtggcatcaagaccgaggatggcatagccatggagggtcccacattccgccggctttccgaagaagaaatggataaggttatccctcgacttcaggttctggcacgctcttctcctgaagacaagcgtatcctggtagctcgcctgaagaagctgggtgaaaccgtggcagtgacaggtgatggcactaatgacggaccagccctgaaaaccgcagacgtaggattctccatgggtattgcaggcactgaagtcgccaaagaggccagctccattattctccttgacgacaactttaagtcaatcgtgactgcaatcgcttggggccgtgcagtcaacgacgctgtcgcaaaattcctccagtttcaaattacagtcaatattaccgccgtcgttctcactttcgtctcctctctttacaactccgacaacgagagtgtgctcagcgccgttcagctccaatgggtgactct

SEQ ID NO: 4136 - DNA, 1349 bp, Emericella nidulans
tcgatggatgtttctaggagggagccgtgtcttactaatgaatgtggggtcaccagtagataaagcccacaacgcatgaggttgctcaatcctctgtaaaagtgacttgaattgaggtagagagacaaatcgtcaatccatatccaacatgtctgcgaaaaccctcaatggcgcttgcctctgcggcaaagtcacctacaccattgacctcgcgtcctccgaaccgactcccaaggtcctccctctcattcccttcctgctctccacccgtcgtaaatacctactaacacctcgtcaaacaggtcatagcctgccactgcacctcctgcaagaaatacacaggcagcgccttctcaacaaacatcattatccacccctcgcaactccgctatacctccggcgaaccgaaggtctttatggacctgtccaccgacagcggcaatccgctttcccgcacattcttgcggcgactgcgggtgccacttcacctcgagccctactggggcggatcgggccgctctcaaatgggaaaccctggattaaggattctcgtaagaattgtggtaacctggacgaagagattctattgtaaaggaagggatagctggcttgagaaccttgctgaggggaaggggaagggcgtgtttaagaaggaagccggaatgggataggttatcgctttggtatcgtcacggtttggtgtttctaccataagaggagtgcattatacggacttcagcaagtaatagactggttctgatttgtgaggagagcctcggatatgcgcaccctatcaatctatggtcgtcattaccccgcccgatagtaaggaagccgtataacactacagagcaattggtacgccctttggttgacagcttgcctactccaacatcacttttcatcacctcggtctcctccccatcctctccttcttatcaaccatcactactaatttcacaaccctcatccaacaagaatctacagacccaatccagtcgatcagttcaggatcaacatgcctccctccgcaacggaccccaccccctctgctgccaccggcaaaggcaccaccaacagtcaagaatcctcggcctcctctgccaaggtcaagatgcaattccctaaacctccagtctttgaagacaagctccaagaacgagaatactggaaaggccgtcttgccgctgcattccgcattttcggcaagaacggctatgacgaaggtaccccgcaccaacactcccattcaatccattcaacatcgacagcaagctaacccgtataatctgaataggagtagcaggccatatcaccgtccgtgacccagcgattcctccacattctgg

SEQ ID NO: 4137 - DNA, 4406 bp, Emericella nidulans
agcagacggtacaggcatgggcgattgtttcaaagacaataaatgaattttgcgacagttgtggaaggtctgaaaagaggaaaactggatgaggatcatctaacatacctttcacaaaagctagggttgcgagccagatattgatggcactgagcagatatgaggctgatttgcaacagccgggaccggcttgtgcagggattcgctaccacagcgttagtactgagacatgtgggttatggtccaataagtgaaatcgttctcacctgtgaatatgaggaacaattgaaatctctattatcccgcaacagcgcgtaagctactgtgcagaagagatgtgtaggtagacaagccccgcagtgtatagcctgttcatcaaagtcaagcgttagccgtaaagttgtgttctcgaatccagtagtacacgaagatggtgcgcaattaagacaataacaaagttaggaaataggaatataacaactgccgcaagagacgacatcagataaaaccagcaaccaggtaagtagacttcttataacaccagtttcaccactttgtgctggataattcatgctgacacagtgaatctcatgaagctgatgaatttaagacataaaatagctttccttgggatgtgacagcttgtcgactgcgcaacttttcgttgacttgaggtttgatcattctatctggtccatacatagaacgcagacatgatataatgcctcttgggctttgtatcaaacgggaataacagcgcatgggtgctaggcagaacgaaagaaaatgatgtttccacataccttgcaagtcaaagaaatttgcgtagttagggtgtatggtactttcaatgcgaaaggatcgtgggcataaacgcagcaaattcgtgatcgcgtctataaaacaacctcagccatcagcaacaatcaaactcaaatgggcagttgactcaccagtctagaatggaagaacgaaactttttataatctatagccaacccagcaacgaaaatgtcaagccgtaccccgcgcaactatccgtctcttgaaagcaactcagcgccgtacgagaagcgaccaggcttccagtctagaagggacaaaacaatgtgtgtgaagagatagcgcttcgcgacaggtcgggggcgccaaaggaatcgaagggtctagtcggattcgtagaaacatagtctcttttttttccctgttctctcccccattatatgttcttgtaacccggctcacagtagggaaaaataagtctaagcaatgctcggcttgaaatcgcgacgatgagaatgtcactggaaatgcgggatcgtagtgtggtagcgtgcccataagtgacgttgaaaagcgatctggctccagtaactatgggcgggtccgctcaagagcagcgcatcttgaggcggacgggaaagaggggagttatgtcgtgcgattcagtcgaggaaatcaggtgaggtcccctgatcggtcgcgagacgaacgggagcgaggcggaagcgcggagggtaagtaggatggcgcagtttcgcaggcagagtacagttgtggtgaggcggaaggaggcaaagtggtgggtggtgaggttgatgcgacggcccgcagtgagaatctggggaatgagctctagcgtagcaagatcaaggccggtgggtttatggggcgggcgagattcaaggagagcgatattgaaaaacaagaataaatataagcaaagcgagaggacacaggcgagggcagaagaatggtagaaaagaggagaaaaggttgtacagtgagtggtaaggaataacgcagaagctaaggaggtgagctaaccgcagcgctcggtgctcaggctcaggccactggacactggacggcggacggtggacacaaaggaggaggagcagacgagccacgggtcgggaaccccagcaaaagtggcgcaagtcctggagctacggccggccaggtttaggcccgaacttccatcgattttcccttggtcggttgagtgaactttataggctgtctattctatctgcctgattcgctcattgtttctggaaagaagcagcgtgatcctcgcaatattggggccagtatggtggccatctacgacatccatgggagtccccctctgcagactgcctgcttgtcgactggcgaaattagattaaaccacatcgatgagggcggggtaagcagcaggggagtctggatagtcaccgtccgaggcatgctcgaccgttatgcacacgatcagctaaccaatcccactccagcagactacgagatgtgcgacttggctgggtaagggtaaggtggtcgcaccgtagtaccaccttctgctgcgatgtggtcctactcgattgcgaaggcaggctgacaggtagacagacaagactcctgttgaagaagaggatgctgatgctgaatatttgatattttctctgagagctcaccaagggagcgatctcaatgcaacgatggcgatgccgcgacggtgggtctcgcgggctctggcggccgagttgaagatcctccacgccgctcactcgcctagaaaaatgccccggctagcctcttagaaccgtgtcctgatcgctgaccagccgcctgatatacggggtacctgtacaggaactaggacgcagacggtcaaaccttaaggcctcaagctcggattcccgtcgttagcagcagttttgcccggaacaccgcatgcccatatctattctgtctacttgagttccggacaccgtcatacggcttgaaacatacagcttccatctggagattgatgatgatcagcctcctcgtggaacagatagggtagggtacgtcatctcagagccacgttacactatacccaggaaaggttggagccattgtggccagagagcactctacatcgattgtccaggaattgcgggggaagaggcttgcaattccgaccaagcgacttccgaaggaggggcgaaactgtccagtggccctaatgcaggatcgccgctcggtagtgatagaactgcggagagagctttcattcaggtttggcagtggctgttcagaccaaccccaatcacgagcacccttgtccacaggttgatagctttttttgcccttgtggcgatttgccgcttgattctcccgtgcaggccatgtcttctgacaggatgacagcatgatcttgggagggaagtcgatggtatgcaccgagattccatagaggggctcaattcaaccccctcgcttcactagtcggcgaatgacagcaggcccgaaaactcacggatcgcttgatcgtcttaccccgatgtcaatatcagattttcaattctaatataacctacgttattgatatggtatcttccagagtatcccgtagcgctaagtagtccagctacgtaatatggtacgtgcttcgacgggatcaaccagcgtcatgatatcatcttcctaagcgatccaggggatgcgtacctgtctgcccgtttccgtacgatcagaaccatatcaacaattggcgtggcattcggtgcgcaaaatctagtgccgattctgaatttcagtaccacgtgtagcgtacatcgttcagaattcgttagatcgagcctggtctttgacttgaagtgacgaagccacacaaatgaaaccacatgtccttcatatctgcaggctcgactgattcgtgccgaatgcaaacctctcggcagcaagcacacatctgtggctaatcctagaggttctggcttgtctaccgatactctacccttcaaacgccgagtatatgacccagaccactccccgccaacatcctttgacggacactataccgattaccgttgacggccacgagcagaaaatgcggggtacatatgcgtccgactccgccgtcacgggactcggaccatattaccatcactcgcctttaaagaagagaggggccggtttgcatgattatttttgagctgctgaatcaatgccgtcctatatacaggcttataagccatgcaatggctttgacagctgcattatcagccccgtggttagtcagattcatcggtgcagatttggattcgctttgacctggcctcgcttgggtgagccttggagttgctattctagactccaccttgttgagcccctcatctccacacaaagcgccgtcttgtcaagtctacggtctcgtcttcgcctcttggtcgtcggtcgtcccggcactagccgaaacgtacttttgtagctttattgtaccttttgagctgagctgtggagaccgcgctaagtatatacgaagagccgacacccgagagaaatgaatctaacgatgggaggaccagactggatcctttcaagcctgctttgtttctccttaatcgatgtcgaagtgcatctaccaatgtagagtgg

SEQ ID NO: 4138 - DNA, 5638 bp, Emericella nidulans
gacagaggactatctcagattatacacatccgcttgtccaacctgcgatgctccctgccagaaacgcatgggctgcaatcacatgaaatgcttcaaatgcgaaacacacttttgctatctctgctccgcctggcttgaggagggaaatccttatcgacacttcaatgatctcgccagtccatgctttaacagactctgggacctagaaggcggcgacggcattgacccagaaggtgctgaagctttgcatcaagtccccgaacagatgatcttcgacgacggtagtgacgacgatgaagaaccacaacaatgggtgatggatcgtgaggctaacgagccgaggaacggacgacagcctccaccaccagccccagttcctccacgtgtcaaccaagttggtggaaaccgcgctctaggacgcaatgccaacggtcttgatgcagcaggtcgagcagccgcagctgagcggcaagctcaggcccgagccatggcggaaatccgagccggtcgtgtccctgagcgcgctgggcatgaacaaccccccgtcccacatgctggtctccagcgattcctcgaacttgttcagaacgaccgcgaagatgaatgggatagtgacgagctcgaagacggtttttaaagtatacacctggctccgagccctgtcttcctttcagagcgggcaacaatctcaatacactcttaacgaacgaaccgatttaagcgaatgcacgcatatactcaccactttacgatttcacgactaagtcatgacaaaactagaatatattccggggcaacctttcatttgcttttcttagtggggcagatacccagttaacacattttacatcgctttgttgacgacttcttctttaccattgcatgtctagcgttgcttgctcctgtacgagatattgcagttgctgtactgcatattacaagaatcggttttggcacttcttcctgatctcttggattggtttacatatttactcatctttcctgcgtgtacagcatagcaagatcatgttctctcttgtccaaatctttgacagatcaaagtagttgacaggctggatgggccgattgttggtaatagagcatggaaactttagcctaaccgccatctgctctgcgagacacttccagatctatttaataccttgctatcatcgtccgatattattaatctcaagaagcctccattcctcaaaacgaccaaaataaaagcgaagcggaccagtaatacaatatctcaagcgtggactagagcacaccgaatcaaagaatgaggtacgcatcctccccctcactctcgacactgtcaccataagtagcagcttcaactccagcttccgttctgacatgcccgtccgaagcattccaggtataccaaaattcatagctcatgactgtgtgatccgcgtacataagcatgagtctgtaccggcgcgaggggttccagcctcgccagctctcctcgggctggtaggagcgggttgcgcgggcgtggcattcgggaagtgtaaattcttgttcagaatcgcttcctgatgaagacaatgagttattggtttccttgcactggaaaagcaaatcattcatgctcgttccacgctcagtctcagtctccatttccttcccctcagcgtaagggtcctgcggaatataaggaatatccggttgaatctcaaacccttgcatcggcgcgacactcatccccaacagtggcacaagtgggcgctcgccatacttttcctggctctcaagcggaacaatccaatcaactcgaaaggtgcggccagttgtgggcgactcagtaagagcaataatagcggcccgacccttctgggaagctgcgacgacgatcccatgctcgggaatgtatttgaccatgttgaagcgatcgaagccgcgaattgaaactatgggttgagtgaagcgttggaggagcggggcgccgcaaaggacgctggcgttcagggagaaaggatgtgggataaggcagatgttggtgtgagagaagtgaaggatggggaagttggagtttggtggtgctattcggcgagtcagcgttttctgtatactgtcttcactgggaactagaaaattgttcttgttagggaaagacaaacggtggcttagataacgtacaagttgagaaatgcagaccaaagtcatcaagagggtggtgcgctgtttcgtcctcctcagatgtgctcccgctcgaatcagaagcgtcgacttccatttccagctgaaagtggtcatcatcatcatcccccatagtttctgaaaggagggcttggacttcatggatatcgacaccagcagtctcgcggagagcaatctcaaggatgtcttcaggagaaagaatgcggcttgggtcatttgctatggcacttaagagcgcgtgactgcctgtagtttgctgttgttctgaaatgtggtccgagtcagaagcgctgtctccgctcagaatatccgcattaagagaaccgtcaactgcctggtggctaatagcttctgcggaatcgtgattacgtgcgttgctcggcacaacagcctgagctttccgtgcatcactcttttcctgggcgttatgattcccatttataagacaatctgcctcaaagaaatcaggcaatagggtctgttttggctcggccttaacggcaggtgggaagtggctgtagagacgcgttgaatctggaactcttttggtaaggcttgtcaaatcgagaatctcctgcttatttctcacgcgccgccggggctggccaccacatgcttcttcctcggtcttaactaagtggaatgagcgcgggtcaagggcaatgacggaccacccgcggtcactaagggacagttagcgaaaggaatgctcgaagataatacttgcggaaaagcttacccgtcgtccagatacgcgtcttcaggtatactccacggtgccacattattgaggtgatattcgttgaagggactcaagcttctccacacattccaaactatcgttctattgtagatatctgtactgaccatccacatcccattcggatcaaaatcagtgttcagaaaaccaacagatggtatattggtgaaatgaccactgtaggttagctttatattccgagtacgatatttttctggcatcagctgctgcagttgtttgaactgtccttcagtccgtatatgtagccacgtttggccatactccgtagcatcatcagccttttctagctgacgaaataaatcatcgcccttatccgaccctgggctgacaagcgcaaaagcaaagacagtcacatatccggtattggcagatacggcgattaaacgagcgaacttgtgaatggctaggccccaagcactggcaccgacatactcaatgaaaaagggctccacctcggagccatctagaggcctggctcttccgttatcaacagctctttttagagttgagtaaatggcttcaactcggtatccacaaacattgcccgagtccgttgccaggagcagaacctcttcgcgaccgagatcgtccacaaggatgttgttaatttcatgtggagatgctggccggatataaccggtagcgtgaggctctttcataacaggcgtgataatcatttcaggcctggaacctaatacctgcgaggccccgactggttcccagacatagatctggtggccgcaagccacgaacagtagattccgccgttgggacagtgcagtctatcatcctgttagaatggctaggggtgatacaatgcaagtctgcgcttaattaccagattacaacgccaggaagaagtccggggaggatggatagcatcgtctctgttgcttcaatcagtgcctgtgacgggcatggtcggccaaaacaggaacatacaaaggatactaggccaatatcagtatattataacatgagattctcatgaagaaaagcaagcattcacatacccgtttcgatcccttttcaacattcagtgctcttaattgaagacctcttccgtactgagctttcgggcttattgccttcttgttatcgttcgactccattttctgatcaactactacggttatcgggtgttttaccgctaatacgagccacgatataatcaagagagatgcgcaaggtcagcgagtctccttgacagaaggttggagaagcgaaaattatgatgaaaaagcaggcgcggatatatgtatcagaatcggactgtgcactgcatcacacaaagtgagaggtctttcactcttcaatacacccgtgtcgagcatctttagattcccacatcgaaagacagattggaaaacaatgtgccctctgctcttcagagtctagggttgatgaggggaacggtgaagtcattcccaaacatgagctaatggctgccttgttcctgcggcagaaagacgcacgtgccacttctagccttccagcggagctcgagctcattatgctcagatactcaacattcttcaacacaagagagatacctatctacgcgtcatggatctcgttgccggcgtccgaaaagaaggcagccggtgagtaagcctttgatacactgggctcaatctttcgccatgactgactgatatcttcagcggcggccgcggcgacttcaaatggtcggacgttaaagattcttcacatcgcgaaaactaccttggtcattctctcatggcacctgttggacgatggcaacagggtaaagacttacaatggtacacgcgcggagaggatgacccagaggaagcggccagaaagggacgagaggagcgacagcgcgtcaaagctgcggaggaggaggccatggctcgggctctgggtcttccattaccatcccagaacgcgaacctgatgccgttagggggggaggaaagaccggcaactagcgggaattcagatgagaagacaacaggtatgggaggaacaatcagttcaattataccgtgcatttggctgatgagctggagtagaacgggactcaaaagacagtcggcggcgaaagcgcgagcgaacacggagtccaagaagggttcgtgatcgcgatggtgaacgtggtggtgatagggatcgaggacacagacattacaggcgatatgatgaacgagaccaccggagtcaccgaagccatagacgcagatcacggtcaagttcggtcgatcgggacaaggagcgccataggagaaggtcgcggtcacggtcgaggagtagagataggggcgagagaattaggcacggaagacatcgagatggcggcccacgcagaccatgagaagaggattcttattatcaaaaacaatacgtgttatgagaggtgggatggcgtcaggcgttgcttggttcacatggactcaaaagtccgcaagttttttcgtctatgctacagttctatacaagactcgagacatgcggtttatagctcgtcatgacctgtcttctcgctggcgggaaggtcaggcatagccatcatttttaccaccaagctggtccagcctgtaaagtgctgcgtccgctgtccctttccgtttcaggattgtactgctcccagcaaagccagtgtttttcactcccgtatacattttcaccaggttctttcgagacctgatacaatttggg

SEQ ID NO: 4139 - DNA, 2057 bp, Emericella nidulans
tcgcgacgcatttctgctttgatgagaaactggacagtttgtcagaagctcgggtctgtttggtgtggttattgtacatatacatatattcgttagagataccctatcttacagtgcgctttcaagaaattgagatgattacttccgcatcactttcactccactgtctggtacaggcatcctgcgcccgaattcgtaatcgttatcatcgtcgtcgtcctcgttccctgcctggtaggttgcagcttgctggtgattttttatctcctcctctcgctgccgtcgttccaactcatcgtactcgtctttggcatctatccaacgctcttgaatatcacggatatccatggaccccattccttcccgaacagccacttgccaaacggagtcatttgcgccttctgcaggcccaaacacgtatccacttgcgcggtcaatggcccggagcaaattcatcatgctctttttatcttctacagccagtgtttcgaagcccacgagtccaaactcctcaatcagtgtgatgatggcgttgttcagtgctccgaacttctcgtgcgatagccgggaggactctgcctctaagtgggggaggaggtatgtaaggtcctgaacctcggtgtagaaatctaggttgaaaggcagcgaagtataattggacaaattatcgatttttgttaggacgttgagatgtggaaggtccatttggagcatggcacgcaagcatagaataagagaggagatgtacatcgatggcagggtgaggttgtaggagtcgattaggtgtagtactattagctgtacgcacagatgttagccggggctatgccattaaataaggacaaatgcgtaacgaactctatagcccatcttctggatcttgaagaagatattccgtaaggacgaatggtgagtgaaaatttctacctggccgggacaatcgaagataatatagtcctctaataacgccaaagctattagcttatgacggtattgtagaagtcaaagcatcggcacaaaatgcgcatacctccgagctctttcaacccttcctccaagaagtcaaagttctcctctagctcttccaacgcatacaaaacaccgccgttcggacccaattgatcctcactcatgatttcctccaacgtcacaagatcacgcacgttcagcgcgcagggatatgatgttttgtcagttgccgggtcgaggttcgcgaccgagcatatgcgccctatagctcccaggaactggtgcatgccattgcaataggtcgacttgcctgcacccggaggacctataccgagttgtgcgaatggcatgacggttctctaggaagtataaaaaataaaccctgatggggaagaaagaaagtcgagtcgaagttcattgagagcgcggattatcgaaaggcggtggcagaaaatgaagttggaggagccgcatcatcaatgcctaatctaggctgaccagtcgacaactctaaactaagctacagccattgactgttgtgggccaatcaatatggcatcgagtaagcttcagatgcacttaaaattgactgaaaagtgctgacccaactctagatcaatttaccattacatcgccgccgacggatgcgatttccgcgttgaagttctctcccgctcccgattcgacgcgattcgttgtatcgtcatgggataagaatgtttatgtctacgacttgcgggacgagaacggagctgcaggtgaagggaaattactacagaaattcgagcaccgtgccccggtgcttgacgcgtgtttcggagccactgaagacgagatctttacagccgggttggactgggatgtgaagaggtgagtgcgtttgtcctttcttgacagctacatgcctgtacgtgttcctaactaggtgtcttcaatataggatcgatatagcatctgctagtcaaaccgtcctcagcagccacgatgccggcgtccgcagcgttgtctacagtaaggagtacagcatggtcatatccgcctcgtgggataacacgttacatgtgcatcgccttgccggtgacaggagt

SEQ ID NO: 4140 - DNA, 2543 bp, Emericella nidulans
ttcgggttcgtagccatcagattcaacactgtcagggcctcgcgttcgcatcatgtcattctgactggaccgcagagcttccatgtcgtccagaagctgttccagcatatcctcaatccttgacaggtcattgccagacttgagactcaatcccttcagtgcacgcttaaacaagttcttaccgtcgctgggaatcttctccatcttccacagatgcctgacgggttctgcttccactagccggtagcgggcgcggaccattaatggccttgtacgttcgctcattcgaatccagaatcatcccatcctgttgggcgatgaatttcttcatttcctcgaatgagttgcgcatttcagcagcgcttcgaactagagtcaccaggatctctgtgtctcgagcattgcgctgagcatcgcgaaccgtgagctgtagatgtcagacaatgttccattcggttaaaccttaagcaaaagacttacatggtccattagtgcaacgatatcttttgactggatcctctcgataccccgtcctgttgcactgtcatacaagggtgaacccactccatgggagtagccactgaagtgtcgctgatgcgatggctcgaatgcgtcatctccagggctatcaaacaggcctaaaccgttggtgtcaatcccactaaatcccttgattcctggctgaggacttggggagatagggttagcagcggagacgtagccttcatctttggccccagggggtgtactaaagatgggcccattcgcgtattgctggccctggtaggcatcggcataatcgtcaccaggataatagtcgtggccatattcttgtctagacgaagccaagccgagaccagcaccagcggcggcagcagtagcagcgttgtcgaaaagaggtgaatgaccgccctttccagatgatgaattgtactgccaggtactatcagggccaactcctgccgcgggaccttgaatgattgacgggtttgtattaatttctgattcatcttccgggcttagttcacggtcctgtggaggaggactctcgccatgctcgtcgggcagtaattccaccggctcagtcaagtcatcaatggattgcgtgacgctttggggcggggacgtgacgcccattcgtctaggaaaggaagttgcgtctgggctcgaggaaacattgtgttgttgtttcagagggcttcctcggcgagaagttggcgaatgttgatttagctgacctaacgaccttgtgctgccagtctcgccctgcacgaaggtgttcgactgcgagtggcttcctgcagactggttcgactttgtgtccaatattgacgggtcaagaactgaggcaacagccgactcaacggcagctggatggacaaatcgaggattcacgccgacaccttcggcaacagggcgaccttggtttgccttttcaataaaatcgctctcgctaccgtcagcgtaattggccatgtgcttcgggtcaatgcttgcagtctccgccagtgagtgacggtaggctccatcgtctgactcttcttgccaagtcttgtctctcagagtttggttagaaagcacagatgacccttcgtagccaaggtcgggaccagcctccttctgatagcgtgaaatctcatcttggctttcagcagtgatgccttctcgtttagaccttgccaggttcgtactcggtgctgaggaaagtgaatcgattgagagttttggttccatttctctctcatctcccgagtactcctgcgggacatgttgagtcgagccttgtcggacgtgcgactcactctgattgctggccacactctggattgggctcagagcgcgtctgctgcccccatgaacgagctcgtttgagtcagaatgggtgtctagcagattcgccgctgctgccgcggcaatagcgccagcggcagcctcgacagacggcgaatggctccattcacggccattgtcagaggcactgtgaaccgacaagttgtggcttgaaatgttactgtgcttaagccccaaatcatgtcgcgagtctcgaggctcaggttctgctgtttgctcagaaagaagggaggctcttgtcatctccgactcgagagcactgcggaacggcatcggagcgacattatgcttttggacaccagttcagtttcgttgatgtttttaggctcgctccctctccttgattcggacttgcacagacttgaattcgagtcatgatgtttgaggttgttggcggttaaacgactagcgacaattccagccctctcggcgtcacgtagacctttgctcttctgtcggcgtaccatatcttgttcggacagttcgggtcgtgagcctctgacgtagcccgattccgcagtcatctcactgtcccggcttgccctacgctctttttgagacgagatggatccatcggcaagaacaattccctcatcccggctgtctttgttgaggacaaccttgggttttcgcacgtttggacgcttgcgtgcttggagagtcgccttacaaggccatcgcgggattcagaa

SEQ ID NO: 4141 - DNA, 4286 bp, Emericella nidulans
agtctctcttactgagggcgctgcggattcaactctaaccctttatcataccaactctgaaaacatttaaatcgtctctgggctgctctgcatcgtcccttatcaaataaacagagtgttcaaagcgttgagtcggcaaatatgggactaatattcaatgcgacatactgcagcagtcaggtccacagaagctggtatgtaggtaatgttgtgtgcaatatcgcgcatacagccttggctggaacaggcccgcgaattaatcaggattttctcaaggcagtgtaaaacgccatgatagatggctcggatagatggcatttgagcgtggtttagtataaatacgagtagcatgtcagtacacctcatggaatacctcacaaggtaggaactctgatattattgctagatgttgttttaccagttaacgaggagtctagaataaaatttgacatgtgagacccttcctggataacttgaagcaagaaacactgtgatactttgcaagcgtcttttagggctaataggtcttaacacgttgaatatatagatctcactacggacgaatggaaggataagcgctggcgctggtggtatttcttgggtaagaaagcatcgtgatgaagcctagacaagccattacatcgtcttccgtaaaaggttcttttcagatccagtggattttgccttgcaaaaaagaagggtacaggatttctagatagaatatgtaaaaatactataacctcagtcctcaaatgccgtggatctgcgtagctaaacctgccctcagtcatcaccgtcgtctgagtagtgcggctcgtcatcggaatggtgcgagtgctcctcgtcgctgttctcagctgtgacaaattgttagcaccatgcgtagacccaaccttagattccaaagggaagaaaaagggaagacataccaagctcatgccccagaatagcacccccaacggctccaattgccagacccgctgcacctgctgctaagatctttccggtatcgctcttcttctcttccttctggtactctccgccatatccctggtcatgaggcgggtaggccggcgcgccataatcctgaggcgggtatgctggagcaggaggtggaggggcgtagtactccccggggccagaacgggacgcctcgctgtagctaacgtcatcaggaagcgcccactctgagcgacccgtcgcggtctcaacatagaaggctcggcgagccctaggctcccattcttggatccagcctattgggagagggggcggggggtatgaagggggtcgggcagagggtggagggccggagtatggcggacgggagtcataggagcgggattcctcgtagggaggccgctcgtaggggggccgggattcataggagcggtgttcctcatacggagggcgctcgtatgggggccgctcgtagtgagggcgttctgcgggtggtgctccatcgtagggagggcggtcataggggggtcgctcatagggcgccggtgggcgttcgccgtagtagtcgcgggcttcgccgtagtaggacatgtttctgtgcaaggagattgtaccagctgatgggtaggagatgacaggataacagttgggagaggaaacaagaggagggctacgagctttaaataatcttctccagcacggagggacaactacagaaaggacatcaggctcccaaaaacgcgcagtcccacaccatgacaactagattgcacacctcatcttcaaactccttacccctgttctagtatttgcgcacgcgctggtttcatcaaatttttggtagaacattggagaatcaccactgtctcggccctacaaacgaagcacagccattcgtcgcggacagcgtcagaggcaggcccggcgctaataacgaatgcatccacctgttatggggctttgccaatagtccagtggctagtgttcgctatcaaatgcagcaaaatagccagcagcataaacggccctaacaactccctgtggctttgcttcgtctggtgggacgaactgcaggatagtggatattaagcaatcagtgcaaaacaagcagccgatggttatttgtatttgtatttctgtccagatcatttgattctcgttgagtcctttcaggttggctctgactgcctggttgtggtcaaggcgtaaaggcaaaccctaaatatagtctattactgctatacctagcctcaggctgcaagttgggcttggcgcgagttcttttgcgatatcacccgatcagattgccctaactcctcactagccacgcttctcccgcaacaccgccacgtatcagatatatggggcatcccacttgaagactcatggacactgaagatccatccctgactcttgaggcatttaacatcagccacgtggagcttatcgagtggctgtgttcaggtagcagactatggctggtttttgcttacacatccaatctatcgctctctcaactcacgactcgaggatgacggggattctgactcgctgtagctattttctgaacagagaagtcatcatatgggcatgttgggaggtgcagagaggatatagacttctaatttgcatgaccattcttttgataagccgtaccatgaggatgatatttctgtggatcggtggaagatcctgtttttatccgtcgacgttgacgctgtatgaaatgtcagagcttgacaaaccccttatcctctacttgtcctccaccgtgtgacgctgtcaaattcagggtgcttcgagatcacccgttgccagccgcgtaaattgcctgtatgtcaatcaagttgcctatgtggcatgcagcgtcgagtatagatagcgcagactcgtgccctttatggacattgataacgggctgtttcagttcgtttcctgatcttcaaggggtgctcagtttgcggagactctcatcccctgtcgcggggcaagaatagaaggagtggagaccgccgtggctacgtatacgcctgacactccacattgaaagcaggtattggagtatgccaagagtcgttgcagataatctgactcaaaagaggaagagttttgggtagaggaagccgtgatgaatggccgtcagcgaggacaactgtcatctcgttagctatctcgtgttgtgtagtgagtgggtatgatataggctcaaaaaaggtgagagaggtacctccatagacaaaacctggtcagcagccatgccgtacagactgctcaagggcgaatggccaccagaagcagtatagccaaccccagaccaacagtcacagcctcgccaccaatgacagtacgactccgtctcgttggcgaactcgtcgcctcccagacctggcgccagcaccgaacttgattgcagggccgacgtagccgttgtcagcatgatactctggatagaaggctttgtctttcagccagtagtccagatggatagggcacccttcccggcggccttgccgttgaaatcgtgcccagtgttctcgaccaccagccgcaagttcggattacgcgcgaagttgacggccatctggatctgggctacggtcgtggcgttgaccacgtaggttgggtacccgccctgcgtgcaggtgtctgtgtagttatagcctggaggaatacaggtgcggccttcgtagagcggcagcatgatagagactgggtcgtccatgctgtgtcgttattatggtgctcattctcaaaagaactaagatgaagaagagactcaccggatgtctgagatgatccagttagtggttatctcggagcacttgtccgcgtcgtactcgggccagtccgggtagcagtatgcagccagcggagtggccttgatcaagctccctcccagcaggtcaaagatctcccatgtcaaggctgggccactctttgtcgcccggcatgagcttgcaacagtgcctgctctgcctggggagactcgaactggccgacgcattgctgaacctgaacaggcctgagatggaggtgctgtaggctgaagcaaccttgttcaagacagcatcggtcagctgcaccgtctcgctggggaagagagtggaagacgatgcatttgccgcagctgacactgccaggatggccagcttcgagactacgttcttccatcttctcggcgcgatggaagaaatgggagagagacaccactggcccggaggaaaaccggcttaagtagagctagagcctcctagaaaattgaggtttcgagctacgcgaggtgctagcagatggtctgcccatggtcactgccggcgtgaacgcta

SEQ ID NO: 4142 - DNA, 2677 bp, Emericella nidulans
gccatgggcgcacactcgtacaggatacgcagcttgcccttggggctcttcgagtcggccgggtaagcgaagactccaccgtagagcagagtacggtaagcgtctgcaaccatggaaccgatataacgcgcgctgtagggcttcttgccctcaccgggacgcttaagagagtcaaagtaggcgttgcaccagtcgtcccagtacatgctgttaccctcgttgacggagtagatcgcgcggctggggggcaacttcatgttggggtgtgtgaggatgaactcgcccagagagttctcgagagtgaatccattgacgccgccgttcttcatcgtgatgacgagttgggctgaggcgccgtacatggtgaagcccgcggcaaccatttcggtacctgggaggagcacgtccttggctgtgaccttcttcccagggccgaggatgtcgtcagggagcctgaagatgccaaagatggtaccgaccgagacgtcatcgtcaaggttggaagagccgtcaatgggatcgcagactacagcgtagcgggcattggggtgttcgtcaaagatgatcgcttcttcctcctcctcggagacgaggatgcggcatttgccggatgtgcgcatagcggacacgaagaggtcatttccaataacgtccagctttttctggtcatcaccggttgtgtttgaggaaccggcgagaccggtcaggttgattaacgaggcacgacgaatatagtaggcgatggatttgaaggagaattggagcgcgtggcagaggagtcttgtttcaagcatgttagccgcagttttccagatccaagattcaagagacactcacgtgaagtcaccagtggcctcggggaccttggtttgttcttccgtgaagaatcgagagagtgtgacgatatcagtgttgatattctcttgtccgacagcgccgccgttgccagtgctgtttgtagtcatgtttacggattgaattggaagagcaaattgagtgacttgagtgactgagttcgcggggtaatagaggatatagttctcagtgacctcggttcaacggagaggagggagatataaggctggagacgaggtctgatcggaagagcgaggggtcggagggaaagccgcagggagagagtaatttcaggagtgttctatcacggacgtatgaaatccgccgcggcagcgcgcattgccctttaaaggcgcatcccatggccaggagcaatcttttgccgggcagtgaacgagccagaacgtcagagctgcccgggtgtggagagacttgacgccattcaatccagacatggccctgacccgatgacgaaaacacccgtcgctgctccccgcgctaactcgttcagtgcgcgcccaagccgagaccccgggattccccgcgatcatattctatctttctgtcgagataatatgttctataaaccaagcagcataagtggtggaataattgtcgcgggagaattcccagcgaggttatagcaggcctcaaaaagctcaagtctcaaagggtcgaggttgatctacagtaaccagttccaactgtaccagcaaggcacccacataacgtaataatgatagcgctcaataatactccgtagaacgataggaattatcgagaaaagtgggcttcggggtcagcagacttgcaaattcaatatttgtaaatcctgcctggtcgagaccgggaccctttaaagcagacacatgagtgtgtcaggtgatggactatagccgtccccagcgtccccgcggctgatatatgcgcgataaagtacgaagtagattttttcatgtatacgaacacctcggcaaacttgctctcatgggcttcaaaagataaaaaataaatcaagcttcgatctttcaatggcctgggctttgacaggcgaagtgttgtcggctagcgatcgttctctgagctgcaggtgagctaaggcttgaatatctccggctgtctttgtaaacattcctgcgggcctaattcgtacaaacagtgctacagccatttctagctggcttcgatactccgttcactgtagcccatggttatcatgggctggctcataccggcgttctgttattccgaaatatcttactaagcaaaacaactaacccgacaaagctagccctacgctagcggctcggtaaaactagccccagtcaagcagctaaaaaacttcgtggacttctttcagcttttctctccgtcaacactcgagctttcggtttccgagcttgatattccttgatgtttgggaatacataccataaagcactgcaattgcagcatgatccatacaatgattgactaaccttcgcctgcactcagcacagcgttgtctggtaagcgcttcgaactctgctctgcccgtctgcccgcaccctcccctttatgatgataaatagaaccatttcaaactagagtctttgaccctacggggcgtgaaaactcacttctttgcacgtcagtctgatgctttgcgaaagatctcgtcatgattcgccggcgccttgtctacttgagtgctaactcgagaacaggactaaccatctcagtaccttgaaaataccggctgttctcacagaggataccttaggagtaggtgctccctcattccgttatcttgattttttttttttgaatgatgctctttcgt

SEQ ID NO: 4143 - DNA, 3053 bp, Emericella nidulans
  unsure (1)..(3053): unsure at all n locations
gcgaggctgtgagggttccagcggattttgagtacgttcaaatcaggggtatagaccaggactaagtggtgagtacgggtagaaacatggattttggtctagcttggttggcgtggttgaacaggaggggaagcacgagtataaccggatccggatgtttgaaaattggataaataaaggctgacccaaagacagacggtttgagtctggaccttgcgctcaaatggccgtgctcgtctttcaagtgttaaaactgattgtgctacaggactaaatagacgaggtttaggttttagaacacaatgttagcgcaaataagccgccgtcgctgggtattaagctatatacagtatagatacaatcatacgtgcatagaatgctatgcaagccgctgcgtcttctcaacctccctttccatcatgcgcatctttatcactagaagccgtagctgcagcttcagccgccgctgtatcttgcaccttggtcatcccacgcctgaaaatcggcgactccagcacctcctcccagttatgcatcatctccgtgttcgtcgttgacatgcgcacctcgcctccagcacgctcgatcatctcctgctcatactcgtcaattgcgtcacctctcttcttgtcccagaaacaaactctccaatggcggttgctagtttcccgcatctgtcacggaatggttgagtcctgtccccgctgatacgtcatcgcgtgcgcaggtcgccggccagcgttacacgtccgtcgtggttgtccatctatgctcgtcgcagccggggtcgaagtccgtaagacacatgtaccagactttctggtcgtcgggcagccactcgaacgccgatttccaggggtctgtaaagtgttgcgcgaactgcttaacttgttcgaggcgttgcgcgttggtccaattctttgtggcttcttgttcttcgagaggtgagcgccaaaagatatagaaaagaaaagtacaggccgccggatccgggctggacgcatcatgcaatccaaggaacgagaagaaaccnnctcccatctgattcccgcaatgtagagcgggtgaaatgtccgcaaaaagcgcgcctgttcanttttacaccaagcctggacccaggtcgcgcaatnaggcaccgtccgtatacgtccattatgcggccctagcagcaattccctcactgtcgagcgcgctccatatgcgcccccaaccaagctcgccgttacactcgtctggccgtcagaaatacgccgttgcatatttcccatcgcccgagtactcaatggccgtcatcctatggttccaacggatatccagcccctcagaaagcaagtgccggagcttgcgccggcgcaggcggtagaatttcctcgcgggaacagtcgccatgacttcgccggttgcgccgttcagaaatttgagacagtcaacttctgcggtgggcgtagagggatcaacttggatcgattggatgcgcgaccacatggcttcaggcatgagggtttgcagcgactcggcgccccaatggaggcccatgttccagtcccggttctgggcgtctatgctgggatttttctcgacgatgatacatgggattccagcctgttttcattgtcagctcacttactcgtagctgcagaaggtaggagttgcggaaggtaagaaggacctttttcagtccctgcgcgagagcgagccccgttgagcctgtcctgccaagtcagtggtctctaccgatagtgtttgtgttagtgttataggaagtacgtacccgcacccacaatcaggacggtcacatgttctgtggacggactctcagcaacggcagggcgacgacccggcaagagggtcgatagtcttttgagcaggttcatcctggacgaggacgagggacgaagaggaggtcagagagcgaggagagatgagacgagataaaaggcagcatgacgcattgctctcaggaagtatcagcccatcaaatctccttgggttaatttatcggtggagccatggagacggggacgaggagccatgccgtgtgccgagccgaatctgcagtgcaagaacagagcagagcaggtagaacaggccagagagagcagagagagcagaggacaacagaggagaggctaatctctggctggaattcggttgggagagagttcagtgcagtagatttagaatgatagcctcagtcaagactgaatctcgtattttcaaggatacggtagagaacagagtaaacaagcttcaatagcatgagggtggagacgggaggagggaccagcagcattctgtcgtgtaagcgcgaggctgcagaattgcccgcataacgatattgtgcgcgcataaaaagctgtgcgtacggactacgaacgggatcctgatgctgactctggcttggctgcaccggggaatatgtcactgccgcccgcagtcacattttcatttatcaactggacagaaaatcaataagagtcaaatccggcttaatcactacgatgtactactgcgcccgtgccatggtcccttattttgcccccgagattcggtccggcccactctgctctgtgactgcgtgtcgaggcgagtgctcctatttcaccttcaagtccagctctttgtaccgccctcaacccgttaccacctaattcgcaggactatgacccaatacagcgacgacgatatcgattcggcgtacggcgacgactcgctcattggcgacgacacccagaccctgtcgacgtatatcaccgactaccgatacgagtttggccgccggtaccactcgtaccgcgatggcgcatactgggtacgccctccctcagtcaacgcgaccacttttgacgaggaggctgatttcgtagggcccgaacgatgagacagcgaatgcgcagcaggatctcgcccatcatatgtatttcctaaccctggacggaaaactgcacctggccccgatcgagaacccgcaggtaccaccaccgtctctcaccccgaccgttcggcgttgctgagcgagtgtttaggaaatcctcgacgtcggtaccgggacc

SEQ ID NO: 4144 - DNA, 1578 bp, Emericella nidulans
accatgtgtcaaagatctacaccatcacatcatcgccatcgtcatcatcaccaccaccatcaacatcattctatatcacgatgtctccctgcaacgaatgtaatttaatctccctgggtccagacaagtaggaggtcgggcggattgatcgaacaatagcagtactgtggactggaaggttgaattgaaccacaagctaccagagggcataccgtctatgacggcatccgttcggcctttcagtcctcccccgtttaccagtttgtcatcgagttcatcagttcatctgcgtaggcggctgttgtctaagctcgaccggtgtgttacgggacttttcccgacaaagggcctacattgcgattctagtcagcctggtcctgctggtgcgtacctgttggtgcgtgcctgttagtgcgtaaattcaattcatgtcattcaggaccccaatgttgtcggggcgttagggcgtcggggcgtatttgattgttgtgaaacatggtcgaggtcgagaggagtcgaagatcgtttgttgaaagtgacttgcaagccttaaggatcaggctggttcaggcttgtcgggtctcggcgctctgcgaagcgctaatcctgttcgggtggcgagttgtcccgtgaccagctcagggccaccacttcagggccacttaagctccaggcaggtaggtgagcgaccagtaacagtggccggcaggggcccgagagcttaaagcttggcttatctggcagtcaccagtggcatcaagaccttcctgcaagctgctccttgcttgtctctctcccctcttccatcctctctcccattctattcatcgatttgactcttggatctaatccatctcgctctttcgcttacgtccatcaccttatcacccactttactaaccattaccaactattacctatcgcatctctatcccttgcatcactcgtttactacagctcttacgcagctccaaggccactatgactaccaggtaccgcgtcgaatgtgagactgccctctcacatcggtcctgatgcagagctaatcgaagcctacctgttggagcagatgccctcaaggtgtgctgatccattccgtcacatacctctatttgctaacctccccagtctcaccgaagagaccagctggtatgtctaacccatttcccgtctaatctgccgagttcttggtcccttggtcccttggttatgggctcagctaatcctagctagatcgaatggatcaagggtcgtgctgtgcaacacttgtctgtccttgtctaatcagttcagggcctgcttgctgtcccgtttgtcctccattctcagccgacggccgtccaggaggaggacgccaccaagctcgccgcggttgctcatgatacgcaccagcgttacgccgagatcttcttggacgtcgagcgcctcttaaatgaccatagtaatgagtcttgggactccccgtctggtatggctactgacgacgttagttgaccacgagctcagcggtgccgctggcaagtccaagctcaaactgctcgttcccactgtcgggacgttcttacgcgtcttacctat

SEQ ID NO: 4145 - DNA, 1919 bp, Emericella nidulans
agtcggaggctcctagctcccccttgggtacaagcaatcttgctgctaacagcatgccgtaaatgtcgaccagaccaaagtccgcaccaggatcacctttcagcttctggaccagaccactgaggaggtacttattggttggagcatgcgtgagcaatttaagtgcagccggcggaaatgccatatggacccctagcctgttcttcaggtgagccacgagtctagtaaaattgcacccggtaatggaagaatgatagaggacctgaagccagcaactgccactaacaccagcagtgtaagtcacacagtcccagaggccagcctcttgtgtggccagatacgagccagtaccagcgacaagcgcgcgcaggccgactccggagccgtacatagagatgatgggaacatcatctggatgtatgtcctactcaaggatattcaagtaggccgacagcgcatgcaccgcatgcttcttccgcttgcgcctgaactccagctcatcatcgcagaggctattcccaacgcggaccgaggcctttcggagtatttcggatgcaggtcgggaacgtgagcctctctccagatttcgtccgccagagaacccggggccatagaaagttctcgttgtaatttctgcactgtttctgggagaaatttcgtccaatcgggaattatgtagttcttgagctggtcgagctctatccattcaggtgaaccgacggactgcttaaccccttcgaatctctgcatcatacttgaccagatagaggagtctggttcactgctatgaaagcttccctcgacgcgatcggtgttgctccgcccgggcctgccttctccaacagagtggtggacctgcccacgggcgcattgcgttgaagtggttgagtatgctgctttcggatcagaatgtagtaggaatagctgtgaattgttccgagctgcctcgattgaccagagaacacgacccccgacataaatcagggcggccggaggcgcaaaccgaatacagaatgccctcgcagcgcccattttgcgaaggatcccacgcctggcatgagaattgagggaagacatggaggctgcatcggggctttgggcgaatttaagtcgagactcttgtcgctcttccttggcacgaatcaccgtcgctgccccaggccccgtagagatctacagaaaccgccggccatcgtatcgtatgagagatgacgtcaaattttcacgtgatatgatagcaactgagcattggatcatcgtcgggccgcggctgccaattcgagactagcttgttgttagcttgtggctagcttggtgctgctccagggacgagggaacgttgagagctgccagcctgccagaccctgagctccccttcgaactaatatcacattgctttgtacgcgtgatcaacgtttgccgtaccgctgtttcatgaggaactgaataattcgtgaggccaggggcctcgttaactatcgctccttatccgctcactcttatccccccacattcgctttgatgcatgatatgccttatctgtacaattcgaagtcagcacgccgcttctcatttattatctaatatcctgcagcggtcacgccgccatggttgcgcctagggacacggcttttgccgaagaaagtgctgaagtggaggtgctgtacgccaaccttgagaagctcaagcgcctcacaaagaagatccaagggtcgctcgtacgcctcgaaacgggcggaaatgtcgtcaagcatgcaatcggacctatatatagcaacacacaatcgcttcagataacgaataataacatcgaccgggttattgaagccatcgaacgcctccggcagccactggatgcgaagaatcgagaagaaggggtcattcgggctgggtgagttatatttctgcataccagtcgt

SEQ ID NO: 4146 - DNA, 3829 bp, Emericella nidulans
ttcaacccatagttcttactgagataacaagcacaattcttcactcagctacagagccataccacagagatccaaagcaagcaaccaaacacaaacaacctaatcacaatgtccaaccgcgccgagagattcgctgaagacgattacgagcgtgagaatgacttctccgctcccgtctcaggcgagtatgaggacgactcctacgcccatgaaactggcacgcaggggttctctaaggggatccctgtgcagagcgacgacgcagcctacgacgatcccatgcagccgccgttttcgaacagcaaccagcaacttggtacatccgtttctatctgtcctcatcccgcttaaattggtaaaccgaggctaactggcatgattatgcagagcaagacgaacgcgaggctatagacaagtccaatatcattagcggcaagggcaggtcgcttcgtcactccaaaccccaggctcccagcggatacagtgaggggccggacgaggatgatctgcctgctgaagcgttcaacactggacgttctgatatgaagcggatttcgtgaacgaagttggattcatttcttgctagtcaaaatctgttctaatgacagcttaatgtgtataagttcgaacatgttaacatgtattgaatatgttgtgatttcgggtggtccctaattcccttcaccaaagtggccaatggctgaaattaaggaagaattcttgagtgtcgccgttactttctcgtagaagatgtcactcgtgttagatatattgccaacctgtgagactggccaatatccgggcggcttccaagttgggaatgggatgtgccattgttgcggttgagcaacaggcaaggttttatggccacgagttttgagccggtgaaggctgtggatgatcgtgtacaataaacccaggggtcaagtgtctcagcgcgcgggcgaatattataatcggccatggcgtttaattgtaaatgtagactgctgtagcaaatatattaagcgagcacccgtgtctgcgaatgttaggccatatttcacaacaagatgtagggaacatacaacaaattgttccagcgactgttcgaagagttcattgttcacactacaccaccaggatgctcggtaggcgatagagggttcttgaccactgttgaaattagccgtgcaactattttattaactgaaccaacgtaccatattccacgtagagattgatataaatctgctgcaaagcaacgcgcatacttgggcttttgacgtctgtgatcatcacgaatttgatgttcgttagagtctcgtaatagtgcagtttatactggctggtgcggtatgtcacgaagctaaaatcaaaaatttgtcaacgtctggctgccttcaagaataccaaccacagaactcacttgtcgtcctctcctcccagctttcgcaccatattccgaagcgcaaatacagtaccgaagatcagcttcgcatcatcgtctgttgaccgtgcagattgatttggaacgggggcgattccgttggctgctgtgagagtatcggaggtaggccgcgaagatttgccaacgattgaggcaggtcgagggagccatcgccgtttatagatgcactcggctgataagcacagtattagcgcctgcgatgagttcgggctggttcgtcttaccatgtcgatcgaagatgtagaaggagtaaacggtcatgacgctggatttccgcaagagactggaccctccaatccaagtgctatcaatcagaagagcttgatgagtctattccaatatcgattggtttggttgatggctgatggactggtttaggggtgacgatgtcgcgataaggagatgtgtcggggatgaattgggcggtgaaccgatgtttacatgggacaaacactctaggtatgtcctaagcgcttccttggacatagagtagaagtaggtctagatttcgtggaagggattttcagcggtggacggacgatgtcataacgtaggaaactactgctggtggaaaagtagacctgtccgttatagtagtttcttcgattcctccctccactgtggtcccgtcctgaccacaacttccccgactgcgatctattattgtagagcgcccagagacatccagtgcctagtgtttctcccctgccacacccttcttgaactcacacttactccggagcacaatttcatcggtaacaaagtcacctttgctatagtaagtggcgtcttatcgtaaccgctgtgcccctccacctcccccacattctctgacaggcacccggatttcagcatctttgcgcgccttcttgtcaatatcccaataactaccgtgtttaacaatatcgctactggctctctgacacccggtgcgtgattaaccgatggccaacgagggtgctggctctctgcaacaggatgccagtccaggttcttctgctcggccagagccttatcctcgcccaagtccagcccgctatgcgtaagtttctttgcttctggccccatcgcaagcaatatatctttcttgagagatggggttataggatgcttactcggcatcctgcatttcagctccacaccttcgtttgagagccctcagagacatcatcgccgtaatccaatagcccggcgtcctgtgaaggtggcacccctttcctttcacacgcaccttttactttgttcagacagtctttattgactgcagcccaggaaactctcaatgctcggtcagaatatactctcagccaagatgatggcactgcggacgatagaatcaaccaatatgtgattaagcaggagattggccgcggctcgtttggtgcggtgcatgttgctgttgaccagtatggaaatgaatatgtgagggctttgtttacttcgagtacatattcagactaaccaaactttaggctgtcaaagagttttccaaggcgcgtctaagaaaacgcgcaaaatcgcaacttctgagacagtctcgaggtccaaaacgtccagcagatggcctaaactccccttttcatcgccagggaccgggacttggagacgaagagatgaaaaatgctctctattttatcaaagaagaaattgccattatgaagaagttacaccacaacaatctagtatccttgatagaggtactggacgacccgacccaagattctctatatatggtcatggagatgtgcaagaagggcgtggtcatgaaggtcactctcgaagagagggcggatccctacgatgacgagcgttgtcgctgctggtttcgtgacctcattttgggcattgagtatttacatgcccagggtatcgtccaccgtgatatcaagcccgacaactgcctgataacgaacgatgatgttctcaaagttgtcgattttggcgtatcagaaatgttcgaaaagaattcggacatgtttacggccaaatctgctggatctcctgcctttctgccaccggaactctgcgttgttaagcacggcgatgtatctggaaaggcggcggatatatggtccatgggcgtgaccttgtattgtttgcgctacggcaagcttcctttcgaggagcacagcattatcgaactctacgatgccataaaaaaccgcccgattgtttgcgacggcgaaactgacgaagtttttaaagatttgatgttgcgaattttggaaaaagaccctgcgaaaagaatacagatggacgagctgagggtacgtggtatcgcttggattgctgattagttctaacgggatataggagcatccctgggtgacgaagaatggcatggatcctttactgccaaagagtgagaatacggcaggc

SEQ ID NO: 4147 - DNA, 3737 bp, Emericella nidulans
ggaaggccacgggttttcctgtctccttgtacaaccatttgtactcattctgggtgatttatatgacaaccgcttgggtaactacatcttcctagatacctgcggtgcagcccagtccaacgttcctcccggtacgggatcgaaaatcaccaatcaccctaacaattaatgggcgtcaaatgtgattatagctatgttcagtgatggcttgtataatttcaacgttttcttgtgctcggtctttttccttcttctggcttatggtttctatttttgggcaacatccatgctctgccctgtcctgctgtaccataatcccattgacccagagttagtgttcgcctagctaggttcgggttgtctcgttcaataatttatatcttctctatccatgtacttattcatacttgcctggccttatactttaaagaatacttggtgtcgcttaatcgatgacgtattcgcaactccatttcatcgctatactgtctatagcttattgataccatgcatagcaggactctgcccgatatctagtcaacaatacaggttttgctatcttcgattaaggttcatcgacgttcgcatcacagctcgtcgttgaacaaagattaatgagcggtgcatacctaggcctcggatacttggtttagagggattgcttgctagctgtatgtctgtccctggcgccatcatgttgggctcggacaagctgactccgaatctttgggtaacgcaagcagttacttgatgtaattcagactctgctgataagcagtttcacaggaactgcagataatagtcctagacacctgttccggggaacgctgtgcctcctttgctaaggacgatcatgccacgctcacgagcaatatagcctttcataaggccctagaaatgataattagcaagcactccgattcggaaagtctccccagcactcactttgtagattagattcgatagcaggcattcaacttcatcaatatcaactcgggctcgcgcgtctgcatgggtcccgatccgcagcgctgctgcaaattcggcaacgggtattcttgtacgtcggatcagtggctgtccgtctttaggttcttcgaatccaccagctatgaaaacttttcggaacagattgcgcaacgctatgtctcggcctcgctcaagtggtaggtagatgcgtctcctgacaaagtcttcttcgcccgcagacatagcggcgtcaaagccatggagatcaccctttcggatgcagtcgcataatgggcgaaacagcgtttcaagacgtggaaagtcttgaagaagcttcttgctcggtaatgtatgagtgttgacgatatggcagggcacaagatacgttaagatcaaccttccaaatagtcagcgatagaggtctcaatggggagacgatacaactgactccctgttcttgacagaacttttctgacagtagttccaagcatatgcaaggtgctcctctgccttgttcgggtaagctctcaaaaacgagatgactatgaatgacctcctacctcggcatagttctcatccagaaaaaaaatgacacccacaaagtagttaaacgtcactatgtgcgatctgggatagagttccttatctggtaaatcgtgtgactgggcattaagagcacgcaggagatttttggaaagtccgacagcattgatctgggacttcaattagttgttgctcttcggaaaagtaaaacatcgtatctctcacaccttaaaatatgttttgaataggagatttgacatataatagacgccccattttcgcgattcttcttttggcgctctacaatattttgttagagatgggaacgtaccgagacatgacttcgtctcacctgtcattgagacacagggtaaacattcggttcagtacacgggcagcttcctcagttttcgcgttcttcccaaagtcggtgaccatatcatcctctgagaactccacagatccctgggacgaagattccgcgtcggccttggacgcgaagacccgcaggtactttccaactacataaagacaaggtatggtccaggtttccagcccaggattcgtgtaagctctaatcagcacatgggccagatctttccagttatcaaaaacgttagcccagctggcgcgtgatgcgaattcatcgaacttgacgatttctccgactgctttccagtatgctgaaaagatatcaacccaggcgttgaggtcttgcttcggtatcttctctccattgagctgagatatgtagtatcgtagacttgcaggtaattgcgcagcattggaaaagtagtagaaagacttcaagcggtcggggtgttccggcgtatcgaccggggtgagggcagctgctaggcgagggccggacccaagcctgtgccccgcttcgaggtctcgcagaatggtgtccatgggtagggatgattaaaggcacggccgctgggagatattatatcaaggggtctgcattctttacgaaatcgtgctttctgtcggctgtccctgcatcggagctatcatgaagttatgaaaccactctccagatcgaaacggaagtggggaatggtgctcgggcggccagacaatggaaaagcggcactaacttcaccagccacggtggctgtggtccatccaaacgggactagcgtttttgccaagcctctaggtcgcttagacgaagggcggcagccctaaactcccccaatttcacaaatcttccattttcgtgaggagacaacccggcacacctatatcgacaactaatcgacacagcgtcaataaaagtgagtcaaacctacgataaccttgtgacttgctgaagaaagtataactgactgtcaattttccagatgggtgagtcaaccttttatttccaatacccgtatcccagttgagtcggcaaatcccacgatcgttgagcgactccttccggaccaatggacaatgaataaatctctttcgcatcgctttaattgaagattcccgggaaaatatctacgcttcatatggaggaactggacggcaggaaacaaacgtgatggaaagagataattttttcgggagccgacacccgcacatacaattctgcccatctttagccgaccgtttgattgtcctccgaatacgggattagtcgccaaacgctgccgattcactgggatataaaaaaggattcacatgaaatcctaggaggaaaaccaactgacggatataccatagggcgtctcaccgagtaccaggtcatcgggcgtcatctgcccaccgaggccaaccccacgcccaagctgtaccgcatgcgcatctttgcgcccaacgctgtcgtggctaagtcgcggttctggtacttcctgacccagctccgcaaggtcaagaaggccaacggtgagatcgtcagcctcaacgtggtatgtttcaacggcgcctatgaaggttgaacagactgttgacatccgtatcagatccacgagaagcgccccctcaaggtcaagaacttcggtatctggctccgctacgactcccgctccggcacccacaacatgtacaaggagttccgtgagatgagcaggaccgaggccgttgaggatctttaccaggacatggctgctcgccaccgtgcccgtttcggctccatccacgtacgtttagactgaatttgttctcgctttgataagcgtccctaacactcagtatacagatcctcaaggttgtcgagatcgagaagg

SEQ ID NO: 4148 - DNA, 3003 bp, Emericella nidulans
tggctctcagtttcccattccactccttctgccgtgccctcgccttcttcccgctcctgaacttcatcaacaccatataccggtttgcccgcgctgtgcgaatcatgcgaaaatgactaacgtcgtccattgtcgcctcacccacaaaccccagcaagtcagaagcagacatgtaagaaggcacagcaagtatacacagcgtcgtgcagtcatattcagcctgtgaagccaactctgaccctgcatttgacccactggcccgcgccttgccatttccgcttcctcctctgatctcagtatcagcatacgaccgccgcgcagctgcagaagaccctttcagctcagccgggtactcatcggtacccaaaaacggcgtttcgttcgcgtcacggtaaagatgtacaatcccccaaacgctatcggacgtcttctgatcgagcggcgtgtaatgaccctttgtacgaagaccacctaggatttcggttccgatgcctgtcgtgacggggttgtttctggacgatggaatcatatcgatgcactcaacggaaattttatctagtcgcagatcgttttcgagagtgaatgcgcaggcgggggatcttgataagcgcggtgccggccaagaggagctagtgcttgctggggggggggcaccaggattcctggtagagtcgggactggcccatttactctttttgtgtatctgattgagtgaacttcggctaaaggagcttgacggtcgcttctgaaaggggagaagagcttcgcaagcagactcgaaagataatgatgtcgtcagagatgagtctctggtaaagctattcaggtcggactgagggcgtgagaagagttcaatcgcgagatgataaaagtaggagggcatcccggccgattgatcatcatgtcagcttgtctgtttcttcacctccattcactgaacagtagaaaaaggtgccgttcagaatccccacgatatgcggcatttgtcacgtgagactttgccaccgacatgaagtatgatatttgattcaaaatagacatgccaggtgttttggggtgaccactcagaaaatagtttcgagtttgaatctgaccaaacctcgcgtgcttgcttacgatcttctcacagaggagctaactatagaaggtatagctgaggtatatttacgaaaaatcaaagtgcaagaaacagtctatgtgtttcattcagtagataaaggatagaactatcataacaccgtcaaggtgacatgtgaggcaacaaagaaggtataaggcttgcccagattaaccgtgaagaataagaaacccatccaacgccgcgcaggttggctaacccgtagatgagccgtaagatcgaaatcaaagagagtcattaattgccgccgcggagacggaggaccaggtggagagtactctccttctggatattataatccgagagcgtacgtccatcctcgagctgcttaccagcgaagataagacgctgctggtctggcgggattcccctctttgtcttggattttcgtcttaacattgtcgatcgtgtctgagctctcaacttctaatgtgatagtcttcccagtaagtgtcttgacaaagatctgcataccaccacgaagacgaaggacgaggtgaagtgtggactctttctgaatgttataatcagaaagcgtccgtccatcctcaagctgctttccggcaaaaatgagacgctgctggtcaggaggaataccctccttgtcctgaatcttcgacttcacattgtcgattgtatctgaagattccacctccaacgtgatcgtctttccggtgagggtcttaacgaatatttgcataccaccacgaaggcggaggaccaagtgaagggtagattccttctggatattgtagtcagacaatgtacggccgtcctcgagttgcttgccggcgaagatcaagcgctgctggtcaggagggatgccctccttgtcctggatcttggtcttcacattgtcgatggtgtcgctggactcgacttcgagagtgatggtcttgccggtaagagtcttgacaactgccagattgttagcatgtcgcaggaccggtggccaacaagtggcgaaagaacttacaaatctgcattccaccacgcagacggagcacgaggtgcagagtggattccttctgaatgttgtagtcggaaagggtacggccgtcctcgagctgcttgccggcgaagatcaagcgctgctggtcaggagggatgccctccttgtcctggatcttggtcttcacattgtcgatagtgtcgctggactcgacctcaagagtgatggtcttgccggtgactacaaagaagaagtcagacacttcgattcgatattatgtggcaagcaatgagatacttacgggttttgacgaagatctgcatgatgtcgacaactagacttgatcgactatggttttaattgaaatggacgcagagagaagaataaggaaacagacgtgaaggtggatgaaagagggggttgacaagagttgtcttgagataaagaggaaggtaaatgtaagaaagcggtcacgagagaagaggaaggaggaaagccttaagtacctcttgggggtagatgagggaggcgaagcaacttagtcagtcggtcagcgcttcgccgacaataacgtgatgtcaagccgcgctgaagccggattggcaggccattcacctgattattattaagacactgtaacctggatcttttgcggcaggcacccggccgtttctttgcgctctttggttctggcgcctaccagcacattccgttggcttctgctttcacggagcacctgtgccttcattgtatctaccccaggctcagttcaggccgatccccattaaattggccaccctgatcgccgagcgcaaggcaatagtattcctcgatctttggttctactaacttacttgagatacgaggaccccgataatccggtactgtacggacctcgaaagccagccactga

SEQ ID NO: 4149 - DNA, 2693 bp, Emericella nidulans
tgtgtcaggcgaacgatggtaagggtggaatgttggacggtatgcctgactaagtgtgataactcagcctgtggttccagggtcaaccaaaatgccacgggagacattcccccgcaactcacccagttttgctccgtctacgcgagtgcctccgatggctcttcccacaatatttacatatacggcggatatgacggccttggcgcccttaaccagccctcagacgatgtctatgtcctttctgtcccgtcctttgagtggatccagctctacgacggaaatggaaccgctaacgggcgcaaggaacacaaatgcgtcaagccgtatccagacaagatgctggtccttggaggcattcatataggcacagctcttgcattccagacataatccgggtcttcaacctaaacacgggccggttccaggatacgtacaatccaagggactgggacgattacaaagtgcccgaccttgtcgcgggccggataggcggagagtacgttatgtcgccattatgatctatagagacatagctaacaaggatagcgcggacggtggagcaacgaaaacagcacctgattcatggactaccactgccctggccgatgtctttgcagcctcatatacccgtacgatcgaaacttattacccctacaacagcacgaacgacaacatcaccacgaccactgtcccatccagcggcggtggtggcagcagcttccccggctgggccggcgcagttatcggcgttgtcctcggacttctcctcgtgggcggtgcctttgtcttctggttcctccggcgtcgcaagcgaaacaatcccgacgaggaagtgagatatctcagagctcgcgtgtcaagaaatgggtcagcagtgcaggtgcttttgcgccgccaggccccacggacccagacaggtctactattgtatcgggtggattcacgaatgaaagcacggttgcaccgtctgaacagccggtcgctgcatctcaggctacggctgaggtggcaggggatccggtctacgaggtgcatggtaagtactatgatctattgtgactgcgatattctaacaaaaaacaggccacagcgcagctcagaccgcggccgtcgaactcccaacctcatacaacgaagggagcctgccggtctcgtcaccgactatgagcgttgcgatgagcttcaactccccgatatcgccggaagttccgcaggagaaagaaggcgacgcaccgatgcggccatcccatacccgcaacgtgtcgagcttgtcgagcgtacagtcatacacgcccacaatcgatgacggcagtctgcaacgaccgcggtacgtgtccggggtgtcagaggcgagcgtcagctcagcggggacccgaattgagagtacgacagggtacagaggtctgggactggaggatatcccggacacggagggacagaacgcgacgggtgcgacgagttcagatcccaatcggaatgcgacgttgaataatgattcgaataattcatgacgagattttgtattgatgtatttaacgcatgcatttagtaataaattccagccatgagacgcaaatgtgcatgactatgcctatgactaagtatgcctgactgtgcatatctccccattgccaccaaccataacacccgcccccgcactcccatcccttccagtcacagacaccaaacacatcttctatcaaaatgacgacattgaggatcccagcgtccagcccatactataacctaggcgcttacactcttcccatcagcactgccaattccaacactcaagtatggttcaaccgcggtctcatctggacttacgcctttaaccacgaagaagcagcaacatgcttccagaccgccgtcagccacgatccgaactgcgcaatggcatactggggtcttgcatacgcactgggcccgaattataataagccatggcagttctttgataaggtagaactggaacacacagtgcggagaacacaccaagcagctcgcgacgcaaagaggcacgccatcaccgcaaaagacgtagaatcagccctcattgatgcagtacagcttcggtatccagaggaaaagccgggagaggactgtacggcgtggaaccagggatatgccggagccatgcgcgatgtgtacgtgcggttcccagatgatcttgacgttgcagctctctacgcagattcgctcatgaatctgacgccttgggaactatgggatctacggacgggacagccagcgccaagagctcgaacgcttgagattaaagatatccttgacaaggcacttgctagacctggtgggttagagcatcccggtcttttgcatctgtacatccacctcatggaaatgtctggcgcgcctgagaaggcgttgatagtagcagatcatcttcgaggtctggttcccgacgcagggcatctaaaccacatgcccacgcatcttgatatcctatgcggtgagtaccgacgggcgatagcttcgaattcagaggcgattgagtccgacaaacggtttgtgaagagagctggggcagtcaatttttacactttataccgagctcataactaccactttcggatttatgcggcgatgtttgccgaacaagacaggggtgcgttggacacggcgaatgagcttgagagctagattccagagagttgtgcggttccagccgcccc

SEQ ID NO: 4150 - DNA, 3000 bp, Emericella nidulans
tgttaattgtattcagcttcattgggatacatactggaacctcctacaacgacggcgtgtcatagaagaacggttacggcaaggaagatctcgaccagtaccagacgacatatcccgttctagcctcgaatccaagttgatatggaaatacctaggcaacgaacccccaattcatatccgccgaacactagatcagtttggatatcctaatttgcgctcaacagtagcgcgagacgacgatcagatgctctggaaacggactaggaaagcaattaatcttgttgatgagcttggtaattcactcccgctgcacgacagatctgatctccagagctccgtgttcgtggacgggaaagtgcttatggtcgaccagctgtggctctggatcgtggaccagaaaacggtggttactttcttccctaagcaggagccgacgacagtggagggaaagttttacgaacagacaaatctgtttaacagcatctacaatgaactcaacggggatcttgcaaggcgttttgagacggccggtgatcttgcagcactgattgtgctgcacgctgtgacggtcctcttcgataggacattacatagtgatctccagattcttcgtatcttcgaagagtcaattagtatcctggtgcgtaatcagccctccgagcggcaaccaccaaacgcagcgagctaacaatttaacagaccgaactaacgaccaaatctttcaaacaatttcgcaatcgaggctttgtaacaagacccgcagagtacaacaagacacgtgaaggacggatcatgacagccgctgagcgcgaagaacgtgatcgcgaagtagctcaacagaaccgtaacgatctctcctcgatgctggagctgagggatatagtggacgagctgggaacaatcatgaagctgctcgaacagcaaacgagcacaataaatgacatggctaagtattttgaacacagaggatacgggaagcgctttatcctcgcctcactggcgagattggatgaatatcgcactcacatttcggagatgagggaaaatgctattgccgcgcagaaggctgtatgtcccacctcaactagatgttacacacctctggtttatatggcatacattactttgatacgttccggctaacattgcccaggtagagaacttgcttgacctgaagcagaagcaggctaatgtcgatgaatccaggctggctcggtgggaagcggaagtgacgcagagtcagtcccgagccgtaatggtctttacaattttcacagtcatgttagtcaagctccgcccatccaaattcgtctcaacccattcaacctccgctaatgcagacgctattcagcttcctccccctctctttcttcacctctctctttggcatcaacgctcgagaatggagcggcgagcctacgaacctcaccctccaaacaatgcttatcatagctggtaagccatcccctacatctcgcttaaccacataacaatcctgtctactgcatactaacgagtcaaccacaggcccaacatccatagccgtcatagtctccgccctcctcatagccttcagcgagcggcttcgtgacacactcctaaagttccagaaaatcatattcggcctctgcaaggaccttatcttcacacctctagctgcatttttccaccagacctatcagcgtgaccagaaatcgccccggcgatcaaaatcctccctggcgtccacaacaaagactagtaagacctcgcggatcggcgatcgatttggtcggtatcttgcctcttggcgatatagaggtgacacggaggaagacttctggagaagggatgatgagcgtgagaagggtgggtatagtagtagcgctacggctagcaatctgaatggggctgggtatgttgcaagaaggacggagggaactggagaggggatgacgttgccgtctgtcctggtctcggaggcaagtggccatgctgctagtaacgggcatgggggttatgtagataggatgaggggtccgttggatggaatggtgagggagagacatcctgcataggcttggtagaggcatgggatggtttggtatagaagtctaagcagtacgtttatagccgaggaatacgagtgcctaacaagacattgactcgctcctgttctagcgcgcggaagcaggaaaaagacaggtgctgcgctgctctttagtgctttaagagggcgcaggtagttgataacttctgctagcaatgcagcgaagctctacaacaggttacaagggtaagaggctaaatgacatagtcatattcgtgaaagatataatacatactcccctgactttatgccaacaaggtagagtggagatgataaccaacagtgcgtagggataacaagaggtataggatataggtaggtaggaggatagtgaagtcaggatgagtaacacaaggacatataacacattaaagacataaggaaatagtacatagagatctcaaaacatatcatggatgaatgcccattgtatgcaaagacacgctcgaaagaaaaacttctagtaaaacaccaatatgggtacaatatgagatgataggttgagttgagcagcttagaacatgccgccacccatgccgcccataccacccataccacccatgccgccaggggcagcagggcccttctcctcgggagcttcaacaatagcaacctcggtggtaccgagcagggaagagacaccggaagcatcaacgagggcggtgcggacaaccttgagagggtcgacaataccggcagcgatcatgtcaacgtattcgcccttggcgctgtcgaaaccacggttgaagtccttggagaactcatcagtgagcttgcccacaatgacgctgccctcgagaccggcgttctcaacaatggtgcgggcagggcgggtgatggcgctcttgacaatgctgacaccgagcttgctggtcgaagttggcaggctatgacgttctcaaggccatggc

SEQ ID NO: 4151 - DNA, 2970 bp, Emericella nidulans
agctcatccccctgtcggtctggctggggactctggtgggctctgcgaaggggctgctgtttgtatttgcatcgggcatcccaaaaaattgccgggagctttggctctgactctgactcttgcttctatccctccggacacgatgcggtcgaccaccacgacgagctggactgtatgtgcaggggcggttgaggtttgcgcaccgtgcacaggtcggtttctgcttgtcacatcgcagcttggacgcagagcagacatcacacgagtcttttagctttcgaactggcggttgggtcttgtaggcctccatgtcgactgggtggtatatagctccagtagagcgaattcgttggatcctggtattttttctcctgacgctgccatgtagattatagaatcatcagccaagccactggaacagatcggttatgtatgataatacccatcttagtggacgattcatggcccgtcagccccagcctcagctgccctgcggatcgacgtcttagcatcaacaagacataacgctttctacgcggcccccaactcaactgcagttcacagcatcaggtcccttggcccgcgagtccctcgacgactcagccgcaacccctccagctgcagcataatggaggccaatcaacatccacatcccgacgtttgacgtttctctggcgcctgcggaggttctaaagaggtaaagagctgaagaagccttagaggcacgaattagcgtagacgagcaccaaggcagcgagcagcacaaagtggatgcactgccgccatttgaagtaccatttactttgcaccggggcgcctccagggctttttaccgctggtgagcatggcttgcaccagatactcgatacttgatgtaacctcgtgttcgtcgtgcattcatagacgcggggttgctagctgcgcattatcctcccgatccaataaccacgggccagttagtgttgggcgaccaggctacaggacacgttacagaagaacccgccgtgcagccgtcaccattgttgttgagcacttagatgccttggaatatttgttcaggcagtattctaaatcccaagggctattatcaccatacagaaagccaaagcctgtactctggtccctggattccgtcttgagattggagacgggatggaaaagcttcagactccaaatctcactcgagaattaagcacatttggaccccaatctcactgcagacctctgccgcagctggggcgtgctttggacctcgtgctagtggtttgacgctaaaaggaacaaccaaccagagagggatgcatgcatgcgagtcacagtaaacgtgttcgtgtcaaggtcccacgtcagatatctaacaaacccggcgaaaggaccacaaggcgtccacgtcttagtcgcattagtagcggttgggattttaagcgcacggctcagaaagatgtccaggagtagctctgcagaggcgcttctataaatacacaccagatgctcatggaccctgcgatctcggcaagaatgtgaagaaggtgaaagggttcgatagggggctggacaaattcagatcagtccagcgggatccaacaatttgcgtggcgtatacggatggtcgatgcagtgcacatatcttataacgtgtctcgctgccggccgtctaagcttgtccatgtctcaattccaggatctcgcctagcgacactacctgttccagcaccatcgccgaagcttcacctcgtcatggagctcccagctgaatcagaactccagtatgccggagagtgtctttccttaccgggtacgttcctggaaccgccaatcgaggaccctccttcatcagtcctcaacctcctcaacctatcacaggtcgatttcaattcgtatgacttttccagtctggggagcagagaattctcgtctaaatggcaaacaaatacgcccttatgcacagacagtctgtctgacgagtccgccccgggcctgctcaccgaggatatgggtatctcaccgatccctatgcctgctgccgaagcgacttgtccccaagagagcgaggatcgcctatgccgaaacccgcaagggcgctgcatcagtctcgccacagggattctcggctctatgcatgccggctcaaattcctgcatcctacaggtagccacaagcgaccagggtggtgcaagtgatcgtcagcctcagcaatcgcgtgcggcggacgccatcctgtccatgaaccagtccgccttgcggacggtccggtccatactgaactgttcgtgctacgaaagcccgcaggtgcttctcctcgttaccgtcatgtgctccaggattactgcttggtactggcgtatcgccgatatatacagctacagtcacggcaacccaaccgcgggcagcccaagagctgccctaccgactagtgtgggcagtagagccgagacgcgaagacgggatttcttcatcggcaatcaccgcttggacagggaagtagagacggtcgtcattcgtcacgttcttttggggatgcttcaagaactacagctcgtcatcagagacttcgctggtcaggcaggacaatcgccggccggcacagtcgacactgatgacccgacctcgacgagcgacctgatgctgagcggtatgcgagcccgggtggttgcttttcttcgtaagcagctacactccctcacttccgcgcttgatcacacagacagtgggttcgggacgatggggccacatgtgtcgcactattgattttgtataatgcatgagcgctggtgccggggacagaaataatcatgaattaatgcgtatacggctgcatagaagatagcagagggcttcttcttttacatattagaccttacgaatggaataatagactgaggattggtcactagttatagagcaggtttacgacatttctataaaatttctgccacgttccctgagacaccttgggtggtagagttgttt

SEQ ID NO: 4152 - DNA, 4175 bp, Emericella nidulans
  unsure (1)..(4175): unsure at all n locations
caatccgtaccgcaatgtgtatcgtcgtttgttgtggaggtagcccgacctcccatgtttacgaggtttcgtatttcgaccctatttccaggatagtaacaattggctcgacaagccttatatgggccaaagtagtgaacgtggtcgagactgtcatctaccaaccgtcggtgacaaacccttcgtctaagaccgaatttcacgcaggaagcgaagataactgctctctgcggaggctggcaaaagattaagaacaaggtggaagaggcaagcgtcgagcgatttagagaaaatgccaagcgtggcagggaaggcttcgaagccgtccttgagatgagtcgacgagttttcagcgagcagcgcgctctcgaatccagcgtggcatgatcagtcgcaactcctgcatcacgttattgagcgtttagcttgcataatggcgttctttcatttcctaagcgtgtggttgtttcggcgttgtcctaaaagatactctcatcgcatactgatgacatgaccatcgcacttattgtttactcaacttaccgggctcatgaggcacgtgttctcaaaagttattgatatcccttgccatatttttcaagcgagcgtcttgcttctctcttttgagatactacgagagcacgacaaaatagagctgtacatagatacatattacctatagtggctatcctagaagaccccccaatacgacacggctgaccccagccacctcagttctagcagtgttccgacttgcgtcttcaaattcgcgtaccatgcccgccacaataatttttcggattttggcatctgcttttgtgaataactctcccagtgcaacggtgcaaactgcaggcgttgaaatcaacgtcacaaggcgagtatagcagtctatcaggacatcgcacagagtcacaaatgtctcaaagtagtccggctcaaatggcagtgagggtgtcagaaggtacgaatactcctctccaggtaagagctctgacgcttctgaatttgggatggacacactcgcagcagctgcgctgaccgatgaggcagcactccctgccatatttttcagatcggaggggtcactatgttgcatgggaagaccaatctccgtcgctgagcttgcccttctagccttcgttccaccgtgagtggcgcgcttgaacatttgtggtatgcgtgctcgggcaagcgtagacgatgaactcccttccggcggatgcacttgctggaacgcctcgaattcaatcaacagcgcatttaacgcacgtaaatattcgcctgatgttgtgctaacatcgattattgccgggatagacagaccgaggagaagataattgattgcacgccgggtaagctttctggcatcgaaatatggcattcggcccatgtcagcccgggaataatgaaccgtgttaaaccaataaatgcgcccttcgtgactacacttgttagtatatgcatctacggagtggaaaacaactgacgcttttctgaggtagtcgagtgtagatattcgcttcgtagccatgtcctgaatatgctggtagatcgccgccgcactctgcggaccgagagatcccccaccacttatcaatggaggagggatagatccggctccggcttcatgccctatggatttatttgtgtctctgcgggacagcgtcggcgcgaacgtggaggggagcatatcaatggttttcccaaaggagccttgtcctctgccagcggacatgagccgagatcccagctttcaatatgagtagtgaaataagtccagaagttgatgtcaggtgtacgttgcccatgggcttgcgagagagaaagctcggcacgcaagctcgttcatggccaccaaatgcgcttaacctaagatcagatcgtttctccacacagcccctggcccctgaccgaggctgcgagccacgaaacggccaggccctatggtgtatatccccgcactaaaccataacaggcactaagctttctgcgcagcgctggcttccagggctttgaactcagacctgtacaggattttaccccgaatccagatgatcagatttgttttatattattcagctaatgttcgaggaagtccttcatttttttctaatactcgatggatatgtatcaatatatagtacttcagggaccaaattccggttactcgtcttagctcgcatgatatacagtagttctgaccttgaaaatggaagtgacagcctttccagatgtattttatcaccgcaggtacttgaacgctggatcagagttgcatcggaacattgttttcttttggggcagtacctggtctgacaaacagatggcattacttgacttgagggcggtcaggatgatgttctccgcaattcatacccctcttagcccctcttatatatccaaccctagatcatcctccaccgagcgtcgtgtgttgaagacgaatcacccgttgatagacctttgcgccatcaatcacaaaccgctttcttgacacgcacaatgacagcctcgcccgaggagacgattcccagacgaggggaatggcccgttgacccgcaagatgatgtcccaatagcagaggggcgtgtttgggtggacgggtgctttgactttagtcaccatggtagggaatcgatcatccccgattcttgtatgatacgacctaatcatatacccgtaggacacgcaggagctatgcttcaagcccgtagactaggagacgaacttctagtcggagtacattctgacgaggcaatcctggaaaacaaagggcctacggtcatgtctttagaggagcggttggttattgccacatcctattcgttcggggagctgatattagtcaaggatcgctgcggtagaagcatgtcgctgggcgacaaagtgtattcctcatgctccgtacgtgacgtccctgccctgggtatcgcactacggttgcaagtacgtcgtacatggagacgatattacctctgatagcaatgggaatgactgctatcgatttgtcaaggctgctggtcgcttcaaggtagtcaaaagaacccccggtatctccaccacggatctcgttggccgcatgcttctttgtacaaagggccattttgtcaagagcgtgaaaggcatgctctctgggaaggaaggctctggtaacgaagaagagcgcgcacaatatgcgttataccttcaggaaaggctcaaggattacgccactgacgagaccggcctgcaacctggctctcaggtctgggtttgggaaggctcgaacgctgcaaaacttgaggcttcgcttgacgagtctgggagcttcgataagcttgttagtggaaagccgcccaggccgggccagcggattgtctatgttgatggagggtttgaccttttctcttccggccatattgaatttcttcgccaagttctagcaattgaggaatctgatggcagacaacgcggctggtatgaccaagaacagagagagcaaagggtaaagacccacggagaagattttggcaccagcttacgtggtggctggcgttcatgacgacgatgtaataaaccattggaaaggtttaattatcctatcatgaacatatttgagaggggcctatgcgttcttcaatgtcaagtaagcatccatcctttccattacgggttggtctgacaatttctagtacgtacacgccgtaatcttctctgctccattttcaccaagtcagccatatttagagacaatgcctttgggcgttcccgacgtcgtctaccacggtccgactacctttatcccactcacctatgatccatatgctgctcccaaacgaatgggtatatttcgcgaaacgaccgatcacgcttttcaacatgtgaacgctggcgaaatagttgaacggatccttaagagcagagaggcttacgaagcgagacagcgcgccaagttgcagaaggcagtgatcgaggatcaagccaagtcaagagaagcggcatgacccaatagtatgagtcattcttcctgcatatacggctactcaggcagaccaactccactggagcaaagcnatgagttgaaatacatgcctagcttctgggtagtatctattgtgagcaagatacgctctcaagagattgatagattacattacagncacgaacttaaatacggcattcattactcatta

SEQ ID NO: 4153 - DNA, 1704 bp, Emericella nidulans
cctgacagacaactgtacgagattttcatggatatatctgacaaaggatcaagaggctgccacagtgaaagccactctagagcaatggctggctctagcgagcgcgagaaaggtgtcaagttgcttattatccagactgataatgcaagagaattcaaggctctagagcataggcttgaagaaaggcatccagatcaagtttactgagcctgatacacctcagcagaacagtatggcagaaaggctgaattaatatctcttagagatgaccagggcaatccttattaatacaaatattccaaagaagtactggctatacacaatcagaatagccaattatctctaaaatcaagtagtcagggtgcaaggtactaagaaaaccccttttgaaatatagataggacatcctcctgatatatcaaagttccaaattcctttctcaagagtctggttttataagaagacaaatgacaagctggagccaagagctattaaaggtatatttataggatataagtcaagccagaatcattatataatcatggccaagcaggattataagatctattaagttataaatcctatattcctggaaaacaagcaaggcttcattagcaaagaaccaggagtttgagatcttggggaagaacctctattttaaaggatatttagagttcctgaagtaagcttaggaactaggggaggtattacagaggctctgggagccagtaatataagcaataaaggtagcagtatagatactgcaagccctgaaggtgctgggggcaccagaggctgtggtaatattaagatatgactgaccgaatagaataatgatgctgctgccgacagctgtatacctagacaaagtggtcagaattcaggattgaccaatcagaggctagaagtagctatcccaacatataggacaccaagcttggacaagagccaggaagagcctatacccaagcctttgaaaacaacttcataactgtcattatctccattgtcaaaccctatcctgacagaaccctctaagatatgtagaccaagccaaaattaaaagccaatacaggcggcaattaagtccaagcagacagaggctatatataggcagaagccatgagcctagagatacagagaagagagggaagtactaaaagatccttctctgcgcctagctgttgaacagcagtaaattaataaagtgactaatctagctatagccctggagcttcatcttgctgattataatactttcaaagccaaggttaataagatctatgggcagatcctattccaaagacctaccaggaggcaataaatgaccctatatacagagccaagtagaaggaagcaattaagcttaagctgaataacctgatctaattcagcacctggagatatatcagaagacctaaagattaactagtagtattaataaaataggtttttgatatcaaatatagagctgatggccgagttgaccggtttaaggcaaggctagttgccggaggcttttcccaatacaaaggattggactttgaggatatatttgctccagttatccggctagagagccttaggatcctatttgccttagcaacagtccatggcctcaaagctcacctccttgacgctataaatacctatgttggatcgaaaattgataagcagatctttatagagatcccggagggagtt

SEQ ID NO: 4154 - DNA, 1366 bp, Emericella nidulans
gagtccgcccttaatcttctccgagacgctggcggtgaagtcgacctcctcgttcgcggcatttttgagttcttttcagatacttggtgggaatcatcaagcgctccccagctggcgaagggacgtagaatagccccccttgtgtctagcatgacatcagccgatggtttggaaagatgttctgcctggtgagtaccttctgatagccctcgagcataaggtcggcgcacccgtggatgaaggcttggcgagcctgctaaagaggaactttaccactttttagaccagacacattaaccccgggtataagtctgttgcgtctgcggcgcgacgcccaagccagcaaaagccaggcatttgatttaagagcactggcctggagaaggagggccgcgccccctgtgacggggatcagtttgagaatcatgatgtaggacgatagccgcaataacttgtgaattctgtctatgtctatctctaagcaggacgtgctattgactgtgaagtataccatggagactgaggcaaaattggcgggccatcccgtagcgtagcccgattaggccagtgcatccagattaggcaatatccgaagaatcaatccatggatggcatgcgagtggatccaccccgttttggtaaaccatcccagttcggatcagtgagaaagatccctgcatctgccccttttaggtaaagaccgactcgacccctatagtgctagcaagtatccctctttacgcccccagcttgaaccccccgggcgacagagtttggaaaacccccgaaggatctgtatcacaccttggagcttagcagaatctccgacggaggggcctggacgacaaaacttaccgtatttcttccgaatggtcttcaattttctaagcgattggccctttccatatgtcttgaacggggcttggctcgggccggcatcgttgaggttaacgaaggggtaatagacgttagcagccctggcctttgactcgatttcggcaatgacattctcggaaaagctgacgatccggtcgtcgtggtcggcgtttgtccacgtgttggatatcaacagaactagatatcgttagttgatcgcgcgcatccattttgactatttcggtgcctaccgaggaacgctccatcggcgggatctagatcgatggcgtctcctcccgaagcacgcgcagcatcaagccagtcctcagtaatggtttggtaagtaatgctagtgagtaaatccgacaaatcggacacttgctccatggcagcctggatgaaggtggggttggcgagatagactgccctccgtggtgctttcccggggtggcccagaaagaacgcctggtaagaaaatgggtcaaagctc

SEQ ID NO: 4155 - DNA, 4745 bp, Emericella nidulans
ggtaggataaggatttgttgtatacctgacttagttggaaccgaggaggtctgagagtagtgaataggtaatctcgaagcgaggatgaaggacggttcgttcgagtcggacgggtcaggcgggagacagacgaaatgcaggatctctgcagcggacgttccgatatacaaattatcatctatagtagataagctgtcaatttcctttgatcctgtcaagcacgggactcactccaatactccacgcaagtaatatgtacgtcctccgccgcatcatcggctgtcacgggcacctggtcgaagagcggcttgaagatatacggggtggctttcggagggtcaagcttgcgcctcttgcgcgagttgataccctcctcttccgacgccatgatgagaccagctctggcgtccagagaagtgaagctggagcttcaatgatgcgagctatggacgctgcgtcggagttatggctatggccaatgccggaagtggatctgctggtttaagccttgctgagtcaggtggagcatcaacaccgtacctgattaatttatcttggagcctggacacagaagtttggtgacatccactctcaaggaggcctctttaagagcttatacgcctgttgaaggatcaactgctgcttatatgtgtattagatcgaagtgctcagcgaacagtcgtcatacttggtgtcaaacgtctaagtagattgtagcagtggatcaatcaaacgaacaatcatcttcccaacctcattgccactagccgccttcgaacaaatgaggggcaatgctatctaggacatcttgacactgttccatgacgtgaaaacagtaatcgagccgtaactacttcgaacttctcagccttatgctgtccggcgttacagcttacgtgtccggaattattgtcgggccgtttaagggtgtctggtctcctccgcatcacgatacgtaacctccaaacacactctccctcgtctccaattcggtcgccatctcggggtagcatagctggcagttataatccttgatggggcactctactccaaagtttctggcataatcagcaacgcagcgacgagagccggggaaggccgagacaaaaaaaaaaacaacatggactctttcgccattacggagggcattattccccagtccgagaaacaagatgcccaagctcccgagtctgggctaggtccagctctacctgagggagccaacaagtttcagcgcgccattgcagcttggagaggtaccatctaacgatcactatctgaatatactccatatgctaacttatggcactttgaaggtatcgacttgtccaatacccttgcgaaactagacagcaccgcttccgatatagttgccgaacaacgagacgcactggtacaaaggaaggatcttgcgcaaaagaccaaggatttccggaagctcgacgatgcttccaagttggcggaatacaagggtcttttgaaaggttaataccccacgtgtcgaccgtagcgatttctcgcattgaccttgttggacagcctatcaaggattcatcgacctcttaacaaaccaggggaagtcttcttcgtctgcgttcctccagttatactcgtccttgtccgaggcaccagatccgtatcctcttctcgaagcctcaatcgactcgctcgtcgtcgccgaagaaacggttcctaaattgacttctgaacgtgatcagctgcagagctcagtggaccgccttacttcacagttggaagacacggaacgacggcttgaagaagagcgagctgcaaggaagaagttggaggataaccaagacgcaaagatcaaagagattgaaacatcatggtcggcagttctgaccgagaagacgaacaattggacatctaaggaaaagagcttggaggagaaggtagagaaccaggaacgtttgattaaagagctcaaggcgagctatgaggtctcgcagcgcctaggccaaactgatgaaagcggcaaccacccccagggaggcgcaaccgctgccgaactggagttggtgtccagcgaattggaaaagactagcctgaggttggcagagatggagggacggaatgagcagttgaggcttgagctggctcaagctgtttctcattccaaggaggagcggacaacgtctatcgacgacgatcctggatatctccgcctccagtctgagaattcttcgctgttacgaaaactcgatgctgcgcgatttgaccgagagtctgaacggcacacttgggaggccaaacttttgcagtctgagaggcagttctccaaagtcaacgctgaaaaggaagagctgaagacaaggctggagaaggtggcggattacgaagacatccgtcgcgagctggagatgatcaaggtataccccatttgtactcttggaagtcgaaacctaatcgtcggtagtctattgaattctcagctggtgacgacgaggaggccggtgatctcaatgatggtaccaatggcactgtagacaaggctaaagagggcggtaaaaatggctccctggaacagctactgttagcgagaaacaagaagctcaccgatgagcttactgttctgcgggtatcgcaccgtgatctacaaggccagcttgagactctccgcgaggatctttctaccactaaagaggaattggagaaatcgcaaaacctctctaccactctagagaatgatcttctccgcctgcaacaggaggcggcgaatgccttcccatcctcggcgatgtcagtggccggcacatatgtttcaaaatacccccattcttcacgaagaggcgtatcaccaacatcatcaatcatctccggcttcgatcaatcggccgcatctaacaatacgatggacgccatccgcgctggggaagcggttggtggaggatccggtcttttgcccatgatacaagcgcagcgcgaccggtttaagaagaagaacactgaactggaagaagaactatccaagctctatagcacagtcaaatctctcagacaagaagtcgcatctctgcaaaaggacaatctcaacctttacgagaaaacgaggtatgtttcaacatacagccggggccagggggcatcatcttcggcgttcgcctacgcgaacaggcccagtgcgtcttctatccatacatccgccgatactccctcaggtttgtctatcgatcgctatcagtccgcgtacgaagctcaaatatccccgttcgctgccttccgggggcgcgaatccactcgcgcatacaaacggatgagcctgccggaacgggtagtattctcgctgacacgcatcatccttgcaaaccgtactagccggaacctctttgcagggtactgcttcgccctacacattcttctattcatcatgttgtatatgatgagtacaatggagattgaaagtcatagcgcagcaagcctcggtgcagcagcgggggctgcaatgaatgcagcaggcaatggtaatgcatatagcgggcagctcgatggcgacgactggcagcaggagggattcaatcacgctgggtagtcggttgtatttttagtattagggcgttaaggagttctgccgtaggcgctaagttggggggttgtaatttggaaatagtagcctaagtgtatatatgtcccagtcgatccactttgacatttgttcactcgtaactcatcatagtgctttggaagtacggatgatactccaaacgtctgtgcctcaggattctcgaatgacttgctcgatttcaccagccgctaacacaagaccaccatcgtggccagcttcttgctctctgcttaggcgccatgtcatgcaatcaatatgccaagttctcaactgtttatagagccttcggtgggtcaaatatatattttgacccttctcatcggaaccccaccacatcacactgctaataagccctgcctacagtaatacagctttgagatagcactggcctcctaagcccaaatgcctaatatacactccgcttgctgctcattgctggatcagagtagggactggcaattagagggctcggattcttaaacaactgcatgctaggcgggtcctggtgcatatgcttagctacgattccatgacaagctgcactctttcagaatatttaaagtttccggtctggcaaagctttttcaattacagtgagttgccagatattcactcctgcctccgtcctccgttgcatgtttgcggggcgttgtctcctcccttaggcttgctgacggtttgttggcatgatcagggaaggcacaacgtgactgagcctcttcaaacaatgacactactcctcgcaacatcgaggaacgatgtctctaaactaggcatgttctttcttcatctccttccacgctccttcccttatctggcaagcccatctcgccctccaccaacccggcccgaactacctggcatcctccattacggtcgagtacaacagttctgagaaataagccagtttgtcgtcctcatttataactgagagtaagcctaaacagggccaaaaatagaaaagtaccggctctatccgcggatcgaacgcgggacctctcgcatataagagctgtagggtgaaccctaagcgagaatcataccactagaccaacagagcacattattggttgagggcaaattatataacaaaatcaagcaaagaacaatatccagacagtccacgcatacgaggcgatcttggttttcctatcaatgctac

SEQ ID NO: 4156 - DNA, 1241 bp, Emericella nidulans
gaccagcgcagcgccgtggagaccgaagctaccacacgccgcaaggactaccgagacgtcatggtcacctatgttgatcccactaccgcgcgtatcaagctccaacagattggaactggcacctcggcgctgaccgagcttatgagcgcattccgatcgttccatatcaacaagtcaaatgacaatagccttcctggccctcccaaggccggtgactttgttgctgccaaattcacagaagacggtgagtggtatcgcgccaagatccgtcgtaacgatcgcgagaagcaacaagccgaagttctctacatcgactacggtaactcagaagtcctgccttggtccgccctcagaccgcttagcgctcagttttccacccagaagctccgcccccaggccgtggacgccgttctttctttcattcagtttcccgtgaacctcccgcactaccttgaagaggcggtgtcttatatcgaggaacaaacttataaccgcgaacttgtcgccaatgtggactatgttgcaccagagggaaccctgcacgttactttgctcgatcctgagggatcgaagagcctggaccagagtataaacgcggatattgttcacgagggtctggccacggttcctcgcaaattgaaggcgtgggagcgtgctgccggtgagactttgtcgaaccttcgggctctggaggacgaagctagggagtcgcgtcgtggtatgcacgagtatggtgatgttggcgaggaagactaaaggcagttagcctgaaaacacagcgtttcgttttgttcatgtacaaatattgctgttttcttgcgtgggacaacctacaaaatggactatcattttgagactcatacgtggtgccaaactacctcaggagcagtacgaagtatagaccgcataactaccccataatttcatcaagttggccaatatgatgactcagcaaagcatttctgaaaagtttatgcaatagttctacatctaagtctaccgagccgaactccttccatcagctggccctttttggtcttcctgatccatagttgacttttttgccttccgcgtcgctcgttacctctttcaacactccctactgtcactgaaaaattcccgaaacccaacatcgccgttgcatttgcactgattgttctttccgggacgtccgaaacaaactacaagcccagctctgcttacgccagacccactgcactccaacgccgctccctgcatca

SEQ ID NO: 4157 - DNA, 1571 bp, Emericella nidulans
tggattgcattgacaaatttaagtgagtcccgcattacactttccacgcttttgcatgttccaaagggtatttactaattatctcatcacagggctatgcaggattgcttccgcgcacaccccgacgtctacggcgctgaacttgacgatgatgaggaggctggcgctgaggccaatgctgcaggagtcgagcaacccctcgctgccgaggttgatgcctctgttcctgttgagaagcatgagcaggccaaggaagtacgcgacgaggtaaaatccgctgcaggcgaggttgcggaaagcgaggaagttgttcccaaggctttggacgtgtcggaacaggagaaaacgcccgagcagcaaacggagaaatagatatatcatcttccatgaagcttggcctatggcagaacggattggagttggtggagaccattgacaataaggccattaaaatggccgatccagcccgcggaagactgagaagaaatcgattccagactagatgttcaaacgatacccgctgggtctctctgctaccgctctcttccagtgtccagccaggctttccagagcgaacgctacctaccctcctacctagttaggccatatcaacattctacgtccgatcctactccgcaagccatctcatctcccttttcaacttcgcttttatttccagccatcttggtatttcctgacgtctcttatggtttccgccccttatccttttttttttatgtaactacctactcatgtacttttactctaagttgtccttgcacgagacgtggtgtgatcacgttttgcttggaagaggtaaaatagatttcttatagagtgtgctctgcttctcttccgggactttggggccgctacgactgctaacaagcagcattatgtaaatctacagagtaagggcataggaagatagaaaggcagatcagtaagattgaagtcaattatcatctaatgtaaatgttggtcttgatcatgattcggtttcgcgtgtaggcacataactcgtactttgctaggagcataatccactgcatggtgtaatgcaccaagctgttgtccgctatgttccgttcaggtcctggcaaagcacatagataaaggattatccgcgcttggccataagcgattgatcctgacttgactaaatatagcgcctgactggaaaaggccaggctaggatgaacagcgggctgaactaagctgggcacatggaaagcatacagccaaagcgctgtctctctgcgaagttgagtcacattttccgcgtccacacggccgaagagcggaggccaagaccaggtcgagtgtaaccatcgtctacttcctctaatgggtgacgtccgagctggtggataagcttgcgacgaggatctttcctttcccgtcttgtaagccgttcttctttcgcatgcacacaagtggattgaccagtcggttgtttgggttcaatgttcacggtcaaacccactcaccattttaaggtatcaggctatcaacaccatgtctcgttgggaatccagtcccagcaggtcataatgcctattgaggtggct

SEQ ID NO: 4158 - DNA, 2614 bp, Emericella nidulans
agcggataagctacagtataaccggacaactagtaaccatctacatcaatatccattgcatcgtcgtcatctgagttggccctctgctgacattcctctttgtgcgtcaagttttggtcagtacacgccgcgtcatttttctcttgtcctgggctgctccgaagcttctgctgactcaacctggccctttctcttgtttctatcaaagctcgtcgcacctgatccttatccttgggaatagaaagcgattccggttctctgtagagcaccacatcagtgcacgggcgcttgctatcatttgccaccagtatgtttgtcaaggacagcctatcctctattcctggtaggattgtgaaggcaccatcaagaatttcggtttcggccagttcctgctctaggttatgaatatacagagtggtgtccgtgtcatcaagtatcattgcgtcgcttggtctatgtatatttggtacagttcgagcttgcccctcccggcactcaagcaagggaagccctgccagaggccctagataaggtcaataatcagcatcgagtgcgatccaattcgaatcaatacaactctcatcgctgcgtacctatctgtaggcgaccaaacttttttgttagaggttgatcatcaagttcctcctcggcggggcgttttcttccgtgaaccgcaacatcagaccgttgcgccattcctccaagcagagtacggcaaaaaggaaggaagccctttgcaatagagagcgacacacttgcatactattctcagctctgattgaagttacgtgcctgagaccgtatctgagcgtgtcgcttaatgctcggagcgagatcctcgaagactttttggggtttgactcatcttcccttccccagatcgagcactagaacattcgacaaatttcacgctctcagagcttcagccatcccacctctactcacaactaaattacatctcgccatggcttcaaacttgcaaagccagccaaaatggacctcgaaactcgtccgcgacacttttctccaatattttcaagggaaaggccatacattcggtatgttcgaagagggggtggctttgggaaaggatgagctctcaatagataattctcaagctgacagttgttactcttgtccctgttagttgcttcgtcccctgtcgcgcctttgtctgatcctacgctgcttttcacaaatgcaggcatgaatcaattcaagtcaattttcctgggtaccgtgaatccaaattcagacttcgcacaattgaagagcgcagtcaattcacaaaaggtttttgtctcgactctaccgatttggacttatgttaatatagatgcagtgcattcgtgcaggtggaaaacataatgttggttggcaccctgtgcaggcggtccaagtattcgctaacatttgtgaacaggacttggatgatgttgggaaagatagctaccatcatgtgagtttgttttgacttcgcggtaggatcgactaattcttctcgcagaccttttttgaaatgctcggtaactggagctttggggactatttcaaaaaggaggccattcaatattcctgggaattgctgacacaggtgtatggcttggatcccggtcgattatacgtaacttactttgagggaaataaagaaggtggcttacagcccgatttggaagccaaagcgctttggaaggccgtcggtgttccagaagaccatattttgcctggaaacatgaaggacaatttctgggagatgggcgaccaaggtccatgtggtccttgcagtgaaatccactatgatcgcattggcgggcgcaatgctgcttctcttgtgaatcaggatgatccaaatgttctagagatctggaacaacgttttcatccaatataatcgcgagaacgatggatcgctgcgttctttgccaaacaagcacgtggacactggaatgggttttgagcgtcttgtatctgtgctgcaggacaaatcctcaaactatgacactgacgttttcggtcccatcttccagaccattcaagttattactggagcacgggaatatcagggccgatttggaactgacgattcggatggaattgacaccgcctatcgtgtggtcgccgaccatgtccgaaccctgatgtttgcgatctctgatggcgttgtgccaaacaatgagggccgcggctatgttattcgacgtgtattgcgcaggggtgcacgttacgcacgaaaatacttcaatgtcgaaattgggagcttcttttccaaaatcgttcccactgttgtggagcagctcggcgacatgtttcctgagttgaaacaaaagcaacaggatgtcatagagatattgaacgaggaagaaatatctttcgcgaaaacgttggatcgcggggaacgccagttcgaacagtatgctcagcaggccaagactgcgggtgaccacaaattacatggagcagatgtttggaggctctatgatactttcggttttccggtcgatttaacgcgcatcatggctgaagagcgtggtctcgagaaaaaagatcgtcagttcgaagaagcacgccacaaagctaaagaagccagcaaaggccataacataaaaacgactgaa

SEQ ID NO: 4159 - DNA, 1824 bp, Emericella nidulans
ttgtcagaaagaggattccctgaaaatattcaaggagacggaggaagatgctgacaagggcgttgcggtggatatcctggattgtgcgtttctctaagaagatatctgcttcatcgaggaggagcacggcaccccatgaatgagcgatatccagaatcttgttcaactccccttctagtgttcttgagtcggtgcctagctcacctgcgctcaccatgtataggggccgcttgaggagctcggcaatgccttctgctgtaagggtttttcctgtgcctgggggtccgtggaggacggcgacgagacctcgccctttgccttgaatcacgtcatcgatattctgggcggcgcaaaaggtgtgagactcaaccagggctttgacgatggacttttggttgcctggaaggacaagagagtcgaaggcgtcctcgctccattgaatatcactaactccggaaacgctgaattccagccagagtttctcgctgaaggcgaaccctaggacgactggacttgcaatgaggagttcttcctctgtgaattctcgctcagagttgtcagaaacttcgtccaaaatctctttctcgacttcgttcccgttctcgtctacctctactcgaacaagttggggtttaccctgcttatttcggacgaatttgagctttgtcttgggcgtatctgagtcctggtgttgggtgtttgactgatttgactcagaacctgacacgcaacagcagccgccgtcagtctcgtcatcggaaccgtctaataagtcaggatcattgggacggacggtgctgatgggatagttagggttgatgcgacggtgtattgcagggtcaatcatgatccgtccgttaatgttaaccttgatgacggtgcgctttttcttgtaaaacgccattcctttatggaagcggtaattcatgcccttcagggagacgaatttcttaccccgttcgatgagcttcgtcctgacatcgtcggcgtcacggtgatatttgagcgggtaacatcctaaactggtgatcttgcgagctcctttgaaggattccacaactgcttccatcgttcccatgccaaatgtcttgccgtcatactcaagataacggccttcgatgctgtaccactgacctttcataaaggatgattccttgacggcatactcaaccttgaacgcgcggggctcgtcctggttaccatatgtgggcgcataggcaatggtatttggcttgaacagcgcccaaagcatgttgctcgttattgtacccgccttcaacaatggatacagtgtatacttcgactcgaaattagatcctgttccgatatttaacaatgcaccctcatttgggctcgctctcagagaagcctagtttctagcttacttcttcgtctaaactttggccagctcgttcaactttattattctctcctctgcttcctaatcattaaacctacctatgtttgacaccccctccaaggtctcctgaacctacctgtttcctatcaacctggtctattcctggtccctctctctatgtaactcttgttctatggaattaacccctcttcttttctcctctctccaatgatctctctctcctactaatatctctgttccctcctctcgaaggcttctatcgttcttctatttcctctcatcactttccctttctttttatcagttctcctattcatattctcttcttctatctttttctaataaccttaactccctttcttctattcttaatccatttcctattactttccctttatctattttcctaatttcctttccctttctcaccttattttttcttc

SEQ ID NO: 4160 - DNA, 3375 bp, Emericella nidulans
tacgctctggtcccgctgaatatcatacacgatggatagacagtgattacgcgattggcgtcaatgggtatcaaattcttttaccgcacgctccaccaccacttcacacgcgagttctgcatgtctgaacagagcatgcagagttaccagagcgacagcggcgaggcaattgcatggtcgcagacaatcctggcatttgacttcaaaggtggcgacgtcttcacgaagcattacatttggactcgacatgcggcacgtgcgagcggcttgcattcccatagcctgatccgtcgcagctatttcgggggtggaaaaccagatgcattgctctgcagcggtggaattggtactggagtatatggagacgttcaacgcggacatccctgtgcccttcttcagctgggacctcatcgacccgacccagtcgcgtgtgatgatctacggcatttcctggcagtggtcgtgggcaaaggctgaagaagtctgcactctgggtgggaagctcaatcaccatgatattgacctcctgaagaagctgtggcatatcttaaagctagatgagtttacacccacgatgggcttcacttggaactatgagatccggcccggccagcccaagccagaagttaggctctacctcgctatctgcgaccgcagcgatgaggaagttgcgcaggccgtggtgcaatggtttgagctacttgggtggcatgagagggcgcagtcatacccggaaacactgcggtatcttcagtaagtattccagtcctcccgcgtcattatctcaggaaatactgataagacgatatacccaaccgtgatctgagcaaaaccaaatctgcgcacacatggttgtcagtcacggtctcggaaaagggtgtttacacgtcgctctactaccaccctctcggcaatgggtcggatgatttcaagatccgtgaaaactggttttgacgctgggcgggaacaagttggttcggggatacatgagccgtacatgtagtttgccttttttctgttttaccatttgttgcctcgtcgggaaagaacaaaagacaagctaaaaatttcccgacaaaactacattgcagctgccgtagcagaagtcccgagtcacggctgtacgttgccagttgagtagtatgtataaactcatctatgctgcatgacaaagcctgcagggattttatgtgaacgcccagccacacaccaaattattaaagtttgtaaagacactcttgagatagtaaaggcatccttacatacccacctagctgccacgtaggacaggacaaagggctgtgaacatggtgcgtattgcagtgcctcatgtaaatatccgtttttgttctatccacatactacaactgtatttacgaaggcagggtggtaaaggaatcaccgtactcagccgtgcagacttatccgtagcctagctaaccaggggttcatattcagagtctaaagcttggtgtcggacacgtcttacccaccaacatccgggaatgactacatagcatgaaaggtggactgattccgggccatactgtgatccggtacgtgtgactccgctatgcaggctcaacgtccatacaagtggacaaatgtggcgggaggtttgtcaaagggacgaaagaaagttttgtcaaggctgtacgtgcaacggggcatgcagcgtcagcacagatatgcaaacacgtccaagcgtaagacattcgggaggggcggggagggggcgtcgagtccacatgtgcgaggtaactgcgtctagaaaccagcatgcctgtggagcaactcagtatgtgtaccatggggaaagccctgcatatagtgtatgtgtatctatacatttatcaacatacactacattggcagtaatcaaagagccctgaaaggataaaaagggaggcaaggtaagaacatcctatcttgtgatatgacaccacgtcacatcatgctatacctactcggtttctataataattccatcattagcatggattaaggatgaaatgtccctgtgggaatgggctaagactgtccagtattggcctgaaggtcataccgtcatcgatgaaagttcgcgactataggtatacatgcaaaccaaaagtcctgctgacatccaaggcatacgaccaagtcattgctggtcggaaaactgcggaaggtataccagtagcagctagagtgcatccgtgcctggccctggtctaggctgggtaaacatggactctactagagcaatggatgcagtgcgttgggtggaacggcccgtttttcgcctcgaacaggcacattctgaagttccatacggctcaagctgaagaagtcgcttacttcgacatccatcacagtatttgagcttacaatatactattcttctattgtccatgtcaggtgcccaccggccctcagttcagccttccttactttcttacccgtccattaattgttccacagcatgcttttaccttttcaatgtttgatattccgcgcttgaataatggggtattgagttggccgctcccaagaggagggtgacgatagcagcctgccgacgcattctgcatggatatccataatgtgaccagcatatgggaacacagatacctcaatagcctctattgtcctgcgtttgattcagcggacattaacacccaaaattaggcaaaatagaactatttccctggcttgtgctctcttgtcaatgcgcttggcagtagaaggctcttgtgggacattcaatggatatataagtcaaacgtagaaagcaagagtcagcataccctaaggcataaatcataggagctgtctcgatggctgccttcaccgttatcataatcggcgggagcatatcgggcctcaccctggcgaacgtgctggagaagtatgggatcaaatacatacttcttgaaaagcgcccgtcgattggaccccagcttggagcaactgtcgtggtccaccctagcggcctacacctcctttcccagcttggtctcagagagagagttgaggaattagcaaccccggtggaactgcagaaggcaattggaccggatggaaccttgttagcgacaatgaattatggcgagttatttaaaaacatgtaagtgtattgaatatcgcagccacgaatcaatgcgaccgcacgattgctgatgcgctcagtactggttatatgccaatgttcattgcacgacaagacctcatcaaagtgctttatgataatttgcaagacaaattcagggttcatgcctcgctggggctaagagaactcgaatgggcaggcgacaaggtaaaagtcacgactactgacggtacctcagttgttggagatattgttgtaggtgcggacggtgccaatagcagaac

SEQ ID NO: 4161 - DNA, 3792 bp, Emericella nidulans
ccagtacctccgctgtctagtgcactgcgcgcagccggccgaactttttcgttcggcgcccggttctcgaagacacctgcagtgccgcaccatcgcccgtcatctccagatacaactcggagcagagcaaccacaaacagcaccacaagcacggcaacgccgccaaagcttctagatacggaattacagatcggtcgagtggatgatggttttgagaacatgtttgacggcattggtgctcaggaaatggctcagaactcggtaagttgtctgcatttcagctaacgctttcgttatcggagttctgacgaatactagaatgcttctgccagcaaaccggggtttagtacgaaaagggatgagaaacccgccccgataaacacagaccgctcccaagaagttgacccgtccccgtactcgtggggtagccgccactcaggcgaaggtcttctagcagctgcggattcgccacaagaccatcctagtaccgcagaattgagcatggtacctcctccactaggaccgcgccgcaaatcgtcgccgatgtttgacgccgtaccggccagtactacctcacatcgctctctggagaaaccgagaacggcaaccgaaaagggtttgcggaggagcatcatatctccatctaaacgggacacggttgccattgacgatgaagatgcgaagctagttatggcgtctctcaattatagtaaaagaatgtcgcaagctcatactttggatgattcggcagatatgggagcggaagacgatattgctctgtttggctccgacaaaacaacaaaggatgtatctgcgcagcgaggatactttccacctgccggccccactggcgacagtgtagatgcttccattgcagcccatgcacggttggctgcggagtatgaaaataagcccgccccagcgccgtcttccaacaaagtcatgactccgtcccaattcgaacactatcggctgcaacaagaattgaaaagagcaaatgatggtgggtctgacactgatgattctgcagaaagcgactttgacgaagaggatgaggcggagaaaaatcgggaaactgagaggcagcgacggaaacaagaggctcatctgtctgtttaccgtcagcaaatgatgaaggtcactggacagcagtccccatctccatctcttcgcccggaagatcgcggcacgagcagtacgccgaatctagcgaatctctctttgcatcctggtaacccatccgggagcgggaaaagcagcgaaggggacgatgatgaggagattccgctcggcatattggcagcccatgggttcccaaaccgaaatcgcccaccgagccgtcttatgtcatccaactccatgcaaaacctccgcgcatcataccatcaaccacacctagggtctgcaggctcagattttggcggcggaaatcgaagcagcttgcccgtctttgccagaaatcttccacgggacccctattttggtgcaagcttggttgctcccgcaaacagagaatctctggcttttggaggagggggtggctcggtgtatggtggcccatcagccgctacaggatcatctcctgccctaccaccggggggattggttggcgttatcgctactgaagaacgggccagagctatgaggcgagaaagtccgaacactcaagcgatgtatgaccactcacaaggaattccgggtccaccaggaaacatgggaggtgttcctaggcctcatacgatgctcggcatgaactcgacccacgggcctagtttccaaccatcagtctccgcgacggatcaagctcagatacagctatctcagcagatgagcagcatgatgcagatgcagatgcagtggatgcagcaaatgattcagctccagggtgggcaggtccccccccaacaactcgcatcgcctggaaatctgccaatgccgtctttcccgggcaacacgaattcaaggccgtcatcaatgccctccgtcggtggagcgtttaataatgtgtctccaagctacgggggagggaaccaaaggacactaagtatgctcgaccccaatgtctcgtccaggttgaatagcccggctgggttatatgcacatggcggaaatcgaccagaaactccaggtgggcctggctatgctccttcactcgccccatcggagcgcagcaatgttgggctagcgccgcgctacaggcctgtgtctacgctgccagtcgaggctgaatcaggcagcttcctcccccagtcaaagccacggaatgacgagaaccgtagagccacttatctgggtccctctacgaatacgaacccgtcgaacacgacaatacgccctctatcctcctacggcaagactcttaccgttccatccagacttagcagccatagcccggctcaacctgatgaggatgacgatgatgaggggtgggcagaaatgatgaagaaacgagaaaagaaacgaaccaactggaaagtcaagaaagagtcatcaaactttggtgaggatctattgaatgcggtacattaatgagtacgagtagatatttggtttctttttttcggcgttattctaaggcattgtttatacacatacactcatgctacttataatatatcaacaaacgcatgacccagggttgcgcatataaaaggctgggcgcagtgcaagagttattgcgttcagtgtttgggcatgatttattaccaatccaatgacaatatgggaactcatgctgtcaagtatcgctcaaagtttccatacatagaattagactgcctacttttccatcaagacttattacccttccagccgcttccgtacgctaaactttcagaccctgcaaggtactttctgcctctcgaatcacatttgctacaatgtcggcggcaggaaggatttccctcacgagcccaagtccggtgccagcgtatgttgttaatctagcatttgggccccatcccgagtctcccttctttaactcttcctcgtagagcgctttattctcctcgtcactcatacctctttccacggcatcgatataagtctgatttattacgcctcgtccatcatatcgcgagggccagctcaagattcctcgcacacgatcatacacagtggagcgaacagtactcacgccgccatcagatgcacggagcacctcgtcttggtatccgcgggcgatccttgcctccgaggaggctagaaacctagtgcccatagccgcacccgaagctccgagcaccagggatgcagccaggcctcgcccgtctactatacccccagctgcgatgattggtatgtgatcccttagctgccgcgcctcaagagcatccttaacctcaggtacgagggtgattatagatgctgagttggtcaggccatggccgcctgcatctgagccttgaactaccaaggcatctggactcagggactctgcgacggcgaccgcctcgcttacagtgcctacctggacccagatctttgtcttgttgtcggtcacagcacgtacctgctcaaaccaggggcggagatcttcgggtattgccttggccccaaagaaccaaacggcacacggccggtaattcgcaattgcagcgatagacctggggagatcggcaccccagttgaggaagccgattccaattggaagcataccgcttgcggcgtagttttgttgagcaggtgagttcgattgcttgaagagctgcacggcttcttcaagattgctctcaagagacgagacgtcgaaacctccagcaagaaagccaggccacctgctgctgagacgga

SEQ ID NO: 4162 - DNA, 4211 bp, Emericella nidulans
ctccttgtatttgtcctccgcgctttcccccttatagagtcgcccatcttgcgtttctctcgctagctctcacgttcacgttcacgttcatatcctcgggcaagaaccgccatcacatcacccatcctcatctcacccctgcgctttggcttaccgtatccgaccgcaagctctcggttcccttgtgttcccccgctgttctgaatcgatttcaccgcgaccaccattatcccactgggatttcgtttcgcctaagcggtcgtacaatgattgcgcgattgccggcttcatttatcatctaatctatacctatctccgccatttccggcgttttcgaggcgacagcaagggcgcggggacaatactcggcataccccccctctcgtctggtccaaacttctctgctttttctctggtgcctggatagatacgcatcgcttctaaactagggtgcttccttgacttgtgcgctctcgctctcgcgctttttccgaccccgaatttggtgcctcgacccaggttctaggcgcgtaaacgttccggactggccatcatgttccgcaacaggtacgttcttgtgccgttcgctgataccatggccgactccaggctgactcaaagttgttctttcgtgatgtaggcgcaattcccagaagcccaacgaggagttgattcagcgattccaacgcaacttctgtgatgttgtcgctccgacaactaccatcggcgctgctgcaggcgtcacccagcagcttccactgggccatgggctcccaaagtacgtgtttgcgcatatttccgtcacttctttatctcttctttatgcctagagagaactcaagtcatttctctgggggcacggtgtggttagaacctaacattattcaaatgctagattttccatggatgcggacatgaagcttgattctattccggcaccacccacgcatttcatggctcccatggtcgaccccaactcggttcaattcgtaaacccactcaaccaccttcatggatactatactccgaattctgggaacttgagcgctggatatcacagtccggccggtgatcttcacacgcctgggatgggattaagcatgatcacgcctttgtctctttctcagcagggcccgattcccgcaaaccatgcgggcatgcatattgacccattcagccagcagtttatctcgccgcattttcagaaccctcaaccattcgcgccgcaggtatctttcgcacccagtgaattcgttcaaggcgatcttgcgttcgaagccgtcgatgactccgttgatgaaggctctttaaatgatgtcgacatgcagggcgccgctcaatcgcagatggcctcagcggtacggatttctgagcagcaggaactacagattccaggcgaaaagtacggcttctgtgtcatcgctccattgttgctctgttcactcaagctaacccgactttctgacagtttccgttataacgttaccttgagagctccgacagctatgatcaaccatcaaaatgaaattcccgtcacatacctcaacaaaggacaggcttactctttgtccgttgttgatactgcgccgccgcaaacgacctcacagcccgttaagtataggacattcgttcgcgtttcgttccaagatgatgaacagcgatcaaaacctgcagcttgctggcagctctggaaagaagggcgaggaacgagcgaagcgcaccagagaggaggaaagctgcaagccgttgagttcgttgatccgactcaaggaaatgtggaggaccagaagaaccggcagatccagcttgagagttcatcctttgatggattctgcgtgacgtggaccgctaatccgacaactaaggcgtctgactgcgccatatctgtccgtttcaacttcttgtctaccgacttcagccactccaagggtgtgaaaggtattccggtcagattgtgcgcgaagacggaaatggtggctggtggctccactggagagtccagcaatgaagcagaagtatgtttctgcaaagtcaagctttttcgtgaccacggagccgagcggaagctatccaatgatgttgcccacgtcaaaaagacgatcgagaagctgcggcaacagattcagcagtccgagatgggtgctggcaattttggcaagcgcaagcgtagcagtgccgctgtcggtttcaagagctcggaggcacgccccgcaaagctatttaagcataagcgcacgttatccatgagctcgcaggatggcgccggtaagatgagcgttgcagatgacctgcatgagaagcttgcgttgctgcaggacatgttctcatccaccaggcccgtcagcgttttcagtctacgaggcgacgaacaggacgatcctgatttgtacccagtgcagctcccagaatcacgagatttcatcaaaaaggaatttcgcggcgcccgtcatatcagtcttgatcgagctgctttgcaagaagtttcgcccaccagcagtcacatgtctatcagctcgccttgcaacccaatgcaggcaagtgtattctacgattccgagtactcacggcagtcatccgaggttccggacaactctgggtttctgaaacacccagtgaaagtccagaagatcccttcagggaatggcggcacacccactggctacattgaggcggttgatattgatccaacatatcgaccgcccgctgaacgacgacccagaccgagtaagttctgtgatcactgtctaatatactgagctaattggatactagttgcatgcttctatgttcgtttcccgcggaacggccagagccaggatgattactaccgcgcggtgtatctcaccgagcgtacagtgcgtgacttgatggagaagatctccatgaaacagcggatagatcctcaacgcatcatccgtgtgcttctcgttaaggaaaatggactcaggatcatggttgacgatgatgttgttcgcgaactccctgacggacaggacatggttgctgagatttccgaaacggcggcgtacgatgcatcagatacgccttctccagtcgaggtgaaactgagatactaagttctctaacaagattggtgacttgtatttgcttgagttcggtcctacttctggttcacattcggagcgaaaaatatacctctttggtcctcgtttgcgtgcgcctggtgcgcttcaggaggcgtggatttgatgtttcacggccttattttattttttgccctttgttcttcggtcatctccttttgcggcgtttgggacatttacaacttttaatgcggccatctcggggcgttggatacggggataataaacgagttcccgggcaatgataccctcctttttatatggacggcagtattgatcttgatgctattttcatgctttctctgtcttatactaatcgatgacatgacactgtcgcccatcttgagctagtgaccctattctggctactcaagggatctggcggccaacaatcatttattacaccacctacctgatgacgactttccttttctttcaccgctgcaagtcttgcggcttgggggacgatcgatgcgctcgaagatataccctccttttccaaaactttgatttgacgtgtttgttcatgaggacctttggcgatgttttgctagtgcatgaggagagacttcagcgtctcccggggtagcgaaagttgcaagggattatcggaatggcatgttgaagaaatcatgtatgtagtttaagccaatctgggtgcaaaaaatacgacttggacctggaagaagcaaagtcaatgggctgttgtctgagatatataaggtataggtttagaacacgtaacctagccctcgatgtcctagagtaggtagaatactgaagctcgctatagatagtactgaggaaaagcgactcgaattgagtttgatactaacaaatattgagacatgccttgcacgttcattaataacgtgaccaaaatcccaaagcctaatatttctcccaaacatccagttacagcctgtgcagatatagcaatcccttgcggcaccagatcccggtgttcctaaccaggaaataggtctgttatctggccctcagatcacccctgggtctgggcatgataaataacgttaaaattccaccctgacgatcacaggctagcgatccaaatcccggggaatgcaaattctgattgaatatctg

SEQ ID NO: 4163 - DNA, 1594 bp, Emericella nidulans
gcatcatcagggtcgtcgctgaaggtagtctttgctgggacaaatgtagggtctgtggaagtcacggtgaacgtcaagtcaggctgcgggttgacaacgaagacgggcaatttctgatctagctggaccttctccacatcagcttcgagcatgaggatggcatctgcatcgacagcctccacgtccgccctcagctgctctggggcaatagtccgcgccatggggatcatcgtgtaccggttcgcaatggcaaggacggctagggcaaggatgggtccgttgggcagcatgacggcaaccctgggcctaccgtgagctgggaacggcaggccgagctcgaagtctttgatgaaggaccgtagtcgtgcgtatgagagttcctggttggaagctgggtcgatgagggccggtcgatggggatcgttgaggagcaggtctggaaggggtgatgttcggtgcttcatgcggtgctggatacgctgcagggtcgtgttgatggctgtgtctcgtccgtctcgggcatgctctggcagactgagccagatgtcctgatagcagcgcaagagatccatggccagccatggctctgtgcgtgtatcaggaccgtcatggtcactgagcaagcagtccagtctctccaggcccctggcccctaggccagaggcagaagcttcacagcgcaggctgcgcaattcgtcctgcaacattattccgtccttccacctgttcaggctgggctggattggaacaaaagagctggctggaactggcgactgcgagggcagaggctattgtttgcgataccgcagcttaataaatagttcatgccagaagatcgaacgccgccgtgccacggcgtggccctccgaacagagtagaccagctccgtttcagtctcaatcgcaatcgcagcccgggatgcagtggggccgtgtgacaaactatttacaaaagatcgacggtgcggacggtagaaagtggacgatcagcaggagagtgccttaacggacggtccccaccgttagggatcggtgggggctgccctgagggttcttcgactcaaaaattggatgttagggctggcaacctggcacgaacgcctctaagaggctgaagcttatacggaagccgtgctctgttgcacaacatggcattcgccatgcgcttcactgccagggcccgacagttcccgtcgagctggccaagcgagacagtcgatgcggtcgatgagcgccatagtaaccgtgccattcgtcacaagagataacagtccctttttccccttgccgcccctatcaaaaggataaggagcgctgatcagtctggacaatttcccacgagattcgagaaacgtagtccatttgtcaggctccagtctagttctcgaagcgcagatcgagctgatcaccgccgatatcgtgcccgacacgtatctggcgcagggttattcggcagtggcagtgggcactgggccaggcacaagcgctgctcggcttcccgaaacagccgctgcattaggaaattcttcgagacctggagcgatcagggtctcgaaggggagagaaccagcgagtggggtggtaattgacgactg

SEQ ID NO: 4164 - DNA, 1811 bp, Emericella nidulans
cacaccccatatcgccaaaccataagatcactccataaaacgccaatctttctattgtaggacttttggatctgccttcctgcttgaggtatcattaatcatatccgtacttgcaaagaaaaatagctccagccgattgaatacgctcaggattcccccccttcaattggctccaacattttggacatgtaaggaccgtctaagctatatccaagacgagcatagtagctgcgaacgccgacgcccgagatgacactgatcttggtactgccgtgctcttctcgcgcaattcgctcggcctcctccatcaacaaagttccaaaaccacgatgttgaaacttgcgcgggtcacgtccgtggagaggaaccgcggaaccgtacacgtgcaattcacgaatgatactggtttgttgaccggtgaactcgggacggaatgtgtgcgtggggctgcacttgcgcagacgtagaagaccgatcaaaatgtcttgcttagggtcttcatacgcaaggaacgtctcccatccaccatttgccgtataatcgcggcgaatcagctccacctgagacgggcgaatcttgttcttgacttcattgataccgacctcgcgcgtacggacatctcgacaagttgtaccaaaatctttcatgcgcgctaaagccagctctcgcaggtttccattctcgacacctgaagtaaccagcggcatcggaatgtctcgctgaacacgatagatacgggtccagggggggacgagtgcgaggatacgagcaacaaggtcgataagcgcattaggggtgtagttcttgtagcggcctgtcctccaaagttcgtacagaccggttccgcgaatgacaagtgtggggtatatcttcagcccgtcggttcgaaaagccgggttctcaaaatactcttcgaactgaaacaagtcacgttccatgccgacatttggcaagtctggcatcatgtggctaaccaccttaaagcccgcatccttcgcaagcttaaatgtttccgcaactgcagcaaccgtgtggccgcggtttgtgtctcgtgcaacatcctcgtacaagctctgaacaccgatttcaagtctcgtgcatccgtagcgaagcatgctactcaaatgcgtgtccaaacagtaatcgggacgagtctcaatagttattcccacacactttatattactcatttctccagcctgaactgcttcgtccacattatcagtctgataaccgctgagcgcattgtgaagctgagcgacaaaggtatcccgatactctgcaggcagagacatgaatgtccctcccataatgatgtactcgaccttgtcgacgctatggcccaaggatctgatctgttccactcgtccccttgcctgctcaaacggatcataacgtgcgcggattgctcgcatcgacgtaggttcatatccggtataggattgggtagaatactcgaagtcggaatcagggccgccggggcaatagacacagatgtttcctgtataggcaatgtgtgggcagcggtggggtttgctcatcacagcaacaacggcgataccagaggacgttcctaaagatgtatgagctagacaacaggtcaaagagcaaaagaccacatactgattggcttcgcaatcaactttggcaggatatatttcttgtagtgttcaggaacggcagagatgatggccgtcagcggcggctgatggctcaagctatgcttttttgccatctgaccccggagtttgttgaggttgatatccctcttgggttgcgttgggtctctgtggattacatacagatcagag

SEQ ID NO: 4165 - DNA, 2687 bp, Emericella nidulans
caactatcaggaccaacaaggtgaaaccgcgttgcacgttgcggctcgctttgaccatgaaaagtgcgcccgcattctgctcaagggtaacgatgttcagaaagcagacaccgaacttgctgaaagcacttactcttggaccccgcttttcatcgcctgcgttgatggctcattaagtgttgtcgaggccctaattgaagctggtgccgaccttgaaaggttggattcatctggctggactgcaaaggaacacgcggccctgcgtggacatcttgacgtggccagatgtcttgcgaaggtgactcctgaacctgagctttccgaagaacctgctttgactgttcccactgcctctggttctactacttcgggtcccttgtcgtcacagcctcaatcatcgctgatggagaaaaaatcgaacggagggagcgctgcagggagttctccctcccggaatcctgaacctgttaagtcatttggacatcggtatctcaccgacgaggccatgatcctagtcagtttgggcaccatggacactcgaaagcacgtccacgccgtgaaccttgaccgtattcctatggagcaccgtcacgctactcagctggacactgctctgtctatcgtcgtctctgcgaatggggcgcacggagaacccgaaatcatcgatcttactgtgcaagagaacatctcaactgaaccaattgtattccatgcagcagacccaactaaggttaggctgctattcgaccttgatcctacgtactcaggctcgaaggaccaaatagtggggcgaggtgttgccttgctgtccagcgtgaggccgagtgtgggatcgcaccgtactaaccttcaaggcgactctactgtacctatcgttgctgctaataccttggaagtgatcggttccattacattcaacttcctggtcattacacctttcaagcacccgaacatgtccatcaacagggagcagacctactggaggagtatgtcgtcaacaatggtcatcggacatcgcggcttgggcaagaattttgctactcgaaattcattgcaacttggcgagaataccatacagtccttcatcgcagctgcgaacctgggcgcttcatacgttgaatttgatattcagctcacaaaggatcacgttccagtcatttaccatgatttcctcgtcagcgaaacaggtattgacgctcctgttcacaccttgacgctcgaacagttcctccaactcggcgagcgaggcacgactcgaacacctgggtctcctggccagattgccatcggaggtactgaacgaagcaagacccctcccttgcctcctcgccatagatcaatgtctgtgggcggtacagagagcgatatttctgaactcaacgaaagaattaagcatacccgcgatttcaagaaaaaggggttcaaaggaaatagcagaggcaatcatattcaagccccttttgctactctggaagagctgttcaagaaactgcctcagaacgttgggttcaacatggagttgagtaagtctatccatttccaggtatatttatggttcggccgctaatcaaaggctgaagaatatcccatgctctacgagagtgaagaggaggagatggatacatatgctgttgagctgaattccttcgtcgacactgtcctcgagaaggtatatacgttgggccagggccggaacatgatcttctcgagcttcaaccctgatatttgcttgcttttgtccttcaagcagccgtcaattcccgtccttttcctgacagattccggatccagccctattggagatatccgagctagcagtttacaagaggcgatccgtttcgcctctcgatggaatttgctcggcgtggtgacgcaggcagaatgccttgtgctctgcccgcgtctcatccgcgttgttaaagagtccggtctcgtctgcgtatcctatggcacatccaacaacgatcctcacaaggtcaaggtaagcttctgagcacaccgtggcttctggacctctctaacatcattttagctccaagccgccgaaggaatcgatgcggtaatcgtcgactctgtcttagccatccggaaaggtctcaccgagcatgaaggcaaaaacagtttcacaccaggacctactccacacgctagtccacttagccaaccgactatcaatgccgctctcaaggatgctcacaggattccggttctgaataataatacagaggtaaaagacaactatctccaagtcaagtctgacgctgcttcgctctgaaagaagttctgcgttaatcttcaaagcgtcgcgtgttcagtgtgttcagttgaaatttagatatacatcgtgtcaccatgatctgtttagatacatcatcattcatatcctatattaatctcagcgagtatttagttcaaagatctgctcgtttgtatgcataaactatccgttttcttaacccttacaacaaattatgcctggctttgtactatttactgggctactacactccatggctagtgctgttgagtgtaaatagtgcgaaatcacgtgcgcgcatgccacttttttgaactaagtccggagcttttaggtaactccgacgatcaactactgagggtgcaggagcttcattatccccatattctttttcaagaggggtcagtgtagttcgattgccaaataacag

SEQ ID NO: 4166 - DNA, 7496 bp, Emericella nidulans
cacgaccttttacttgacttttatatcaagaaagatgcaagagacaagctgctgggtcaagtcggttaccaagcttacatgcaggcccttgcggtcctccgcccgatgtgcgtcttcgacatgaagttcatcaccgtggtttctgctaatgataataatcgctaacaaatatttaccaggcatcaataccccatggcccgtcctacggtcaggcaacattttgagaacatgcttaaccatgttactcgtgacggtactagcaaggccaccagaatttcccccgggacacctgcggcattccctgaccagccagctccctctacggcttttttgatgctttctaatgcagacgttcttactttgttgaatgctctctttcccactgccccttccccggcttacacctcccagtcgccctcctcaggactttcattatcgcctcttggatcacaaccggacaagcatggcgtatttacgtttgaaccggggttttatcgcggatctgtacccttctcccctaggtcagctttctccacgaagaattctctccccacggatgtgcatttcttctcaacacaggagaacaatatcagctcaaaggctgacagaattcggttcgaattgtctgacctaggtgagcatgatccgcgcactcatctggagccccctacagccgaggaatggacactcttcaccgtctcgcgaaatgataggcgcctagcctggggcctgtttccagatagtcaaaccaacgcttcggagagctttcctgccgatgatggcagcccgtccaacttagggacagaagacaattttgaagcgctgcagacagcaattgtgaaactcattctagaacatcccgcggatgaccgtgttgagtcacagttgccccggcgctccccacaggcacatgctctgtcactcaaggagcgattcaatagcgccatggcatactgccatcagaaatctgattttattggagcccattactggtggaatgctgctcggttgctacgccggagtatcgctaactcttccacccaacccgttgatgactcctggatcctgggaccaatgcactccgcttgcgtccactctctccaaacatctagctctgtcatcgagcgctgcgaagctgattttgtcgccatcgactgccatactcgacggcttcagagcacggtcaaggatatgatgaaaactatggcgagacttcgaaacaagatgtggtatatgactgacgtgagaaactctagacgctatgaagaagccaagcatgttgctctcgcgctaaagaccatgccctacgctcacagatatgctcagaacgatgctcgatctcgtaatggcgctagatcattcggtggaacattaatacaaaaacccgaattacaaatcatgaacgtcatgaaagctcccagtagccaagcaggcccgaccaagcttgcagatgaacaagttgaattaattcgaaaatggttggctcataacaatatcgacaacttctgcaaaggtgaagaaagaattcatcgcttctgctatgaggtcgggacaagtatcaaccgtctggtcggagaaaccatggcagagacaccagtgctatgggccagtgaactgttccacaaagaacgaaccaagtatgaaggatccagtaaccgaggtttttttagccttacatccagcctgcggtcatttagcggggccggtgatgattctgtccaccctgcgtcctcatttgcaagcactgtccttcgcccgcaagaaacgtcaagacaggagccccctcggctaaacctcaagccttctttccagagccttgattccgatcgatggaggtcacaagcggctggcacagacacgtcgtccatccttgggacagagcgccatccacaactaccggggactcatgcagcaccttctggtcaaccccgcctccgcatgctcattaccccccaagcgcgtcgagtctctattctcgccctccgtctatgcttagcgatactgctgtacagccacctcgacgttctgatcggaaatcaaatggcaagactgtgttcctaaatgacataaggaaaaccttgacaagcttacttctaagcgaccttggttcaccagtatggagttgtggaaccgaaacagacgcttggtttagcaatgtactcgatcagaagagaatccaaactcagatgaggaaaagaactcgcattcaacgtttctatgctgagtgtgatgagcgaccggcccgtccgtcgactcctcgagttccgtcctcccgaagaagcagatctcttgacccttttattcgggagactagagatcattcttctacagagactgcagatgtcaaatctactagtatggagggaaatgctccgttttcatataggactgtctttcgtcgccttctcgacgtcttctcccgtcacgggaatccgtttgtcaagcttgacgcgcttcgagaccttcgaagcttggttattgcgtcgatcaccaccgccaacgatgatcaggtttcgtctccctctgcaactggttcgccttatagaagacgcatgtcagtaatccacaggaagcgcaatgcgcgaagcagtttctccgagcctcgttcttgccgcccacctgaaaaggaccccttgctcacgcctacttctcctcctgccgagtctattatctttgattcgcggccatctgactattcattacctaccgagaagcagatcgttgaagcactccgagaaatcatcctcgacatgaagccgaagactctgttccgcgatcttcaatttatctcggcgtttgtccctatcgacactttaaacaaaacggacagcggtactgccttcctgcaatttggactcgccgcactaagcttgaaggatgaggtttgccatagtatggtggaaattgcggatgagattgtttcccaagaactaacccgtcgtcaccctgcacacatattggatgtgcattctcgcgtaggtgatccaatgaaggatgctgccaacatgtggatcatcacagcaaaggaaggccacccagtcgctcaacgagagctagcaattctttacctgacccaccccgaactcgtcccccgagtcactttccccctcactcttttaagagataccttcaaggcggagatgatgtaccgccgagacaaggactccaaatcggacccccacaccatgtcctagcactgcactggatgcagctctcggccaacgggggagacgagctcgcgcggaaccggcttcgtgaacgcgaggagttcgagtctattgcttaatattttctacttcgtttattgattccacctgctcttccttgtcttttgataccatctcggagtgaagccttatatttggtgattccgtgttactttgccactaatctcggagcagtgattttcttctcactatcttttgttcttgacctgtagctgtactgggatttcgctgtcagagcatgagttgtttgttacattacagcatacaaggcttggctttgggtggcaatttggcttctataccaggagtacctttctttattttgcgagtattatacctcattggatttccagagagaagaaaaagatgtttgattaaagatattgtagcatatgtactcccgagtcatagcacatgcttacctaaggtagcacgacgtcatccatcacgccccacgtgccaaatcagacgagccaaacatgtgctcctcgacttcggctctggcatctctcgatcctagtagcattactttaggtcatcacgtattttcctgctgagataataccgaagtccttctgattacttggtcatctgcctgagctgtggctacagtacctgttttgcaagtcaggagggtgaatgcgacctgattcagctctgcggttagacccttcagctgacttgggatctggtatataggtacaaacaggccatcgcgcgcttccccgatcctgcttcccctgcttatagatctcctgttccattcgtcagcttatcctttttttccgctggttgtacattgaacggacaagggtcgacagaaacaatcctttccgtggctcgaatatacacaccccacttcaccttgatagaatggcgcagaacgccgaagcgactccaaagagacctaagggtaaatatctcttatacctatatggctgttgatatttcattccataatacttaactaacacgcttttaggtattctcaagaattctagttctcaacagctactccacgttgcacctaatgaccctcaccatacgccctctccaccgccggcagatttcaaggaacttacactgcaaaatacccttgtaaacgccggtcgccgcccttccgcctcctcgcgccgcacttctctcgccagcgcccacggccaccatgacgacgtctcgccccgccttaagtgggacgaagccaatctgtatctaacggagcaggagaagacggcaaagatgaagatcgatgagcccaaaactccgtatgctccgcgctatgatcccaccgaggatgaggaggagatgaagcttgcagaagcgcaggagagcctgattaatgcgcagggcgttgttgtggatgagctagacaagaataagaaaggctcttcgtcagcctcacacaagaaggtttccgaagatgacattcctgaactggagttgggagagcccgaggaggagatttcgcaggggacgcatcttgagcccggcgatagaattacgcgtgcgcgcagcttgagtagtgagtctggtcgcagtgacaggcatgtcgttgttggtgcggatgtcagtgaggccaacggggatatgcgcttgtcgcctgaagaagcgcaggagaagcatcggcagtttgaggagcagcggaaaaagcactatgagatgcgaaatatcaaagagcttctagcgtatgtctccgcccccttttctcctcaaagtgtgtactcatactgaccatgacaggcaccacgagaacttggacgagatggacgaagaagacgacgaaggagcatccagctctgctgctccgcctcccatgccgcagattccacagcaatatgtgaacggaggcaagtgagccttcgataatagtgcagtcaaaccccgagattgactttcctcttgtatattcccgagcgctttgagttatgttgacaagcagacgagtgatgaataagtctggttttttttttttcctaaggtactgtgttatctatgagcttgattttctcctgcttcctgaataattttgatagatcttgctcttcctgttgagcaaagttgacatttgcatttcgaatatacgaggtcgacaatgttatccacaattattttgcgatgaatcacaggagctgcgtatgcatttacctatatatagcccgtgggtctagctatataatgacagcttggcactcaggagaggagagcctgtagcctgtcgcaacaaatttcacaaatcatgagggatcgtacgaccggatccatgagactagtcttgaaagagaagtggtctagatgtgataaatagatttgtatgactcaattagttgagttgatacctagtttcgctcctgaagcgggagttgtgttttgtttgtgctcccccccggcttgctcctgcatcttcctctctttctctaagcatctcctcttccacatcttaccgtttcgaatccatccttgttatcgattttatatctactacttctcattcagtttgatttgcgaccatggccgagcaggcaaagctaccagaccagcccagccagttcctgagacccaggtcccggacaacggcaagcctgagcagcagcccaccgcaaccgagtccgcgcctgcaccggaacctgccactacagagcccaccactgctgcaactgctccttcagctgtagatggtaccggagaaactgctcctgctgcacctgagcccgcagtgcgccagtagcagccgcagccgcagctccagctccagagcctaccaagtccgaaccgcagcccgcagttggtgaacagagcgaacccgcgaagaaagatgagcccgcaaagcctgaatacttcaccaaaactcctgcactcgagcagttcttcgatcgtctccctaccattctttccaataccggccatcaggagatgtggggtgtacccctgaagcatgaagttaccgatatccccacaatcaacgtccttatcaaattcctccgagcaaacgccggtgaccttaaagctgcagaggatcagctaagcaaggctttgacctggcgcaaagagaacgatcccattgctttggctgatgcgtcaaagaacagctatgatgcatccaagttcaaagggttgggatacctgactacctatcagcgcgaggggaagggtgatttggttgtcacttggaatatctatggtgctgtcaagaagtttgacgaaacttcggcgatatcactgagtatgtagctgtcattccttccctcgagacatttagctaatggaaaggtcaggtttatcaagtggcgcgcagctcttatggaactagctgtccaggagcttaagctggaccaggctacgtcagtcattgactacgatggcgaggacccctatcaaatgatccaagtccacgactacttaaatgtcagctttctccgcatgaacccgaacgtcaaggcggcaaccaagaagaccattgacgtcttcagtaccgcttacccggagcttctgcgcgaaaagttcttcgtcaacgtcccagccattatgggctggatgtttgctgtaatgaaagtatttgtcaaccagaacaccgcccgcaagttccatcccatttccaacggcgcaaacctcgcgaaggagttccctgctggagtggcagagaaattccccaaggcttatggaggttctgctccggatctggagagctctgcgcggactgttgctcttaaagaggtgaaagaggaaaagaaggaagaaccgaagacgggatctaaggaggagcagaagggggagcagaagggggagtgaccacaccgactgtgtcgcgagtcagagctgggtggggagcttgtttgtgtttgcgtctcttgctaccatgatacctcttagaattgttattacgggcgagcgcatggagtattttccagactggcttttctgttggactcctcgccgcctttttagttgtataattaatctctattcagaaccactcctgaatctacagctgtatgtgcttgttcgaaatgtagatttcgctattgtacattcgtaccaaaacattgatattgtatgcttttgatgaggcgaaactgcatagttctggatggtggccgggacatcataagcccgggcctcactccgccttctgatcagaatcccgacaattcaagcttctacatagaacaaagctcctccaagtaacaattaccttttcgttgccataattcagagaccagaatgcctcttaccctccagcgattcgatgtcctcccaatctgattgattgat

SEQ ID NO: 4167 - DNA, 2072 bp, Emericella nidulans
ggggagagggataaagactgccgtcttgcccagtacttggctctaggaacgagtggtctataaagatcgggcgttaacacaggatacagcagtgtccggcgagaaggacctactagctcttagagagtcgatacttgatggcggctctgctcgcccaggtttcgatgaccatgaatcttgcgcccctaatgtcggcctccgcatcgacttaggaggaggtgggggaggggacagcgttcgcggtataactgcgcgggagttagcaacaacactgcacctagagcactgattaagctgttaccgtttgcagatttggcgcagacatgatcccccatcgcaaggatgtcaacgttgaccccacagtcagagcatttgatcatgggcaagtcgcccatgtctgatgccatcttgacgaacacgcggtctcgattgccaactcccccgttgttaggaaatcatccgacttggcagctcaatcatcggtcgtgcattcgtcgacacgataactcgcccggttgcgtaatcctttgtcctccgagtagatgtactggccagcgctcggtcaatacgggatggttgagggatgaggcaggctcagccaagccacgagcagagtttcacagcaggatcttctcatcgcggcgcttgtaagagtccgggtaggcctggaggttctgcgggacaccctcgttctcaaatgctgcgattctgctagaaagccaagcaactaagtctttcttcttggacttattcctcagaggacctggatgccgtacgatagtttctggaaatgagatcacatccttgagttgagttgttttaacgtctccaggcataggcttaatttttggcgcggtttgccctgcgctataacgagggacgtgtttcgggaatgaagagaggaccgtaccaccaaaaccgaatttgaaaatcggcgctcctttccatctttgaagagggtcaagctcttgtccgtcgcttggaggaatgaattcaagtgactgcgagatggtgcgaatatgactggagggttgcattggcgcgtaagtatgggaggtcttcgttggcgaactgggcgcgtgaacagatgcaggccgtttgagtggatcgacagacggtacggatagtctagggcctgactgttgctgggtcggagattgtgtctgcgatcttcgaggaggaacaaatggcggtgtctcgggaggtggagtataggcggagggcgtactattgttaacatgcgaaacgcggcgggaaaactcttctagatatgaaggcggcgcatagggattccttggtggggaggtctgctggtagctgcttgatgtatctacagcactcgggccagagcctgtacttgggaagaacgaggtgacatcggggcggctgtctcagtgtgtgatggttgtccagtaacaggtgaagtaggctgtggaaaagatggtttccgcgaagcctcgtttggttgataggaaaccttctcgtggtgggctagcggacttgaagttcgcggctggaaaggtaaggtaactgtttggcccggaatgacagacggctgtgaggtataacgttgcaaaggcgcagacgcagctgctggcggcggcggcgctggagaatacctaggcgaagcgggcggtttaactcctggttgcaatgttggtggcttcggggagtatcttgagttgataggaggtactgcaggagcgctttggctactggagcccacattgtttgcatacggccccaatttttccggctgctgcaattgagattgaggagtgtcgccagacagttgagcataaggattagtgacaggatgcgctgccgggggcggctgcacaaatgcagggcttgccgtgttaaatttcggcgtataccgccctgattctgcaggccgcgaacgtggtcgtacgggggggagcggcaactcctcgtagaagttctttggcgcgcttgcaaccggagcatttggtttcgatgctggaggcaaggtcgcagcattgataggcgggactggtactccagaagaagactgaggaggtggaggcgccgtaaagctactacttcgtgga

SEQ ID NO: 4168 - DNA, 2239 bp, Emericella nidulans
  unsure (1)..(2239): unsure at all n locations
cgaattaaccctactaaagggatctacagcaactgccaattcagcgatatgcagagtagcaagtttcatctaaccctctttctctcgctctcatctctctcaccactccgtttcctagtgatcccaaatcccatatccgtccccccctcggcaacacgaacaatcgccaccaatttcataatgaaccctctcggggcccgattcacctcaaccctcgctaacaccgcacttaacctctcccggaacggatacagaacttctcctgataaatccgccaacgcatcgaggacaaagtgaccttcctcctcctcctcatccgcagatccaataagttggtggtataggttgcgcgagtcctcgtcgtcttcgctgtgcgcagaccagttggcgttggctggcagaaacgagacgcagccgtacggattgccggctaaagcgtctttattgcgtgtggaaatgtcttcgaggatggctatgagtgctttagcagcgccctggaggccgtgaggggcgcgaacgtggatatttttgtggattttgagaatgttggaccttagggtatggacgactgcagccatactcaacgctttgcctttatcttcagtttcataaggtcctcctagtgtttggcaatacgtatcgaactcggagagaatgctcctcgatctcgcgagcattttatcgaagtaaatcgccgcacaggccccctgcggcatagctttacagagactcgtgaagacgttgtcgtcgtgtacggcgagctggaagatggttgcttccatatctccctgcaccacgcattgctccggtgatctctttttcttcggcgacaagcaattacattccgtatcttctggctcagaatcagactcgacgggttcaactcgaaactcttccggaagaatctctgtgctgaatgcggataaaatatcgcgtaccctctgtgtccgactcatgccgccttcttcgacttctgagcagacatacggccagtcataatgctctgcgaggccttctagggttgttatggactggttggaaaggagctgctcaatgcgcgggaaaccctgcgcatgcccgtcgctcgagaggacgatctttggaggagcatagggagaaggagagtgcgaatgaaattgagcccggacttggtccagaagccactataggccatatcagactcattagcgagccagatctttaacaagaaacgagccctgacttgctcgccggatgcgaaataagactcacaaagatatgctgacaagcgacagcatctcttccccggaaagcggcgcaggtgcacgtataaccatcaccattgccatatccgctcgtaacgacatcattcacttcacccgaaaagttcatctgagtcttgccccaacccaacagcggaatccgcacgcgcgccgtctctgcaaaaacaaactcgtagcccgcccttttcctctcacaaaacagcacctcataggctggcgttaagccaaggagcgccctagcctccgtctcatgatcaaagcccgaaccgcanaggtcatacaagaggcccgatgaggccttgacagcggccatgtccgtcatgttcgacgactctgctcgtcctagcccttgccctcgcccacctccaccatccgatgcagccttcggctctatttctgaagatccttgaatcgaaagagcggaaaactgccccgtaggcgtggacattgaggagatccgagctttgctttgctttgggttgtgccgctaataatgcgtagcttatttgagggtgcccggacggctccagcgtaccagggccaggaataaaataccagagaaagaagggtacgttgtaaggttttgtgaatgatattcccgaagccggtcaggaacagacaacgcagggacaaaaccagaaatgcggccatggtgcgtgctgatggagatataaatgagtcgaatcttcctcgtcttcaaccccagctgcttcctcgccgcagcttctgttcgtactcaagaatcatgcggcactatcgagagctgaacacaacagcgccattgatgcttattgacaagctgagaggcacggctcgtcttgggtgggttctggtgacagcnngcgttgtctttgtgccgcttgacgacattttgctggataaagcagaagtattacgcacagttgagtgccgaaggagaatgattcttaaaaagtgagatgtgaaagaattgagccgacaggcgcactcagcagctg

SEQ ID NO: 4169 - DNA, 6045 bp, Emericella nidulans
ccggcttgccaatgcatttcacgatacgttataatagtgagataaacgatcctgagcatttaaaatatctattcactgcaaaagttgattctaaccgcaagttattccttttagtggcactgaagtgtaaataaggaggcgtggggagggagtaatggcggcggcaaggcagatgcattaggatagatatcaaagtatcacactttgttggtcaaatccaagctctgatttctgaaagaaccccccaagtaccgctccaagattctccatccattcgcggcaatcctcaagcgatcaacgacctgtccaaaccaccagatcgctggcaatccatcggccctcactatgtcgcgcccagcaacaacatctgcatcgggttcgccctcgccccacccgtatctaattagagtctcttgatatctgaccacgacgcctccgttctcatcgcggtcaacaacgtggtttgtagcactgcgaccaatgccagggatgaagaatccatacacattctcaaggaattgtttgatctcggcgtgacctcggatcgtgccgtggctatggtacacgatggcgtctgggagaaacgtggctgtcaccttgtcgtagttgaattcttggaaaatgaggttgtgacggttgacgaagtcaatcgccgtgcttctttcttcgctttttatatcttttgatggaggcaatgggacgggcgggaatcgtccatctacgaggaatgaggccatgatgatcgggtatggaggatggagcctgtggtatgttcaggtaaatgtcagacctggaagctgtgatggtgcagaggggatacaccaagggttctagactatttatgatatctgttggacagatcttcgctgatattgggcctctagtctctgtgaacaccattagtcagttaactcgaaatacctcggcagatgtcagtattccgcgatgatgggaatattcatcagatatttgcaagttaaatgttactgctcactaatcaggtcctgcccatggactcgccgctaataatcagtgattagtgataattattgcacttcacctctagcagaccctcttttccccaatcctgtaatactcccatcaatcagatccatctttcataacggcagttgctgactttatgcttgttaatgttgtttctgtggtctttatgtaacctagttccatctgtagccatcaaaggcaatgtcagggcaagaagtcaaagtttctattagcaactgatttcaaaccccatttagttcaagtaattgatgttgagcaatttaggttgactagctctatatgacaagattcttcaaatcttaaactaaacacttttctctcttctaagatcatcaagacccttcagcacagaccttggccggccatcataccccttcattctcatccacgcctccaaacttgggatccgagacgggtgaatccgatccatcagtgccatatctcttgttgcacctttgccctcactccaatacccccaccaggctgtgaaattctcccgccaggtcataaatgactcgtcgcgaggcacatccgaggccaccgcccagtttgcatacgctcctggatacagctcggcctcgtccaggtactcatctaaagaaagccgcttgtggatacctttttttctcgtaaccttagtgaaagtggtcgctatctcggcgaagcttacttgatctgtcgcgacttcgaggttaaggcctgcggactgcgaggggttgtcaaaaagccagaggctgtagactccgacgtcgtcgagtgcaatgagcgggatcttgccgtccgctaattcaggtgacgattagataacagtcggccgttctctaatataagaaaagagaaaagcttaccagccggattctcccaagcaaatgaaccatcctcttttcctttgggacaaacattccatcaaagagcatatccatgtacggccccgtggtcagcagcacagtaatcatacgggactcctggccggggtctcagctgtgaacccctcctggccatggttgaggatcagatcaccaatccgccttggaatcacaatgtgcgcaatggtactgctcatcccaacctgctttacggagagtatagtcgatattcgcgaaaacatagtgtttgacgccatgatgacgagcgatctcgtacgctcgtataccgtagatcagctcgctttttccccgagcgtaaatccgtccaggcgccgtatacgctggcgaaggcagcgtggagatctgcctggtttcctggaagccttgctggagcgttacctgaggtagcacaaccattttcctagcctgctctgaggcggtatttcgagtcagtactcggacatcgtagcggccacttgaggaaagggctatcattctccatgttagactgctgttcctcgcaatcccgtctggaatgcgacgtacccttgacaacgggagtgccctgagcgccagtattcccataacaaggatcaactttctgtctgacatggtggaatccgcgtgtttttctctgtatgcgttaacttggcaataggtcctttctaggtttctcagccttaagatatcaggcataatatacgcttgtatctaccgcggctacgtattactgatatctaagcggtaggattatccgacagcatgggtacaaaagcaatttgagatctatattgattagtgatacctcgtagacattttgcgtcaaaactccatcagcacggccatatccactgttgctgcaggtgttttcgtcattacggatttgtaaaacgtccaactacactcgatatggctcgagaacctttagtagcccggcactaatctgtcagaaaagtccttctttttttaaagcagatgtcattctcgagtacaaactacactctctcgaaaatagtctgtcgcagatattatgattaatctccggcctactgccgaggacatagtatgaagtattattgagcaaggcgcaaatgtggtataatcctcttattgtaccttttcaaattgtatatgttctagtataaaatagctctttctccatgccgctctaagctccgtccacattgccaaccgtcctccatcagcaaccttacgatagagtaagtactcaatgattatgaataatctgcgccaagtatgagtaagtcgactattagcagcacatgagtccgtacctatgaacagagacaagggtaacaaggccagcattcttatagtttctctaggcttatatagcttcacggtgctccttgttgtattcaaattccagctgcacggagtccaggcacgttatcatcagccggaaataggttttgggagattgtcataataatgtattatttaggattaagtattcctattagagccatgggcatatccaagtggtaagtgaacggggggcaatggttgcctccactgatcagggaacatctgccttaaccagaggtatgcgcaatcgtccaagcctgactaggctaagtaggcagcaagcaacttgatggcctctccctgtcattccatccctcccactcaagcaatcttgatacttgactttcgcgtcaagggtacatcgacgtgcagcaccagcttctgattctcctcatcatactcgacctccgcgtcctcagccgccacctcgggcttggcccccacacccagaatagtaatccgctcgattccgacgcctgggtcatactcaaacgagcccttcatctcaaagacgccatcgacatagctaaagtcaatctcggagactttatcctgcacctgcgacaggccatcgtcaaggtaaagctctccatgagcagagccatccaagcccggtgcaatgacgatattgaatcccttctggcgcagcgcagttgtggtgttcgcgctctcgatccgctgtggatagacgagaccgcccttatagtgcaccgtgatatgggtgacgccgacttcggcggagacgtactcgccgtgtccgcggacgggcttgccagttccccattcatagaagatgtcgtcgggaaggtagtaggaaacactggtgctgttttcctccgtgaccggagagacaaggatgccggggccatagaagaactggagatcgatgccgtaagtgttttggtcgaaggggtagttgaagaagagcggtttaagggatggtgtgccagtttgggtctgcttgtagatggctgtgtaaatgtagtcgactagattggcggactcaatgttaattatgttgggatctaatggtgaacgcagacttacgcagctggtatcgaatggcaatgccgttgcgggccgcttcggcgacgatcggccaccggtagaactcttggggattggcaaagatctcggcgtggttgcggaagaaagtgtagaaggagccgagggtagcccatctagtagagactatgttagcaggcacgtaagatgctgtcgagttagggcgatcgtacctggcacagagggtctcagttacgtttccaccgaagccgcagacatcagggccgacaacggggatctggtagagcgaggcgaactggagaatctgggagatggacagtcggtatgaaagccaatcggagatgttatctgcagagaaaagtagggctagtcagcagctgttcccccttgccgcaaatttagattgcaggaattccttacctccaagccagtgcgagacatcctttccagagccggcaaatgtgctcctggtgatcaccaatgcgcggtcatcgggacgtctagcccgcatggcattgtgcgaatgagtggacatcatcgcgccgtaaaggctgtgcgtgtcgtactggacgtatccgccgctttgcacgatatccgtgtccgcagtgttgtccgccagcgttgggccggcgccgttctgaatcatatacggcggcctgatgagctcgcggttgggcagacctctgcactcgtgggggccgcagccagagccggatttgcggccgtgctgccagccagcctttgggtctcgcggccagtggcggactgcagaccgccagcggccagcgccgagctgtcggtgcgattgagaccgagcccgacgttcgacggtgacaactgcgcgcttctcgtttgtctggccagaagcgaagtttggctggagactatccgggaacccggggataggggcatctggcccgtccctcacggccggtggctcaggggggttgtcattcgcctcggcaaactcctccggggtggtgttgttgcctgggtaggggcggttataaaagttggcgggctcattcatgtcgatccacagggcatcaatgtccgggccgttgacgccgtcgaagaagttgaggaactgctccgtccagtattcctgagcgttcgggtgaaaccagtcagggaagtaactgggaccggcccaaacgacaccctggtaatgagtgccgttcagttccttcatgaacgcatcgtacttcagaccggcgtcaagcgccgggtttggctcgctgtagtagacagccggatcaaccatgacaatgtaatgctgatctcgcgcgtgaagagtgtccacaaggtctttgaccagctctggtgggaatcgttcgggatcgagcgtgaagatgcgccgacggtccatgtagtcgatatcagtccagatggtctccagtgggatatcgtggacggagtagttggcggtgacagcggccacctcgtagacatcctggtagccgtacctgcactggtggaaaccgagtccccagtatggaaccatcaggggcggctggacaatttcagcatactgcctggccacatcttgcggggattgtcgggcgatgaagtaaagtcgaaaacgccgccgatgatgttgtactcgaggaacggccgctctcgttgttgatgaagatgtccataccgttggagttgagcaggaacacaccgtgagtgccgtcctgccggtgatcgaaatagatcgggtcgaccccgtacagattctggccttggggcgtcccgtaagcatcgcgggtgtagattgttcgggtgtagttggtggtgttgagcatgaagg

SEQ ID NO: 4170 - DNA, 2856 bp, Emericella nidulans
cggtttactgagaaggtgggggagtgtttcagggccaggcggcgttttatactgagccctgattctgccgctgctgaccgcccggttagctgagatttctggagctccgactctgatccaaatcggaacctcgagctacgtcttgtcttgtctatgcacctgtctgatagcccgactccgtagcctgcctgtcgtatctactccgttatcctgttctgaatatattcctgagcctgcaccttgacactacgtagctcccaccccacggagttgatacgtgttgtaccatgcccgccactgcgccccgacccccgttcctaccgaaggaccccactgaattcgtgcagcatgtaaccagtcattctgctgaatggtttgaatactgcagccaagcagatcaatatatcgccgcggccgagacgacccttctttcgtgggagacgggcaaggaagccctccagatccaggctctacaacaagagaacgagcacctccatgacgagtgcgcccgtctgcgcgacgtgatatcccgccgggatgtggttatacagtaccagaaggagcaagccaaggaaaaagatattaagttcttgaaactagccaaagagaaaccccaggaaccccagccagcaatgcctataactggtatatcagacagacaacccaaacctggctcacccacacaaactcaggtgtttcaccagctctccgagcgcctgcctgacccggattggtttgagggagaccggaaggacctccgccgctttatctcccagatccatgagaagatgaatgtaaaccatgactgtttcccgaccccacagagtaggatgacatatgtcaacaatcgtctaaaaggagccctgtatgcccaaatcttgccctatgtcaagaaaggaatctgccagctgaaggactacgaggacatcctggatatactagatcaggcctttggagacccaaactgtgttaacaatgcccgcaacgagctgttctgcttccagcagaataataaagagtttggcctgttcttcgccgaattccaacatcttgccctagagggagagatgcctgaggagaccctatctacacttctggaacaattaataaatcgagagcttaaagggatgcttatgtataatcaaccacctacctgagattaccatgaatttgctaagttcttacaggaacttgagaaccgccgccggcattatgaaattaacctgcaatcagccagcagaaactaccctgcaattactagaactgctactagtcagctgttaagaacaaactatactaccctgcctaggactatagagaacccagccctgcaacgcacacagcctgatgtacataataatgccatggatctgttatctatctgccaacataaccctacacatcgcgagcggggagaatgcttccactgtggatctccagaacatatggtcaggaactgcccacaccctgataaccgccctcttagcatccgctctgcctacccagcatccaacataaccctatcaattgaatctgagtctaccgctgtctctgaaggctcccgctctccatcacctggattctcggaaaaaggggtaagcctggcctaagtcgtgaccaggtgccactacccaagcgcgttgttcacctctctgcaagtgctattaaaggaatgtctgttgaagaagaaactgcccgcgccgacctgactgtcctgcctgttatcctgacccagcaagagaagagcctgtccagctacgcaatgctagatactggagctgacgggaagaggtttattgaccaagaatgggtggaagacaaccaccttgagctgctgcccctgaaaaacccaatccacttggaaagctttgacgggagagaatccgaaggagggccgataacccactatgttagaataaacctgacaatctatgactattatgaaaagaaggcttgtttcttggctatacaactggcccattacccaataatccttggaatgccatggttagagactcatgacccccgctgggggtttgcagagcacaccttaatatttgacagtgcctattgtcgacagaattacaatatacctgcccaaccagccaagatcaaggccctgcataacatgcctgcccgaagctgccagaagaacctgacttcccgtcccaaaggattggagaaacaagatattgccctagtctccctccgcgcctgctcagcttacgcccgtaggggccatgccctgtttacagccactattgggaatattgacaaggtattggctaagaggtcaggggatggtaaccctgaagacctactactactagaatacaaagactatgcagatgtcttctcccctaaggaagctgataagctgcccccacatcggccatataaccatttaataactctaatagatagaaagaccccaccatttggcccattatatggaatgtcccgggatgaactagttgcactacaggagtggattatggagaatctgaggaaaggctttattcgcccaagctcgtcgccaacagcctcacctgtcctatttgttaaaaaacccggcggaggtctatgcttctgcgtggactaccaagctctgaacgtgattttggttaaggaccaataccctctgccacttgtcaaggagaccctgaataatctaaaagggatgaggtactttactaagattgacattatttccgcatttaataacatacggatcaagaagggacaggaatatctgaccgcgttccgcacctgcctggggctgtatgaatccttagttatgccctttggccttaccggcgctccagcaacattccagcactatatgatgacaccgtg

SEQ ID NO: 4171 - DNA, 5811 bp, Emericella nidulans
  unsure (1)..(5811): unsure at all n locations
gcccgttcgtcgtgaggaacctcatgggagaacccatgcgggtttgcgggccaccgcgcgggtttaatcctagccctgcgggctgtacccaacccgcaccgagtgcacccctataattcagcacctaaaaccccctatataacaaggcagctagaaaagcaagcattagtaataaggaagatactaagtacttgtacaaaaagcccttcatctttactggagacatgcttagacaagcttatcaaaggttataaattgcatttttaagcttctcctcgcacgcaaagaactatataatttatgtgcttctaacaagaagtagttctcaaaaaggaagtgctctactggaagctggctgttataggggcttaactattcaggagggcctagagcaattctagtatgagaataaggttgataaagcccagggtggtatatctatagatccagtactttcggcagttaggccatgtatacaagcaccaccacagtacagtgactgccataatataggacataagtaattgcaatgtctaattaagtttcgaattgattatatagagaaatgcaataatttttgttgataaagtgtcgaaaatgttgcctatacatggaatcgggagcggaggtgggccgctcgctcacgggatacattatcgggcaggtaattaccttatccctgggagctgaattacatataacctaaataccttgatcccgacctatagttataataataaaagcagattatgattaacgcttggaagaacatagaactcagaattatcaggtatccaattcattagttcgcccgtatggatcatgttcactatttgcctttgctacttctgtggacgctataaccactctagctatacggccagattcggtataatcggcttatctttaacaggccatcgctatactcgggctgtaccaatttcaaataagttagtagcgctcgttgatacaagtactagtccgcaggctacagaatcttctcagtctcttttcctcacattcagctccttgagctaagacgccagtgcacaaaagccatatttgaataccactgcctgatctgccagcattaaaaagaatcatgagtaacagttcacattcacaacctcatcataaatgcccctgagagtgctcatcacggaacagggctcgcaggcagtgctctggctttttggctctccaagctcggccacaaagtcaccgttgtcaagcggttccctgagtttagaactagcggcctccaggtcgataacggggtcagaatcgaggtgttaaggcgaataggtcctgagagtgcttttcgggccttatctggtccagagcaaggctgcaggtggccgacaatgcaggtaaacggtgggcttaattccctgccaacagatctggaacagggccacagggtttcaccagtgattttgaaatcatgatgggcgatctctgccgaattatctatgacgcaacgaaggaccgtgcgaattacaccttcggcagatcgattgagagctttggagaaaagatgcggccattgaggtcctcttcaggagtggagggagcccggtatgatattcttgtttgcgctgatggccaaggatcacggacgcgcaaggtcatgcttcgttctgatagcgaggatgctttttaatcgctcaatgaatactcaacctactttacaattccgcggtcgatggaggctggagaggagtacattgccacctcgtacatcgctcccggcgacaggttcgttctaactcgcagacataatccgcagaggattcaggtctatttaatcggcaaaagtgtcattaaatgaccgaaaggtgtccacaaaggggacactagtgaggagaagaaggcgtttgcagaggtctttcgaggcgcagggtggcaggtcgaagggattcttgaattgctcatggaagccgacgacccctactgcgagactcagggcctcgtcaagttgaatccctaggtcgtgtcgtgcttcttggagatgccgcgtactgtcttcggcaagcacaggcatgggcacttctagcgcaatcgtgggcgcttatatcctagccggagaaatatgggtacattgcccaggggatgacgcggaagtctctcacgagacggcattctgggcttacgatgacaagtttcggccgttcatggaccaggtgcagaaaggtgttggggatccgagtatcttcgatagcatatcgtggtcgcctctcaccatctctatcttgtattgagtcctgtggctggcatcatgcttaaggctcgaccgatttggggggttgcttggggatcaacctgaaaaggggtgggaactgccagaatatgggattttgatggatcatgctgagctgtagagggctgtaaaacataatttacttggaattccagaatagaatgaggatgcaaacctacgactacatctacatctgcagcagatgattaaagataaatctgtttataagcaaaaatcgtcatatggaagggccgcagaatgtatacggttgattataattaccttcaaaagcatttgtttagaaactagcttgccttaactaagataaagctcctagttcctcactgtggctactgaaattccagaaaccagaaataatacggattcaattaggagtattcatgcgacggagccagtgtttggctcatcgcgattgccagtttgtttttttttgaaggactctgtttccaaggactagtgcctataaggcgagaccacacctgtcagatatcatctaatatgcagagcggcctgatggccgtgagaacaagagaaaaaagtgagaggatagagatacgattgtcatgtcaatagtgtcgtgcttatcttacacatgctttgaagcagggtcatcgtttaggctcctagtatctaatcgtcttagcgaaaccaaccaccctttgggagaccattttgttgaaacgctatcctgcaccaacggcctcccaggcgcgtcgtctggcttcttcacagtaccagtagcctttttacggcctaaagtgggcttttcggatttccagaagcggccgaggaactgaaaacgatggagaacnccgtacagtatcgagacggtgatgacaagggccacgacagcagtaataaccatccgcccgacgactgtcccgcttgggacatcacccatgctgaagatactcacggccagcccggtgggcaggaagaagacagtgacataggtgaagagcgtgatattctctgcttctcgcagggattttttagagcgaatggcttcctgggcacttgtgacccggccgagcaggaactctatgtggatttccttggtgcgcacatcgcggacatggccctcgagctgggctcgcttctgcttgactgattttcgatacttctgctcgtcgcggcgagtccagcgcggtcgttctctgccctgcgagctctcacgcatatcccactggtcgatgacttcccgcagactgatcatgttccttttcaggaggagcaggatcctctcgcattctcgaaggttttcggggctcctgtcttcaaaactgtcatattgatcgtcgagaggcgagtactgattctctctgggctctctctcgacctcttcgaggatctcttccgtgttcatgcagactttttccagtgcgcggctgagcaggatcagctcgagcactcttctctgttgccagtgagaggggtcatcgttgatagagtctgtgtcgccgtcaatatcaccgtcaacatagtggcacgtccagtatcggtcaaagaagtcgccaacgatgcggaagccagtgaaggcagtgaccaggtaaaacggacaacctgaggacttgagttgttcgaacattgcccactttagtccagattgaccaggcggcttctgatcatgattcagtttataaaagtactgaaaataaacctcggtgacccacaggttgagcgcaaccatcgtatcgtcgtgtagatagggctttgacttcccgtggcggtcgaagaactgggcaaggctcattctttcggactcgggagatgcggcgtagcagatcacggctcgaactggatcgatcgacttcagatagatgaaccttttcttcgcagagaatgcgtaacgcggttgcctaagatatttccacaaggcatggaagctccaaaatctgtacatttcaaacttggccaacctgccccgcttgtgctgcttcctactttttcgaacatccacaatataactgtaccgactggaattctccgcatcatccttcatttgtcgaacaatatcactaggagtgttctttatatttcccgataacagctgtgcttctctgattatcttctcgatatcagattttccgggtggctcatagtcgaggaaatcggggtacttatacagccactcctctggcacttcgacaatgttactagcatcaaccaaacggccgtgaggattttgtcgtttgaggctcctttgaaccatgactgcaaggtgctcggagcgggtgccagactcgctcttttcatgggagattacggctttctctagaacttttgctgggatttcagtggacttcttggtctgcggtatagcggacctctgactagcagatccttcaggtccttcgaccgcagagtcgcttgaatcaggattgcgaagagcttcgttgcggcgcgattcttcagagaccacaagcaatatatatgggtatttcgaacccgcaatgaaagtaaaagtcgcgatagagctctcggtcgaatagctcgggctcctttgtggacggctctagctggccaggatagaggccgctctcagagcaggagttgcaaagcacggccatggcatgggaaaccatctcgtctggttcgaaatcacgatcaagctggtgcttggactgggccatgagaagtgccagagcgtagcgcaacgagttgtcccatcgagcttcatcgacgccttcctcgtcatgatgaatctgtgccttcaccagctgctcaaatatatccatttgatccttcttcaggaacccccaggatttaccgtagtataagactgtgtcccgggaatgaaagagaaagcgcgtttctcgagcagaacgggtcacactcaacatccgcttcttcagcacgtcgttttcaagagtgaagcgtcggatgttctgctttcttatgtcctccactgtgaagtccagtgagtgtgttgagagtggtctgcgcattctcagactgggaaacaaagggcccacctcgcgcaagaagtcgtcaagtgcgcgagtggatgaagcctggcctgcgccaactgtcattcgaactgtctgcgtagtccttgtctccaacaggatcttcctcttttcctcttgcactttttgaatcagctgctgaacatcatgcagagctttccaaatccagacttgatcactaagacggtatatcgggatgtcggatatattctgcaggtgctcccaggtcggcgagagtcgatttttggtagcacgcaggtgatatacccattccttgatcaacctaggtagccaacaacaaacaaatatcaattcctcgcgtgtgtcaaatattctcagatactctgttaccttaaggatgtgataaggcacattcggaggactgtccggcggcagggatgtgtctgagctgctagggatgctagttccatcgacccagaggttggtagaaaacaggtctttgttggcaagtcgcgatagccacagaaggtggcccttgcatgtctcgtggatacgtctcatggaattttgggtgcgtacccatacagagctctgggtttc

SEQ ID NO: 4172 - DNA, 2849 bp, Emericella nidulans
acaagcgccagctataaggtatttagacagatacttggttctataaccggtaaggcaaaattagtagcagtgttccctgcaataccaagctcagttcgtaacgacacgcgcatttgaccatgtgcagaaagcgaagccaacggcatgaatcatgtttgcatgctcacccatcacacttgaaatatgaatttaccggctacataaccatgagcaatttgctctgcggggccgctttcgatattggcttaacttcttgctgtcagctctacaaagacatgcccagagccatgcaaagtgggtgtggttagccatatggtgatcgacagcaaaaagtgtgccaaaatggggagtggaaatatatatatagatattaaaagacatatgtataaatacacaggaaattgtggacacgccgggaatcgaacccgggacctctccaatgcgaatggagcgttatacccctaaaccacacgccctttatttgtaacaaagatattgcttttaaatatatataatagactttctttttagtaaagaattaaacacttcactttaggaaaagagtataattccagtgctcttgatttaacattgaaaacgtaataaggaggtgtccaggcgtaacccaaaacgatagggcggtattgattatgggtacttcatccttcttcctcattcgagatggcgcttcccggccactatataaatagtagcttttcccactgtcctgttgcgaccttggaagagcctgagcttactctttttgtactggcaaaaatcctcacgaaaagccatactgatattacccccttgacacgagtatctcaaattgctcattttaattgtggttgaacatagctatgctcgctgtcagcccaaagatagttgccgatataaatctgctggcgggttacctgagttacccacagctccagctcgaagatctatcatcaatttccccagccgacagcatcattatctgtgcctccatgatccttcatcaggcggagtctcttttccatgcccttcaagaaaacccatccctcacgaaaaccttggtcctatgtggcggcatcggccattcgactcaatatatatatgaagcagtggcccaacacagccgcttttcctccattagcaacgacatccaacatctgcccgaggcctgggtcctagagcgtattctagataccttctttgatcgagctgtcattacaagtcaagggtgtcgcatcctgatcgaggaccggtccaccaattgtggggaaaatgccctatttagtcggaaagtgctggacgatgcgggattgcataatctccacaggtgtgttcttattcaggaccccacgatgatgcggcggaccgtggcgtcgttccagaaagcctacgaagagcggacagagatgcctttgtttttaagttgtccgctccttgttccgcaggtggaggggtcaaaggaaccaggaggaaacctgcgctatgcgatgtcggaagtgaggttatggccgcttgaacggtttatatccctaactctgggagaaatcccgagactgagagatgatgaagatgggtatgggccgaggggacggaactttatctctcatgtaaaggttccggtggatatcgaggcagcctggacgcgactgcgtgcctccttcaatacacgtaggtgagcaagtgcactgcggtgtagttgatccgttcttacaagaatgatgccacgtggaaagaagcaagacatgggaaactcgattgatttcatccacggagggcagatagcctgtcatgaccgaacacatgcagaaagatcaaaagaaatgttgatgcgtatcaccgattagctgattagatagatgcaatcatgcacgcaacaacctgatatataaccaccttaccgcgggtatgctttgacaatttagtgtccaggtagctgtagcaggaagaaatgcagcaagcaggcttatatacaagacatagtacatgattatgagggaaacatcacgtgtctttatacctaatacagcttcgtctaacatgattagaagatcaagtagccaatgatattataacgcacacattcagggtaagagaaacgtgtaccagaaaagtcaacaatcgaataattagccctatcgccacgacaaaccatgacgttggacgggaatctatcacaggggttcaaaactttcatcctcacggccatccgaattcaatccagcataatagagcctactaaaatgtgagttctcctgggcaagaaggtcatacgggaccccagcctcgataacccgtccatcctcaaggacaatgactttatcatagtctagaatggactcgagcttgtgagcaacagtcaggacggtatgagagctgaaattttcgcggatgacgcgctgcatgatctcgtctgtcttggaatcaatgctggaaagaagtattcttagtatcatgctaaggtagcaagggataaacgcagaacgtacttgctggtggcctcgtccaaaacaaggatattccctgaccgaagaattgccctagccaagcagaagagctgcttctgaccttgcgagagatgcaggtcgtcgatgtcggcgtctagtccaccgttttcaatgactttcgtatgaaggttgacggactttagtgcactgaggatcgcattgtcagatgctgtattggtccaatactggtggtagctgttgggttggcgtttagtcgcacgcttcctttgataaggagggggctctgggagacgccgttcagcgggcgcgaatctcttcacgaggaagtctagtgaggtcgagaccgtcaatggtgatctcccgctgtgaatgcgatcatcgaaagag

SEQ ID NO: 4173 - DNA, 2912 bp, Emericella nidulans
gcgagtgtcttattcatatggatccggctacgtctgtggttggtggtgcggtgggatatattgggtccttctttttttactccccgaatagagcttcatcatcagagtccgcacctcctcaatccagggagttccaggcttccgcggatgctacaagacggccgcggcagtggggcgcaaatattcggactcttggagatcaacgagatgggcagaatagtcagttctacaatgggaaccaggtacgaaacgcgacctttcaatttggtctgaacgccctatcaattagctgacctattctttcctcactgacgcagcttaattttgaaccacgacaaggtgatgatcgatgagaacacttaagcaaacaaatactaaggagaggagaccattctttctaatatgggtatctgtgtctacctagggctccagaagtagattgtagtgtccaacatccttgacagcccagatagtcgacttcttaacagaaattatagtatacattggatcatgaatatgccgctatgcaaacagtatcgtgttgattccaggtaaaagttaggctatgaaacaagccacctagatgttcgaatggacgaaaagaagtccgcttagtaaggcttagcagcagcctggcaagctttctataaccacacaaaactattagtatcctggttttgaagcatatcctccataggataccagagggaacgtaccagctggtcaaggtaccacccgcaaatagacatgttgccctggttctcatccatgcacttgcggaagttctgaacgtccgtagcgcaggcagggttctcccaagagctgttagtcgcgctaccttgccatagaccgttgtccatgggctgagcctgagcagggggagcctgctgagcctcggcaggggcgctagagccgccgccggagaagagaccaccgatggcgtggccgatggaggaaccgactgctacaccactgtaggaaattagcttcagcggcctgtattgacgcggcgagatgattccccgcagttttgcgggtgtagctttccaccaagggtaaaaaaagcgtccggatttggtatatggagtatgcaacttacgcagctgtggaagccatctgcccgaaaagaccagggccagagctttgctggacgggagcaggagctgcaggagcctgggtggcagtgggagggtgggcagcggttgagtgaggctggtgctgctggccgtatggcgagtgagccggctgggcgggagcggcagtaggacgagtgggagcgctgcgcgcaggggtaggagcggcaccacggcgttgacgaggcatgttgactatatggttagactgaggtttgagtagtgatggaatggatatagaggcggatgaaagggtttatatagaagatggtcgaatcggcggagaacaatttaacgctatgtcagcagtaccgccgttacccggaattattgcagatccggtattatactgactgtgcagaactacatgtatcagtaatacaatggaagcttatgccgtatgaacggacaaatttttttttacatttaattcatatatgggtgattctcccatgacatatatactatctaggctcgcttgagactgatttgttgactcatgactgcactgcgcccggcatctccggccgcgagtagtggcgaggttcttgctgacattacgagtcagtcgacaccgaattcgagatggtaaccctactgcggcgtatagatacgatcaaaaccggcctgccatttagtcgttggtgtacagtcccgggaaaggcagaaaatcattcccgtcgggcttgatcctgttcggtttatttacccttctgccatgcattggcacattgcattcctggctggcggaggctcccaagcacaactcggaatcagaattgtaggacggagaagttgaattggcggtgcggtccatcggaagtcgagctccgtgcatgagttgcgttgtagcttcccgcaaatgccttgcaacggtcgatatggatgacaattgctagtactttcaggttgccttccttgcctttcgagtatcatctttcttcttccttctctgtttgttgtgatccttgaattcttccttgccgcgacgcttcttacgtctctcatcttttgcactggacttcgctttgttcttctttgttttcttggagctagctccaggtgcctcagaagattgcacttcctgtagtaagtcggcgcccttggcgtcgctcgcgatgtcggatgtgggatcagtatctatttcggattcacttgaaacatccttgggcggctcttcggttgtgtcgcctgctttcttagccagcagtgatgccttgagttgtgcgcgtgccttttctttcgctagttgctcctctcgttgcaagtcaagtttctcatttccggcctaggtcaagtaagtaatcgcctaaaacggaacgttgttttcgagtctcatacaaggccatgtttgataaaacgtccagccgcctgcttatcaagaaccattgtcctctgctcgggttcggtttctaatgcctttatcttgtcgaaatactgcttcactcttttcaattctctgtagacgggatgctcggtcgctttgacgccgtgcaggcgtaggtacgctatatcatagtgagcactcaatctcgtggtagagcgaaatacatacagaataccaaggactccaacgcataagcagtcataacatgaaatttggctttatccagaacaggcagcttcttggaagtttcgacaacggtgctttgcaagatcggcgcaatagcctcctcgaggtcatcgacatcatcatcgagccgctcgagcaaccctatcccatcagcagactccatttgcctaataatggaatgctgtataaacaaacgtttgacgtag

SEQ ID NO: 4174 - DNA, 2192 bp, Emericella nidulans
tacattaaattgcctacaaacgcggacgatgcgcgctgtgctgtgtgtggaggttaatgcgggagcctactctgggagccagagccagggagtcgtgcttgtccaagggggcatcttgctgtctgagattgctgtatccgactcagttgagtaggtgggctaggtgtggtgggcagagagtatttgtagctcgatgtcggatatcccggtgggatgtgatcgaatgcggggattggcgattcatgttattatccctttctaaacttgtggggtaatgggaactatagagcacagaactactcggtgtattagctgccgattgaatctgcgatgtgttgtatcagccacttttgatcatagagatatacatgacctcatcacttcgcagccctagttccatgtgcgatctcaattcagccagcattcaaattgaccactgtcgtgtataacaatccaggaacggtcctgagtcagacaactatggtctaaaagtcagtatcagcatataaacaccgctccaggattcatgcacgcaggtatatctacatctatcctttgcacttcgtaggtgccggatatcccgaggcgatgccgcccggccctcaggtatattcttgtcttattcggtagaatttggccgagaggaataatagccaataatgatgtcgaaaataatgaagcggtgaatatcctacatgggcagctatctaggtcctgtaacagaaagaaaggggaagtgtccagtggattggctaatgcatacctatacatatagacgccatggtgataccgtattgaagcttatacagctatgacaaagataatggtaaacgtataattgtctcgaaatctgccgttctttgtttcaatggtctagctccaaggggagaacaccagcggtgttcaccgctggaagaccgtggctgctagagtgcagcaatcggaagagcatctctaattctacctacaggttgctttggagccacagcgacggtctcgcccagtgtaggttactcgaacagtctctaccctttcctcatcacttggcgggccggtcttccatggcctttcataacatcccaagtgatatcaccgacatttagctatgaggcatagaaggtatagaagacctgaggacaagaaatggataaagcaaggttaccatgcaccagaccatggattaagagagtgagacggagtctacactcgcgttcgttcacttgagggatccctgacattgctgcatgaaacaaacaacagggacgcttggagtgtgggatatcactttgacatcacattcgctactcgtcttcagctcgttctagacatcaacgccccctgctcagacctgctcagacttgcatgtggtaaggttgattggttttgcagaatcaacagcaaacactgacgtctcagcttgcatgggcatagctgcggtgacacctagcagggagaattggatagcttatatcctttagcggatgcgaagcgatgcaccgctgctcgttagccaaattgtagtgcctttggtgcaccgcctactgtgttgtgggttcgggcgttgtgtagccagagatgtagtatagcgctatagagaggcagcagctgctctgataagtggagcaacctgtttcctactcttggccacattcgtctgtatccatagacgcgccaattgagaatcatcctcgagagcacttaacgcatctttgatgccttgagcatcatcaccctcatcaagtgatttccattcctccaagcccaactcggagcttgcttcggagattagggcttttacagcatttcgcgccctcgctgttaagtctccaaacaagcaattcccggaaaagccgaccctcttatgagctgagcgcggtcataacggaaaccacgtccaacttgcgctctgaggcgaacgatttcagacagtcgatgaaggcgtatggattgcctgcctttcgaacaatccagggtattggcttgacaacggaacagataccgattcgtagccgcagttgattagcgtgtctggtaggtttctcgtcccagtctttgtagtcccggcctagaatctcatctacggtaagcagatctagactattctgctttgtttcctgaatctccccgtaaaatccatcagcatccaaacgagcataagttgcggttgctttgggaaagaggaaatcgcgagg

SEQ ID NO: 4175 - DNA, 4879 bp, Emericella nidulans
catgtttacgcccgagtacgttcacggatctccggctcctctgcacccgacccggccctacccgtatggactatagtcagcttccattatggtcagcttagggcttcggcggctcgggttccggggcggcgtccagcgggagaagcgggtcctcccgctcctccaaatatggaaagtatggagatgaaacccaccgtgatgagacaatcgggcaagggatggagtccatactcaccattcaccatcttcatcatgcatttcggaagtctcggcgctatcggaaccggcatttaaccatccgcttccgtgccaggaatacctagtctaccgtgcatctccaccatagatcgacaagaacgaggcactagagtccagaggcctgagaagctaagcctgagtgcatgtgcacagtatcgggtatttgcaatgtcccaatctgccagagcagtgcgtgccccaccctgacggctcggtatgtttgtaggaggaatttgtaggtataaagtatccccccgttcgcctgaagataaaccttcaattgtactacctaccgctcactccccacctaggctaccttatcaccagtcaagctggtggccagtccaacagttatgcaaacagccctgcaacgagaccccaacacgggcatctcgatcctgatcgtcggcggcggcatcgccggcctctccttcgcgatcgaagcccaccgcaaggggcacaatgtccgagtgatcgaacggcgctctgcgggaaagacagatggtacgtgggatattcattatttagacgcttgaaactatctgtactaaccgattgtctaggtgaaatcattgccatcacgggcccagccctccacaccccgcacaagtggccgggatttatggataaggcacgcaaagaggccgtccctccgggcatcacgatgcgcaagtatgatggcaccacgattgggaccttccccgttggcgaccccagcaacccctcgctgccgatttaccggtcgaaactgcatcgcgtgctaggtgagtatgccgcgcagctgggtattgaggtggagcttgagactagtggcttcgggtactttgaaggagagagcgatgctggagttattctcgccgacggccgcagactgacagcagacctggttgttgctgctgacggggttggatcgctgtcgtgggagcttgtcatgggcacgaagcagcctcctgtgtcttcagggttcgtgctgtaccgggtgacttttcctgttgggccggcgctggagaatccggttgttgcgagggagtttgagggctataagaaccgggcgtttctgcatgcggggccgggggcgcatatggtttcttgtaagaatggggacgaggtttgctatttgcttacctgcagggtactgcaatccattatatatccctaactcccagtcggttgatgatggcgccgatgctaatggtttctatggcgtgaaggaagataacactaccgccgccgaagattgggccaagaacacctccatcgacaaggcgctcgaggccgtggagggctgggagcccttcgtatctgagctcatcaaggcaactcccaaccgtacattgctcgactggaagctcatgtggcgagacccccagccgaaatgggtatcggatggcgggcgtgtcgtgcaaattggcgatgctgcccatccatttctccctacctctgctagcgggggaacaatggccatggaggacgcgttctcgcttgctgcttgtctaaaaattgccggaaaacaggacatatcaacggcgacgaaggtgcataatcatctgcggtaagtcttcttccagatgtatgggaggcgaaagctgataggcgtagctttgaacgtgtctcttgcgcacagaaaatgggcttcaagaaccgcgagctctaccacaagaccgactgggacgctgtggccaaaaaccccaagatcatgggcaagatggtgggggattggctgttgaagcatgatccggagaagtatgcatatgaaaactatgagaagtgcaagaattttctgctgcatggggagccgtttgcaaataccaatgccgtgcctgggtatacgtataaaccctggacggtcaaggagcttctggaggcgtcggaaaggggggaggcaatcgtggatgagggaaagtggtgatggtggtaaggagatagactgacaagatagatcgatatatcacaggattactgatatagattctttattctctcggcgaggttataccactggaaatggtccagtcgtacttgggtgcatacaccagccaccaaaattgctagccagtaccatagaccaggcctatccctggctgaatgaaaaaaataagataaactgattatcggcacggagcgtagtggcccatttgaatcgttgagttaggtagttcaacagaagccaaaatgaggtttaaatcggtcatcaaaatcacttctttggattacctggatgaattctatcgcaatgatgtctccgccatctacgactatgttaactagagcctgtggtcagcgcatgcgggcagtaacccatgacaagacagggaattcactttcaacatattgtactttcattagggctccgtcgacaacagtgcgcaatgaagcgaacgccgatggttaaaaccttatcataccgcaccagtgagaagacgttctccaagtgaaatccttctagttccaccagtagatcttgaataccatgaggtctcagatctgatcaattgttagtaccagtggagctgactcgttccacaagctgaaagagcggcaaaatgcactaccaacagcttgcataagcgcagttgagccagcttgtattcaagtgggaaagcgaacgtcgtattctggaacttatgtactggtcagttggggaccgagtcaccggtgaggggttatgccaagtatcagttgactgcctctgcgcatgtcgtgtatatcggcaccatgtgaagttaatagtcgagcggcaagagggtagctagaccaatccatgcaccatttgggcatctgaaccgcatgcaggaacagatatccggagcttagtgggctttatgaagaacaacaaattctcttcaccaccatgtcttctaatctccatggaaagcgtcgagtcacttcaaccatcgaaaccacgttctgagcgtgccctagtgaattggaaacctatcatgtgaacgatattccgcggtaagacttctgttggcatcctcctggatgcatttgttggcgagctaggccgtgaggatacgactgctggggttagggcttatcagccacaacgttcgggccggacaacttggcattgagcaattgaaatgcaactctagggccattcagaccgttatcgacagtcactggctccttggagaggagaaagacattgatcgaggcgcagatgtgcactgctagtaagcccatggcagcgaacaccggggccctccgggaggcaaagttctgtcgcaggtgccggaggtcattgagttgcgcaataatatgacaaggtcagtgttgatattgacgactctgtaatcaatcacgaaaatggcaggccatggtgaatgttgtgtgatccatccgaaatgtccaaccactattcaagttgttcgttagtgccgaagtcgacggcgagctaatctgggcgagcgggcttcggaaaaatcacacattccatttgcttcactgtgctgcgcttcatttggaaaatcccatgcaaacggcggcgggcgtgggaccctggtgattgggcaggaatagctttttggggctggggctggaatcaagacagtacgagtaacggtagcgtctgtccttaagtgaaacggtcaacgagttttcccacggttgcggccggaagcatgtgtttgccagagagttggcgccgatagacaaaacataagaccgacttccgaagcggtcgatagaccttgagtgttataggcctccttaacgccgtcaggacggcgatatggccgtgcgctaagcaaatgcctccggtgagctgacaataacagactctccgatttgtctgcaggatctgaacccctgaccttagaattattcaaaaaagaaaaatagagtcgagaaaagaatgtgagtccatcagagtggcggcagtggtctggtccgtgaggtcggtggaaaacagcacgagccttaatatttctggaccatttccacagatagatgatgcttcagctctccactatcacgaaacagttcgtccatattttagtccgtgacattttaagccatcttgaatgagcccagtaaacacctgtacaacggattctttgattcgtggtttggtgagtcatgggcgtggaatcgggatggatgatgtcaattggacaatcggcggggtggcatgatctctgcagcggatagccttttcccgcttcaggtgattgacagcatgcataatcaattgataaccagtttggtgaactatggagtgctatcccgctgagcgaaactctgagcgtaatccaattcattcggacagacaacaatccgcatcgcgtcatgagtgcccaattttcgagtaaggaccgcatgtgattgctcagcgtaaaggcgccatttcgcgcaaatataccgccatcccatgacttttgggggactcgttcctgggccgagtcaagcctagtagaaccgccccgccgtcaggcttcggccggaattcgatcttgatcgtggcgtgagaaaggccccttgacacgcgttttggatccgctgcctcaaggccagaaaccgcatccgcttgtgaaacgaatgggatccctgaacacagagcggctcagctgtatccgaaacacctgttcaaaaatagttagaagcataacgtgttttc

SEQ ID NO: 4176 - DNA, 4100 bp, Emericella nidulans
cgtcaggtagttcagtagtcgttcactgacggctttaccggtgccagtacgttcggaggaacctttcaagccacttgcttgtatagctgaactgcttcctttagcgcacgcatttttccccgataccgacgacacgcgtcgcgcgttgatgatcctgaatctcaacaattgtagagccagcccagtcggcttgatacagcggtttgaaggtgatgtcttatggtgatgaacaaacctgtggaccgcagacgttctcatcaacagacttagggaacggcggcatgccctcactaagacatatggcttggcctctctgtagcccattgcatccctcccatccccaagtgagactattgtagtcggcgatcttgtcagaatccatcttattcgccttggcgatttcgtcgcatgtatcatcctgctgaattacatcagacgtagcagttgccgttctcgtcaggcttcggcgagaagtccggaagggatccctcagagcagtagacatactggtcgactatgaggttgttgcagaagccgtcggcagtgttgttgtacttggtgagttcggcctgagtgatgccacaccgatccgcaagtgcccgacagccgtcagtagcctggacctgaaaatacttacaacatcgctcatcgtgaccaacaatgagtaggaaggagggtgttgtagcactgggaaaatggagaggagcagcctggttgttggatgcagaagcctaaccctaatgtaaccttttgctcagccgctcctgcactagctagcccctgacttagagaaggagaatacgcctaatccccctctccccagaaatcaatttaccgtcgatattgtgtatattctttttattattgtctaccccggagtactttactctcggcaaagccttccggctatggaattgacgggaaaatatcattatttcgacggccgaaggatttccctctgatggctcttataacccacaaaggatcgtctagagttattttcatccaattccccgttcctctctttgcacaaactctcttatactattcagggctctatatgatgctgcttagttacatgttgttgcttcggcctttctgggccctcatgtacttgccagcaagaaagctgggccctaccaggtttgcctttccaaccctgtcattttccgatggatcgattcgcacttctctttgaaggatatgacttatgacttttaagaactaaggactagggaacaggatgtgtaaccacttatctaaatatgggttttatacacgagtaaactacccaggctcaactgcagcgaaccgaaggacgttgccctatgtaaatgactacataagactttcaaacaagccatttttcagaaatcacaccaagtgcaatcacgctcgctctttatcggctacgcagcacaactgcagatcatcgtcaaccgtcaagaagaactgcctgtcaaaacgacacggcactggacagtatccggaaaacgcccttgcatatatcgcgttgagggtttagagcgcctgaagaacaatggctttagtcacacacagagtgtttcggtttgtctcagatctcaggggcgctgtgaacagaagtttgcttggtaggtctagactctaggggctcagggaggctcggacacctgtacgacaggggttggctgtgtcctgggccctgagttcagtgaggctataatgcaatcagtcgattttgaaatattacttgtagggaacttccccctctattttgtttctccttgcccgttaacagccacgattgacacgcgacacaaaataaggtctatcatatatgatagtggaatatcaaatgcctggcctaccgcagagtattaccccacggcacagggtatagtctatcagcgcaccaggctgtgcatgggggtactgttaccaggcatgcagatcacctcgtgtttgtcgatctcaagtagtccgtgagcgtgaaacctgtcagcctgcacatagttgcacagatggggccaatatcatatatttattttaactgatggctccctcctctagattatgttcttcaagtctacgatgttgtttcttatctgccagaattgatgtcgttatctgcctacagctttttgcattcaaaatagcacgatctgagagtgttttataccatgatagatcacgaagaagacacacgccgttccttttccttcgaacttggcgatgatggaacccggacaacaaatatagccaggggaaactgctcaggaaagtcttcttcgggcaccacaatttcgccccagcagatattccacaaaatgcacctctcccatattcttgttatgttctccaaaggaaaagaccgcttgaacagagttcaagccaagtatagaattgagaatattcccttgcccttcgtcaaacaagatattcaagcaggacaagaatggattagaggtgccatgctctgtgctctggtaacggcatcaatcggtatcttgaatgtgatcctcacaataatcgcggctggtatcgcctattcaaaaaaggcaagcgacactcacctcacatatgcagaaatctacgagggcgattgttcaatcaccagtaattggactaccggaatgcacctggttatcaacgtcctcagcagtatcctgttggccgctagcaactatgtcatgcaatgcttaagcgcaccctcgcgggttgatattgacagggctcattcgaaaggtaactggttggatatcggaaccttgagcgttcggaatctctgggtcagggatgtcaaaagcaagattctttggggcctactttgtgtcagttcgttgcccattcatatgctgttcgtggtgccatctacaatacttcgaccagagttactaactgggaattctaggtataatacggccctcttttcgtcaataagcactttagagtatggtattgtcgtgataccaagtgaccttcggagaaatgaatcactcgtcagggacatatacgaagcggagtccttttatgagcacgtgggttatcgtccagaagatatactggcaggaagatttaatggcaccttccgcaatctgagtattcctgattgtttcaagacttacaatcgcgaattcaacactaaggcgggtacgcttctacttgtcacagacagggaaaacctcggaggctcttctagccttgcttcttttgaccagatgcggggatatctgggagcccgacccgactttatatcccagtctagtgtcaacagcttttatctggagactcaacattggaattatccaatatggtctttcaaatacaagggtagtggcgactggggtgacttgtttgacctatgttataccccttggcaagggcaaaacgacgcagcctgttacgatagagctattgatacacgcacacttcaagattttctttggactgaaaatccgaccgaaatgcagttaggcaactttttcaatacggcttcgaattggcggaacagctcatgggcagccgagatttcgtttcgcatcgacgtcccttcggatcccggtggaggcttttctatgctcggggaatgtccctgtgaaatagagtatactgatggcctttctcacaatatcacgatttcaggctgcatgaccagcgacgcgcagcagcactgccagctgtattttagcctgccgatatgcatcgcggtgattgtatgcaatattatcaaagtcctctgcatgtatatgacggcgaaaaaagatcgcaaagagatctttctgacgatcggtgatgcgctatcttcatttctggacaaacctgatgcaacaacccgaggccagtccgttctgcctgctaacgacataacatatggactgcgaagttgggctaaacgtgccctaacgatgccattcaagaataatctcgccaatgtaacgataccccgagagacaagccctcaactgtttcctaaacggaagagatggatacaggctgcgagctggagacgctgggcctttacttacatcttgtacttaccccagcccaaataacgtccatgtctcctaatctgatttaggttttctgcctgcctggctgtctcgatatatctatatact

SEQ ID NO: 4177 - DNA, 1892 bp, Emericella nidulans
cagctggtccctctgttgctgaatcgtcatcgtatcgggtccacttcgcttcatctacagaaaccgcatcttgttggagtcctccatgttgacgtcgttcatcagcaagatcaccctgctcgacgacatatcttcttctcattgacgtggctttcgtttgcattcttcattccgttagtcgtcgctgattgaaggatggagctagatttggtcttcgaaatagtcttcacgcccgtaaaagccagctcgtcggtttcctcgttaagccaccttactcgctcgaataatggaatgatacctccctgtgcccatgcaacgagcaggtcaggaccctggaacgacacggcaacgacaggaactaaatcgtccgactcagaggccttaattattctgagcgaggcctccgctcgcctcgtcatttgcatagatcgcgccttcagactggaaccttttgatccttcaaggccctgaggtcggacgaatggccgcgcaaagagttcaatagtaccatcttgagtaacagccgcaagaacttgtttctccagcgctagtttggcttccgtaccctgcgtcttatatatcgatagtgaagttacttctttttcagccacaaggttcatcgtaagctgtccgcttttcgggtcgaagacgtttatataccgatcattatccgatgctaggaacagcccatcagagatggagcttgtcgaggatgtgatgattgtctttattgagtttcgcatcgcaggaaacttgataggagattcatcttcgagattcacaatgtggggtgtttgagatgcacagatgacaggcgggttagaggcgagcgggcgggacagagtagtgaatgcagaggtagtagaaaggctgatcactcttttatttcagttagcttaatagcagctcgtcatatcaggcaacccttaccttgtcctttggccggtgacaagatcccactgtaccagcttgttgtccccaccgatactccaaccttcctgaggcctatctgctgtaaacttgaagtcctttactcctcctgtatgcccaccggcaagagttccgacaatcttatcttcggcaggcgagaacatgcggatatcagacgcgttggtaccgaaggcaaccactacatcgccttggtcgagttcggctgtcccattaacgtcggaagggcgctttctcttcctctttgactgatctcgtcggccatagtaatgaccccagtccaacgacgttactagttccttcgggcccaaaacatgctcgcattgtaaccggccggtgtttgtatcgtgaatgcgaagattttgaccttcaagaccctggatcacggatgcgaacaaggccaattgaaagccagaaggggcgaaggccgccctcagtatcgatgacttatttcctgtgtttgtagagtccgcgactgcgagagccgccgcggaagaggtcttcgaggcaggcttttggtttgactttttggccatcctcaatcgagtctatgcacgataaacttgaaacaatgaagaacgaagaccattcaagagccccagttggcgaaacaatagttctagcttagcttcgactgggagcgacacctagacgttggatgctaatggtagtcggccgtctctcttgtagcaaggaaagaaaaaaagttctgtaaagcctggtcgcccgctatatgcgcttttcctagtttggtttagtctaagccgaatttgtcttatctaatcatatagctttctactgtatattcatgctctacttatgagtccataaaccattcatctctttctatgtgattagcagcaagtacttgtgcacttagctgtctgctgctggcgaatgcactgctttaataatgactctctaatgaataaccggcagatgcc

SEQ ID NO: 4178 - DNA, 3632 bp, Emericella nidulans
agctggactttgtgagccatgaacatgacagcggaataatagactcagagtagaagcacggccggtgtcggacttctccggccccggttgtggcttgcagcttgaaatctttgcaagcgcccagaccatcgctccttcccttcttagccgcttggctccgataggcggggtcgaggttggtaacacagatcacactacaccaccatacattacacggcgaggcacgtggttacgcgggtagaatctccgatcgttcaacagcaggctacaaaaggtccatcctttatttctgtggagttagttccagcagaaccaggttctggtatagtctctatacgccaaacatgggctgaaccctgggcttgtccatcatcgactacaagagtcgcgggcaagtcgccggcttcctctaaccgcccgcatctctgtacttgatggaaccagagacgaggtgaaaggatcgccaggtgcgagaggccctggttcatgaagattcagtgatggaaacatccagggtcataaacattgcgtccgtatagctacaagccaaataacttggcgaagatgaagagaagagccttgctgaccttgtgagatctggataggttctgatgatctggaacaaacccacgcgggccccaaactggtctccatccaggagagtatggacgaccctgatgatcttactgctcgttgtctcggtctgtctgggctcctctattcgccaggtgtcaagcgtgcggtcgtgggctttgacgtagtcatggcgcgccgatgctggggcctgctcagtttgtggcgggcctcgggatatgactcttgccaaccctaaccatcatcattgctaaggtgataaaccaggtccaaatagtctgccgctccgcttgaaagctctcgttgatcgacaggtatctccataatatccatactctgttcgagactcatgattgcgtctgctctagtcgtcgggtcagcggtcggcggctttatgcctatcgtacaaggggtagacttcggatactgggaaatctctggctatggagtttgagacttcgctctgatactgcttgccatcgcttgaccggagactaagcgccctccagtgtacagtgcagacggcccaaatcctgcgcaggattacggggatgaaagacctcacgagagaggcggaagctgaatcctcccagacaccaacagactcgttcttcactatctgtaacaactcgcgcctaaatagatcatgaatagtgcattcacttcgaaatcttcagcgtctggagctctgctccgttaaatccatagtcctagtcttcagcatccacatctccctcgtcgtctactccgggtacaaagccttcttcaccgtctgaagaagcccgtgggtttaaacctatgggcggggtcttcaggaacgtaataattgcgctactgcatggtaatcccggtttactgcagcttgaaatacctcttcagcgcaagcactgcttctgcgacacggttatcgcagcaggacctccccaacagtgattgcgtcctcattgctcgtcctcttcttcagctgaacaggcaaatacgcatcaatgcactggatcgtttctctccactggcggacctgatcttctatgtattttcacatttctggtccaaagaacacctcatgcaaccagaacttagtgcggcttcccgagtttacgagcgccatgttttatgtcctcgtgttaatcggtctgtgcgtccttgactgctcgacggtgctgattgtgccccagtcgtttgttcgctgagtatgcgaagaagactgaggatgttgatatcgcagtaccggttcggatatcaatatatatatacttcgtacagcattactatatagaaaaatggtaccttacgcccaacttaaagatctcaggccattgccactcctccacgagagagtcagctcgtctcgatcaagtgaaacggccacattctcaccaattacgctgcacccgctgatcaaatgtttaccatgttaggccgccctattccaaagtcgaagcggacagaattcaggccgactctgggccggagtaaaggctattcgatatagattggttcactcgtattcataattcccagactcccattccatttaccccttcttcctcccttcttttccaacccgcttagctaggaacacatccgaatttgcagagaaaccaccctcgcgagaatttacaaagcaacaaacgagatcgcccaaaatgagactgctccctatcctaatccttaccctcctccaccttgccgatcccgctcatacggcagctgcagctgcagcccaaacccctgactctgatagtattcgatgcgaatcagcatccgactgtccagcggacttacctgttgtacgtcgtggctaataccctccctacatccaggttggtagatgctaatcaatgcgatcactgcttagtgctgcggtttcgatcccaggattcagtggtgccttcctgaggggacggtctgctgatcccaagacaagaacaaagccagggaacggtggttgatatgattgaaagcataagtgggtttggctgttgaggattttcaagcagaaggggttgatgagtatcaggttgattgcatgacttcaagtttagcaacgtggtggtagtagtagtgtatgcagagtatgcagagaatgactgcctctggcctcacttcattatgattgcataaaatacatcgcctgatgcagaccataacggtcaaggtagccctaagtaaagctagaaatgctgattggacaatgcccagcttgctttctagggcactacgcgtctagaagatttcatctatagatcacatcaattttgcgaccgctgcatgagaatatatattctgtataaatataagattgttttttctaaaccggttgcgccgcccatgacacagtaactacgctggaatgcctcaaaactcgctatgctagaaacgagtatgtatgcaaaaaatcgtgaatatggggaacaaacaggaagactgacaacaaagtctaaaagtggtgagaggagatcagaagcagacagtggtttcatccgcctgggtcctctctccctcacttgcaggaagggattcagaggaagcagtgcctgcggcggtctcatttccagagtcccgattcccctcaacgacctcgggggtccttgtccctgtgctacctgagacttcggactccctcgcccgtcgctcctcctcctgctcctctttctcttcctcctcttcccaactatcggcaacttcagttgattgaagtggagacgaacggcgagcctgcttgctcgcaccaacgcccgatctcagaacgagcttctccttcttgacgcccgagccccctacgctgcttccgtcatcgttcatcgcaagagccgcgtacaaagaccccgaccctggcccaatgggagtgcgagaaagcggcgtgtttcttgcgctactgaccccattattccgtttcgatgcagcaacttgcgcccagccgccttccgaagagccggcttgggccttcggctgttcgcgtagggtttcgcttctgccgctgcttccacgccggtcgcgctccttggccctgtgacgctcacgaagtttcacacatt

SEQ ID NO: 4179 - DNA, 3438 bp, Emericella nidulans
aatctcttccctgttctctaaagatctacctaggtcaattgtttgactttttatatcgtactcagaatgcatagcaagcacaggatcttacgcaagtttgggaaaggtgcaactgatgtgtctaggcacctagtgttaactgtttcctcccttgtctgctctggactgtaattcaattctgtgaatagtatgtttttctacctgcgactgatcaacttgctatcaattcgcgcatgcatcgagagcattctcgcgcgcagggattataagtttcggttagactgctgtacctagttcctgagatgacggaattatggttcttctagcatagaaaggagatgtgttctcgcaagtctgcgaatgcagctagcgagtgtttggtatctagcggacggcgagatgacccattgcagaagggacaaagtgctggttcatcagtactgcttctgttgttgaccagagtatccacttcgcctcaccccattttatgttttttttttttgaaagcctggttaaaagcaatcctgatcttgactgggcaagttctttctcagtttatccatggggtgcatctgaagaagagatgtaaccagttcatcgtccaatcttggttctttgttcatgcaaagtgttgcgaaggaacgcggacgacgttgacgcgaggaattcacaccgctggaagcatataggtcatgtttcatatagcttcggcgcgatgggttgcgtcaggcttatgcagttatctcccgaactgggccaagacgagataacggacgtgaatttggaatcaattagtatcatgcattatcatacattcattagtgtgtgttacgcctgggatcatatgccaattgagagagttgtgtcgtctgttgtgagttaggcaaggacgaggagtgatccggtgttccgtgaccaccgcgtcgcccgggccatctggtacgatctgggcccccgctaatagtgtttctcgaaacgctcgtgcactcttgcaggactcggcggtcgaggggtgaattcccttcgtggctcgtggtaatgcttctcaaaggcttctgaagtccttgcgggactcggcgaacgacgaggggcgtattccctactttgctctgtttgctggatcactggtcgtcgggtagacgtcctgtcacgactgaatgacctgttgtcgcccccgctctttgtcgcctcgatctcgcgtttgacaccttcgtacatttgctcgataatccggatctcttcttcaacgtccaggccacatccttctagacataattcacgttctcgctgttcaatgtattcccgaatgttgcgccattcgttctgatagtgtttcaagcggtctggaaggcctgagcctttcaggtaggtgagaataccggcgacgatagtgttgatggcgccgaaagcagttacagcattgtgagggccgcgcgccgcaccgagagctgtcagtgcagcagcgaccacgatctggatgcccagacaggtgttgatcaaggcagcgtggaagcggtatcgtttggcggctttagtttcggccctcacgacccgcgtgtagatgccaatattaggcgctgttcgaggagtatggtgtgacagatttagtgccggcgtactgtcgatcccagtgagagcgcggaagacgaggagcttgtcacttggcgggatgaggacgctagcatctgtcctgttgatcgtaaagcgtcgcgcccttgcatcggtgggctctggggtctcgacggtgggatcataatttatgcttccaatagtcggatagagggactggtgtgcaggaggatagccctgctcttcacggtcgagtgccgccagtaggaggcgtcttgcaagactgcggcccgttggtcgctcttgtcccatggctggataccttgcttctgggatggatcgcggtcagagaaggaagagagtagatcaagaagatacacctgaggaagggggtccccattcttgtaagcgattgggttaaactgtgagacaagcaaactttccgtcgcgtgacggatgaataggacgcgatcccacaaagataggagacccagtatcccttttttctcgtactttgattgcttgccgctgcgggtagatagacctccgtgttcagttagcctgccgaaccaaacctagctcagaccagttgccggacggctggaccctggcgagggataggtgggccgcagtttgcagatctgtgcggttcagcgaaaccaccggaatagcacggaatatttttcagctctgaaccagtaagacaaaggcatgatctctgcagaaggtcggctgggtctgtgcgggtgagggtagcagaggactttgaagtcttgatcggttccattgggagcctggcagatgggaagcggatctggtataccgtcccgtgaaccaagacgaatatcgcaatcacggatcatcaaaactttcagtaataggagagaagcaagtctttatgattatgctggcccactcagaaaaatgtgatgtcaagactcatgaattgcagctcctccacataccgctaaacgagtcaaggcgcgtaactcagaatttgacaggaaagctagctgaacatgtgtccaggggtgtcaaaagcggaaagtgccgccgatctgagtagcatctcagaggacgaacgcgatcgagaaatctctgatggatggccgtgatggcgactggaggaagcgccgatcacgaactgtgccgtgattgcttgaattggaatggctgcaggtgactggaagatgactggcgatgctgcctgccttcagctacagaggctgacggtacagcagcgaagagcttctgatacattattggttttcttttattgattattttttttccctggtcgatagccactcaatcactccgtgcgtagtgactcgggccgcttcagacgggccgggggctggaattggcagttcgccgtaagcgtggtagactcgacgatctcccactgcagagaaaggtcgaattcaaggtagaaagcgagcaggatcgcgcagtgatagggcacaattgctgggacactggttgattgctcgagccctcgataattgctaagaatcggctaaaaattggcgatcatatcagccgcgaattgccagtgttcgaatgatgtcttttaggaccacagaaaatacggtccttgagtacatatgtgctctcggtatcgccgacctgctctgtagacgagtgagctacattgtaggtaatgagacactggacggtgatagcagtttgctatttgagcaggcattttatgtcactagtcatgctaatgagcctgccgcattattatgattttatgtaagtagagaatttcctcaatttcgcattaatgattcgtcttgacatgagacaatgaattgacgcgatggatagagaagatcgaggaggagacattgaagaaggatgatg

SEQ ID NO: 4180 - DNA, 2602 bp, Emericella nidulans
cctagttaaagtaacaggctcccacagctagggctaggacgaagaacatcaatgcccagaagttggcggcatcgatcagcctctgaccggtgaaattgaagacctcgatcagtttcgcaaagaggtagctttggagagcgaagccggctgtgtgatgttagcttgcgtctcacgaatagggccgacttacatccagagccggccgccgccgcgaggataacgatgtatagcatccagtaggcccgttgttcgtagagaatggcactcaagctcatgaaaccgcccatcttcttcgccggagcttcctctggtatggagttgagctccccttcgttcttttcctcacttgccgcccactcattgtgctcactgtcctcaaagccatccgcgccgtaaaatgtccctaatagctgcgccttgacaaggccactgtaaactccttctctctttagtaactcttcatggcttccctcctcaacattctccccatccctaagcacaatgatccgatcggcgttcctcacagtcgacagtcgatgggcgatcatgattgtcgtgcggtcctttgagacacggtttagggccgcctgcacgatcctttctcctctcacatcaatagagctcgttgcttcgtccagtatcaagatcggagggttagaaacgatgccgcgcgctattgttagccgttggcgttggccgccacttagcgttaagccattttccccgatgagcgtggagtatctctgttatgatcagtatgcgcgtgatatagcgatgtggacgggatatatactgaaggaaggcgctgaacaaattcgtcaacaaatgcttccttgcatgctttttcgacgaggcctctcttgacctcttcagaagcatcttcccattgtgatccgattagtccaaaggcgacgttgttgtagactgtgtcgttgaacataaagggctcctgctgcacgaggccgatctgtgtcctccaccacttgaggtctaaactgttaatgtttcggtcattgatcctgatctccccagacattttttctccgtcaccggatgggtcgagttgataccaccgctccagcaacgtgacaatcgtgctttttcctgatcccgaaggcccaacgattgccgttgtcttcccacgttgaaacacagcactaaagcccttcaagacagacacgctaggtctcgaaggatacgcaaacgtccacattctcaaagacaatatccgactggctcgatacctcgggctcctttaaacttccgctaggtagtttgtcggcatcgataccgggaaagcatgctacgcaggcgctcacggtttttgagatggccattagaggtaatataatgccgcccatgatcgtcacctccagaagatgacataaaaacactctgctccccagttactgatgccccaaacagcgtccttcggatagtatccgttatcactgtcccgacattaggaatattgccctcccggaatagcttgatgccaaaccagaaggcaagcgcaaaactgcagtacatgctgaagaaaagtatcgccagatgaatgcccgtgacaaatgccatgcgctcgccgcgccttccgcgcctcatcgacccactcgctgtactttcgtgacagggggccgtccgcgccgagagagaacactgtccggatagaaccgaagacctcactcgcgatcgaggcatgctgctcatccgcgagatcaacactccgctggccagaaatcatgatcgggagcgtgacgctgaatgctagcaccacgaagaggatggctgaggagacaacgagcgtcagtgcccaggagtaccggaaagctactgcgtatgcggcgatcagcagggcgaccgactggaagagcattgccaggcgatcggaaacgctctgctgcatcgtatttgagagggaggtgatggtgtttgttacgctacccacggagatagcgtcgagtttgctgacgggctggctgaagagggaggacatgtaggacagtcggagggacgaggacgctttcaggctgatcatacggaaacagagcatgtagacgtacgtcaaaacaaacttgccgatgaagagatagatgagatagaggctataccaagtcagccaggagctggccaagttatatggatggcttggcatgcctgttcttgctaacggcagagttgaattgagactctgtcactcccgagtctggaatgaaatatgcattgaagtcgccaacgagtttgccaaagatgacattcattagggggaggtctgcgacttgttaggaatagcggtgcacatgtggaaatgagacctgccgttcctgatcccattgcacatccaaggccgaggatcaagagaagccaaccatggtgaccggtcccgtacgagaggattcgctagatagctgtcagaacgccagttgagcatatgcaaacaagagcctaagcatacagcgtagcttgcgaacaagggagtcttggtctctttatcattggagccgtcgtcgttctcgctgccgtcgacggcgaggcgttgccatccctgtcgccgattccttttgtgtttcgaccggcacttctgccccaggactaggttttgaaa

SEQ ID NO: 4181 - DNA, 2684 bp, Emericella nidulans
catatactcggactctttgtcttgcaccttttcttgcaaaaatggttgatgggaaacatctcgctagcgatactgaatctataaaaagcattgttctggtcttgctttacttgcttgttagggcgtttggtcacaacgtgatctggattcgtatgcacaatatctgccagcttaggagaattccagatattaacctgcacctctcttcaggcgccatctgagcgtctaccaagtcacatgagcatgtgttacggtcggtcctcttacgtctcctccgttcttgtcgagtcttaccgaccaatatcgccccttgtggagagaaaagcttccgcccatgtgcaccatccatataattttccccaggtatcgggcaccaaaggtgcactgaaagaaatcgatatactcaatcgaacttttccttaccagagttcacaaatcagtgaattttcctaaaagaagagttgcttatcgcagacttggagcgaatgaaagagcccagcttaccgccgaacccatgcggaccccgcccaatcacgccgccataaggcctgctcaaggtgacgagagccctggccatcgcattagcggggatcgaaccggcaatattctgcagaaatggcacagtttggcacgtccctccacggtcaatggttggccacggcttcagcaagccaccagtccagccaatccactattcgcctcgcaggagatctcccttctaagttcgccagatgcaaaagacgaagtcctgtaccgccgaactgtgttcttcccgcagggaaagtgtgacaaccaattactatcactgctccatccatgttgccagggagttcatgaccggtgctgaggatgctgagcgtaagctcaagtccggctgttcttcccctcctctcccatgcacctttttcatctctcggccacccacaagagaagttctaactgtttgcttcattcgttctgcgccgatcacatcctatccctctacatactcgctagtctcgacggtgtctaggacaaagaaagtcttgacgttgtcgagatcactaagatcagtcaaagtgctatggttaccaacgaactctctgctcaatgatttgactgagggtttgactataaacagcggacgaatctcgctctttcatcgtcacctggatctggtttttggagctggtttctcgggacttggacccaggctaccggctcattgaggttgtgacaccgcatcactcattgtgggattcgaaccctacgcgaaatcatgctgccttgggattatgttaccacacttgtgaagcgcattaacttccctagcgatactccctggggtgatgcggtgcttgaagaacgccagcgcgattcatggtccaaagctggcaagtatggaagaggctgggtatacttctcgttagtgctgctggctatcgcaacagcaattcgcttttatcatacctggggtgatcgggtcagaatcgctatacacaaggagaaaccgcaggccggttcccatagtccccaagatgaatatgagcttccgagcgccgccacagatagctccactactctatttttcccagcgcaggggtccctccataccaaacagcagcagtcatccgtttcgactgtggcaccgctgaataatgctattgcactcgcacgctggatcttctaccgatctcttccggaggtacgagtagggaagtaccggattgttttcccttcgcttggagcgtcggcgatcattctcgcggcattaattttcgtcacgctctattgctttgtcccacaaccgctctactactcgtcgattcgggttggatcgcctccattggctattcgcgcaggaatgctcgcagttgcaatgattccgtggatcgtggcgatgagtacaagggcaaatttcatcagcatgttgactggtatcggccatgagagattgaatgtgctgcatcgctgggctggctatatttgcctgttcttgagtctggtccacacagttcctttctacatcacaccaatctgggagcatggcatgctggagatataccagttatacctcacgcctcacatatacgtttatggcactggcttggcggcacttgtgcctctggttttcctgtgtatccattcgctaccgattttgaggaactgtatgtacgagttgttcctgaagcttcacctacccgtatctatgatcttcgttgctatgcttttctggcacaccaagaactacctgtcctcgtgggcctatctgtggtctacggtcgccatattggtcctttcttacgttgtgagattgggctacctcaactggactaacccattgcgattgtcattcatgatcggtgaagattccgcaatcaccgtcctaccccagaacgcggttaaagttactgtcccgacccaaatgaggtggaagcctggccaatatgtgtacttgcgcatgccaggagttgcgttcttccagaatcatcctttcaccattgcctcgctatgcagcaacgattttccgtccgagtacggtgaggaataccgtgacttagccctcgtattccgaccattccgtggatttacgcgcaatgtccttcgcaaatccgtcgaatacggacccttcaaaacatggaccgccttcctcgagggaccctacggaggtatgcggcggcagatggcagcttttgacgatgtta

SEQ ID NO: 4182 - DNA, 3841 bp, Emericella nidulans
aaccacggggcgctcagggaatgtttaaccgcataaagaccttccgttcttttatggacccgccctccatgcacagaggagagggataaaccacacgagcagccccgctcccatgcaacaaatgacaaagaaagacaggcgccactcacatctacatcgataataaacgacatagatcgatccaaccgtgcaccaagaaagaagaactagaagatgctattgacaatgtatggatccaatacgtagcaccggcgccgaagatagctatatacagaattagtttctgggtgtaactcgtgtattttcagaacagggctgattacgtaccagcattgcccatcttcttgccgaatttcttgccgtgttcctcaaacttgccgtgtttaccaggcgtggatgaggaaccgctctggctgacgtcaagaggcatatttccgtagctggaaggtggcgcaaccgctttctcgtccaggacattaacatagctccgagggaagataccctcgaggtttgtgcgctcgttgcgaccacgccaccctatattacgttaatacctgcctcagtcagaaggttctaggaaaaaaaacatacagtcggcattcatatgctctaagacctgaatacggtcgtttggctgcaaagctaggtccccagcatcggtcggagtgtatgcatagagtgcagaggcgacagaaagcacagtgggtgcttgtgggtaggcaggaggcggactcgcatagtgttgctgaggtgcgggcggattaactccgtactgtgccttttcgttcaaagaagtattggcaagctgagcggtaggtggtgagtatggtgcgggcgatggtacaggctgagcagcggcaggcgaaggtatactctgagcagcagggggtggtagctgaactggagacggctgtgccggtgcggacacttgacgttcgctttcactcgaattaggtagttgtgatagaatggatgagagctgctgaggggtgatgacggaggcatctgctaagaactccaactcctgaagaaaagcattatcagtaatcatctcggcgatctcgaaagaatcatttttatcaagggggaggtcgtaccgatcggacattacggagcgaccggctagtcaaggccgataggaacgtctctggagatgccatgataggcgataaaagaacggctaacagtccaactgaattaagcaggcaagcgtggccggaatgatgtataggagacttaaaatgaggtctccgaacgacagaaaattgctaactcgtcggccagcaatagggtcggatggatgttgatgggatagatggttgatggggtcgagcagggacggtacgatcgttggttcctgaggtcttaggctgccgcagtgccgccaggctgaaggattcctattggtggacatggctgtgttcggagtcaaggttccttaggcactatgactgatacatttatgaatcacaatgacactttatgtccgggttctgctcagccacatccgaacatcgaattgattatagatgtagagagcggagtctgtatcctttctgtcgttgtataacatatagcccgctttggatccccaaagctgtggtattcaagcctacatgcctaaggcctaagtagggtaggctaggaggctggttttacttgaacttggcgcgacaaactacggtcatttaatcaactcaaagagattggagatttcgctggaggcaaaactgctctacggattgctcattacgaaatcctttttatgtctggccatggatcccagccttgcctcttgacattaccgatctttgatcttctctatttctcgagtgagtcaaagccaagtatgtaagcaacgctaaacctcttgaggctagcgtcaatcgccccatcctaactccgccataaaggactctcgaaagttccgtctgtgtcatcgatataaatacggtgggccccttgaggcttgaacattactctttccaaatcctcacgcgatcgcattctttaaccgccactcctttacaatagacttttatagaccgatattctcaacaatataacttctacccgcacccaccttcacagcaacaatgagcgactgggattctgttactcgcatcggctccaagaaccgtggtggccccgtcgttcgcgagaccgtcatcaagggtaagagcgcactcaacgctgcccagcgacaggggctcgttgtcggaactgaaaagaaatttgcgtctggaaattctgtaagtaatctctccccattgtgactattcaataatagtcgccacatattaacgttgcttaggctggacgagccagcgccgttgaaggccaacatctcaccaaagtcgaccgcagcgacgacattgtaaagcccaagactgttgggctgcaagtagcagacgccatcaagaagcgccgaacggacgagggctacaagatgacacagaaggagctcgccaccaaatgcaacaccacagttaccgtcatccaagacttcgagcggggtacagccgcaccggaccagaaggtgcttagcgccatggagcgcgtgctgaacatcaagttgagaggctctgacatcgggaaagagaagttccccaagaaaaagtaaatcgaccgggggtgagcccgcgactttttctttaggggaggcgaggggcatcgttgatgatttcttttctatggccttcatgtcccaggctccttctcggttgttatgttatgccctccattgaatgatatgacgttttctttactcttgatcggtttgcgttcattcagaagcgtcaacctggtgttgaattgcctaaactcgaaatacctttttccccggcggcgaatagatgaaatagaattacgtctggtaacactgccttcatcttctaatagatagtgaagtaatagttctttttattaggacacgaaagcgaccagaaatcgaatatgataccaactccgtcttatcatgatatagattgaaaagtagctcaccacttcaatcacacaggtctacctttgacccaccacacgtagcagtctcttttccgtgctttttagatatgccatcacttcatgacacatgcaagagatgcaatgaacagaaaggaaaaaagaaattctaccatcgtctcacacatcacgcaatttaccgtctcagttgctctcgctcgacttcgtacataaaatcaaagtagggcttgtcaaagtggtgaacacggacataaccatcctctccaccagaggcataggctgtaccagcggggtgaacgtggatggtattcagaggaccgaagtggcctttgacacggccaatctcgtcctcgaagaccttgtgatagaaacgagcctcgaatttaccctggcgagcggaagttgtcgtgacatccatggcggcctgaccaccaccgaggatcacatattccttcttaggagtgatagcggcgctgttcagcggtgtgtcggcaacgtaggtcttcaggatggcgaggttacgagaggacatgagctgcatattatgaattaccaattctgagtctggtgataatggaagcctaccttggcggatttgtctttggagacggtaaggaagtgggtgcggtcgggggagaattggaggtcgttgatctggtggtcaaactcgtgcgcctggacgttctccagctgctcaccggtctagacaaactttagtatatagtgtacttgccaaaccaagacatgtcaatcgcacctttgcatcgtactggctaacgcttccatcttcgtggccagcaataatgtacttgcccagataactccacccggcgactgtagccttgctctctgtgcaggt

SEQ ID NO: 4183 - DNA, 5256 bp, Emericella nidulans
gacggacccatctggacgggtcatttgacatggtgaaaatgaaccaccgttttctttcggggcttttgaagatgtccagctgggcgggggcattctaaagcgtccaggcgaaggaggtcataagtgcctacccgcgtgtagggtagaaattgcataacgtcgacttcagctattttagcttgcatcagctgcattcggcaatatagagccgcgcgggagtagaggctctggaaagagcttgaccactcgtccattctcctatatcggtcgatttccgcaatagcgtccttctccagctgttcttcggctagagcttctagaacggcgtccatatcaaaattgttcaggtcatcagtacgggactcaactctttcaagcatggcgtgacatatggacttcatcaatgtggccacgtttaagttgtccgagtacttcatcagtgtgagtatatgcataaaaacatacaaggtagacttgcttacctcattattggagttgtcgttgaacttcagcttgtcataaagaaaccgcttcaccctcatgggagtcttaccactgacgtcgcgcactttggaaattgcctcgggaatgactagctgaaggacatacgcggccctatctgagaagttatttgaccgagtcataggagatcccggcaggcagaatagctcttgaaaagctttctcgagatgaaatagccctagccagttgatttcttctttggcatgtttcactaaagcacgagccgccgccacccgaattccatagaaatatcgtcggtccattaacgttcgaagaaagatcgtagagatcagagggtgttcgcgttgcgcggccatgtactgtagggactatgaagggtaagcagggaaaatgacaaagggatgtgccgacttacctccaattgagctaccacatctcgatcttgctggagctgtgaaaggtacatgtatcctggcataaccaacgaaagcttgcagatccattcaaaatctgcatccatgcgaatccattcataagattcttgacccattcgttcttcatcctctttgctccagtcagcaagtcgccattgctgcatctcctcctcgctctgcaatacatccccaagacagtatagcagaatgtcctcctgcacttccgcgttcccatcagcaccaatgacagcagcagcacgctctttctgtcgcttatttcttttcagtcgtttatatttcgtatatagggtatgtcaaatttcgtgacaccttctttgatctccacgatgtgttcatatggtgtgccgtcagcatcgtgaatcctgatcgtcattgagccggtaaaaacaggttgtattgtaccggcgtaaacatttcgaatttcttctttgacgtcgcgcataaacgcatcccgttctagatcgcgagcggtcggctgatctgactgaacctgtttgatcatcatttccaccaccaatttcttcttgttgaatctctgcgtggcttggaaccgggggcaaccagcaccataaatccattggttgaaaaaggtatccagttttgcgtgtcccaaacgctcacacgtcttttggaaaactgaggacgtgacagccccattcggtagttctcccatacgagcattcaggaaaagacgagagataatccgcgacatggttgctttcccgctggctttagtgaggcgtcgatcgaggatgaagagaactaacggcgctttgagcgcaataaatttggcctctgatgggtctatgctcaagatgtttcccatatcatacaccgatggacgctcataatccaggtcacacactcggtctgacatcaatttcagccgaaaacgatattcattattcccgcaaagtttgcgcatgaacgtgtctgtgatgtaccaggcaacgccaaccgttacccaagtatcagccggttcctttggcacgatattgacaccgatccattgagcagctagagcgtgagtgatggcacgagtagagtcgtacattgggtcaattatctcctctggaaacagaagacggctgctgcatatcgaaaagcatgctgttggcaatgtgtcttccggcgcatcatcaacgaagcacattttatagcttgaaaacgggtatgatccgtaagtcattgagaaaaagtcgatagcctttgccataggaaagcaagtgttgcgaacttcatcgcctctacccggaaggcagaacgcatgcagtgggatggcgttttgaccaagctgctcgtcttggtcactttcccggaagtcagcgaggttgacgtactcaaaaggaccaacagcaaacccaatctgccgtgcggagagaggagagtaggaagcaaacgagacagtcttcttgctggaatcttttgaatcaacaatgtcatccgtcagctccccagaacagacgacggacaagtctagggcttcatcatctggggcaagccgatcgtggtttgatcttaggcgagtcccggtcccactaactgactggtctagaggtttgcgttcaaacacatcgccaagagtacacgggcatctgatcgctatttcccaagtgcatcgtgaagaaggatcatcaacgcaagggaagagcggacacccggtgccgtgatcaagagagtttgtcgtataagcgtgtggatagcgcttgtccccgttttccactccaacaaactgtatcccatctcgtatgttttcgacaataaattcaatagtaactgtgagagccgtgaatcgaggaagggatgtctcggcggtcttcgagcttagaggcccctcggtatcatcagccagcccgggcgcccgcagtgccatctggtcttgagcctcgacagagaacggatcaagttcatctattcggacgcttttcgggagggtaagggtgagctcgggctcggaaggtgttttgaggagggcatcgagttttgacgctaagcgttggtggtaatgagggccgtatagttgaagcgactcgtaaggatccgtgtacttcactagaggcacttttccactgactgtaacacgcttcaattctccctgtcgaaagttcaaacgaatgtaacgcaggtctttgtagtgcggatggatgatgatctcggttttgcccttcagactccgactcgcaaagtccaactctagctcaaccttttgatgcgcgaccgtaaatcccagacctggccagcttgggccggcgggagtatctacgacgcctggcatcgcgcaagatactcagtcgtgtactgcgccacgagcgccaagctgaccatccaccgtcatgtccaagctcaaggagcaatcgtaccgtacgccgagatctatgcaaaagtgaatgcgatgatcgttcaatagaaatgtgatataaatgggagggggagaggagaacgatggagcggcgctgtaaaacaatcgagaagtgttgaagagcgatgcgcagcccgaaggacggaatttgatatgcgggagagaataaaagcgtctttctccgtagcgaagctgtccgcggtcctactctcaggttgttacgttccctcactggttgatgactttcatctcatggcgcgttcaagcattcgaagctgcggagctctttacttaacgtgaccttcaacggagccagccaagtttatcaagacttaagacacttccagacactgacaagtggctccatccgttctaaacaaacatggcattgcaaaggacattcaaagtttctggacaagctcactcgaaaaagctggtgttatgccctcattcaaggaacttctactaacccaattaagaccccgcttttttatatagatcagaatatatacttcatcttgaggtcttacggaaaaagcaccaacagatcccgctttgtccgttatatgtacttctaattgcgcgcatccggctcaacatcaattccatgtcgtccatagagaatatcaagaaagcctacgactccatctcggtcacctactcagggtcacctactcagagcggacaaaactacatcatgtgacacgcatcagatacttaaacgcactcaaccacttcgctctgtatatatctccaccaatgatgatcaaaggcttgaagcaagagttggtcctggaactacgctcgcggctcaaaaatcctgtctctgccgcctttgcatccgtccagcatcctgcaaacgagacaagtatggaacctactcctaggttaaagttattggaacggaagccccccagcagcttgggctggcattggagacgctggataattgcaacggtgttgagctgagagaagggtgtacgatggaactgacgattcttgatgcaggtctcgattctgtgctggatatggacgcacccatccgtgcaccaaggcaatagcaggatatcctattgaggaatatacatcgactggctcaaccatgcggatgtttcctggggaatttcgctgtggaagagctcgagtcagttttctagtgacaagtgactaagctgcaggatggatggtggtgccggtgtctttttttgcagtaactggtggaaggaaaagacgcttcagaccatggtcaaagcggctttgagatgcttctgaaggacgggtcgacgaggtcgagaaggggacgatggcatggagatgtaagtgctaatcgtgtgatttctcgcgaaggaagcttggtttattgttataactactctctcccccgtgtattcgtatagccatggagtagcctccagaatcgggatggttacttcatggttttgtcagtttgtccagaatttgtcttcacaatgatcactcgaaacagagacctggataccatgagatcggcacatgcacgtgatagctcaggtacgtatcggtccgagttcgtgctccctgcttctggatttgactcgcattccacctctaaaaaagtggaccttgtctgagattcgcttttcttttactgatcctcgacggtcggctactataactccctctctgctgtacaagagtgcttggacgagtcatattctcacggaaactcactggctggtcctgtatcgttttaatctctattgcttgccggcgcgctatgaaataggctcgacctgcgcattctttccctttgaacattaatctgaccaccacttctactcataatgattaggatatttcggaggatccgaggtgcgagctgcctgtcaatccaatccttcgtctgtaaagtgagctgaccataagaacgtgcctgataatagagatccaagactccctctccgacgatggccgttctcc

SEQ ID NO: 4184 - DNA, 1107 bp, Emericella nidulans
gaaaggacgatactcatttccggctataccgcgagagcaacccagccttaaagcacgtcacatggtggagtgtggctggaacaatcccggaattgctaagtgtggcacaaaagttagaggaggagaaggggaccaattctaagaagttgagtgagaggataaggaactctattccacgataccctggcttacacgtcgtacgtacatgcggtatacccgtcctgagcctcgtgagctcgaatgactgagagcaagttgttcttctcgaggaaagcacacgcggcagggtatgagaaaaagtaggagcaccctcgaacgctattatgaataaagtagtcgccagtcttctcttgaccgaagtcctccaaaggatcggcccagaggatatcgcacatgagcccgtgagttgggggttctctgaatcgatcgatctaggcaggttagcctgaccctgttgaagtattcagcatcgcgtaacataccgatttgatgtcttctaaagtgtgcagttcagggctcaaaccaccgtgaatacagaggaactgcttattcataaccgccgccagcggcagcgcgcaaaacgactcaatgcaggcttcatagatgcgctcgctatatttatgcttacattccaacttgaaagtaaaataatctgtcaagtgtcgacattcgtggttgccgcgaagcaaccagagtgtattcggataccagatcttcagtgcccataggtacaggacacactgaaaaggtcagacaggccgagtgattagaggcagggaactcacctcaatactgaagtagcctcgatcgacatagtcgcccaggaaaagataacgcgtctcagcagggtctcctcccacctcaaacagcttcatcagatcgtagtactgcccgtgaacatcaccgcacacagttatgggcgcgtccatttccagcaggttgggctccgacttcaggatttgagtacccgcctgtataatccatagcgcctggtcctcggtaaggcgacctcccgatagaagtgttgcttgagaaactggagattaggtttcgttggttcttcggggtccaaaactgatcgtctgatggtttgtcaaggcgggtgct

SEQ ID NO: 4185 - DNA, 2895 bp, Emericella nidulans
ttgcgcttgaggcccaggttgcgcattatctcggttgaacggggctggatgccatcggcgcggccagtcgcggtcggcacggggcggttgtcgatatgcttcaccttgtaaccccaacgggacatgcaaagtgagaggaggatgccaacggggccagcgcccacgatgacaatgtcatacttcttggggtaactatcggtcgtcattatggtgcagacagccgaagatttgatgaaatgatcgcccagatccagacctcgcagtgcttgaataggaaaacaggtatgtaccttttagcactaccggaatgcacggaacgagataatagaggaggaatggtggtgatagtggtcattttgcagacgggctgaagggctcatatataataattatggcgagactggaggaagcaacccagttgcgctgttaatgcacaacggagagccacaacggcagtcatctcggctggatcgtggggacactgaagagacggacaagtccagtaggctgaaccagagagcaaacagcagtggtggggggaccactcggagagtcggagcttgggcaggctgaaggctcgagggtcagcacgaactggactggggggtttgcggggagccaaagccaatgccggtgcattttccgggcctccaaaagggcgaggatcgaggcggctagcagctcggcaagtggagagatcccacgtgactccctcatcggcagccagcccgggatttcctgagtaccgctaacagcgttcgctgaccacgattggctgtgagcgcaaggctgccgatgcctctgccagtttaattccaccataccagatttccaataagccactctcatgattcaaccgtatgcaaccactaccgttacaagtttttttcttttttttttttcagaggaccgcaaagacgagatattcagctacgccgctaatctttcgatcctccatctgcattcagcattcaagtgctctcaccaaacaaaaaaaaaaaaaaaaaaaaaaaaaaaaaaaactagcaggaatattgcatacattcaaagttccgaggtttctgggttgacattgtatagcctcatttcgtcaaatttcccggcacccagactaccgggctgtttccccatccttaacaagctatgggggagccgctttgatgtccgtggctgtcaccggtctctacattaaggtacatttttcctagcagggctaatctccattccgcaggcactcaacttcggcttctctgtaatggaccgtgctctcacaagaatcaaccagcgtcactctctctcccgagataagacccagagattatccacggcctgtagatcaacagtcaacgttcttgagtatgtcctggtgggatttgcgcttggcgtagtcggtagatcgtaccttagcatcatagacccttctcttcgttacggcatgccgagtgactcgctagtacgctagaacgctgaagcgtggcggcctgggtatcgagctcattcagagtagctgcatagtcaacttgaaagtgtccagaagagaatagggtgttggtttccggatactgtacccattcagttcggaggacaataggctatgaatgcctgtgttagtagcgattgacgaaatagagccattgacttcacaaaagatagaaatgaggctcgaaaacaattgacaaagaacaataatgagcgggtgcctgccttgtcctattgttgtcttaataacgaggtcaggcaatagaagagctcatcattctggactatttttctctgcacccgcatattcacggcaccacccaatatactgccacaatacagaactcatcaataggtagcagtgctatacaatcacagtttccaatgactgcctaaccacccattgttctgaatagactgtgaattatcttaaccaccaatacgtactcgattgggtaataatagcttcacagagaagatgaagattgctgtagataagcccccctgtagactcgtcctcgagatctcatcttctctgctccagcccgtttttttgtcctgtgtctacagtctctgaacgtcagtgaacagtttcctaccatcaacgcttactaccaagcgcgtatcacagcaagatgtcctccgagacttgcgaagtccccatcatgcttgatcttgagtaagtccagccctaggctgcccttatcgatgctaatcagaagcaggggcatgacctatgaggatatcgccaagctcaacccattctatgaggaatacaggaccttctgggatgatcctcgcgacgcatcggacctctcgctaagcacagacggcttgtcgagctcctcctcgcttccttcactcatttccggttcagactttccttcttcatccatcgatatggcaacatctcccccgttccgaacgcatatacatgctccgctgcctcgcagtcccaaagtgacctttcatagcggcggccagtacaaccccatctacgacgaacaccacgagctcgagtcaagccaggtcgcgattgtggacgaggatgattacccaaagaggccattgtcccctgtacgagagtgcctcgacgacagtgagcttgttgactcagtcgaccatacctttggctccgtgaggtcttcgcacaagcagctgttcggtaacaagggctggcttggctgcacggccgacttggaggcaccgctgccaaagctgccaaagtacaagagtctgataggtctcgggaagaagttcaaacaacacgtcgaagggatcgtgagtccgctgcctgaccttaactgacaagatgctgactttgttaggcctctgatatggccaaagcacatccactcgccttccaaatgacccatcagtcaaaaatcatgccaacgtcaaccgtttctgtctccc

SEQ ID NO: 4186 - DNA, 2513 bp, Emericella nidulans
ttaagtgtgtgccggtagacgtgccctttgcatttcacaccgagcaggtcgacccagtactagaccaactaacccgagtcgctgagactgtgcacttcaaggcccccagtattccaatcatatcgccattgttgagaagcgtggtgtttgacggcaagactatcaattccagttacttgattagagccacacgcgagcccgtccactttgctggtgccatagaggctgcgcaggatctcggcatggtgaatgataaaacagtatgggtcgatgttggaccgcatcctatttgcgctactcttgtgcgcagtttgatccccaaggcgcgtgtcgcttcgtcatgccggagaaatgaggacaactatgcaacgatggcgaagaaccttgtagctctgcacctggctggttgcactcctgtctgggacgagtatttccgggctaatgaaaaggcgtacaacctgcttactctgcccaaatacgcctggaacgatgtcaactactggatccaatatatcggcacatggacgttggataaggctcatctgaagtatactggaacaaatggaccaccgcaggttaagccgtcgtcttcggcattgcgcacatctctgatccacgaaatcatcgaagagaccattggcgaagaaacggccacgctcaaaaccgtctctgacttgcaacacccggaattcctcgaggctgttcatggtcatcggatgaataattgtggcgtagcaacatcagtaggttcagctgttttatccttttagttaagtaaactaacgatagccctcagtcaatctggaccgacatgtcgttgacggttggcgaatatctgtataacaaactagcacccggatcaaaggtacacatgaatgtgggcgagcttgaggtcttgcacgcaactgtggccaatcctgccaaaaactgcacccagaacctgtaccttgacgcccatctagacttacgcacgcagaagatgtcacttgcctggtttaatgtcgatcctgcaactgggagcaaggcagccgaatcttatgctactggatctgtgcgtttcgaggctgatgcggagaagtggaagtctgaatgggagcgtctgacacacttggtgctcggccgaatcgagacattagagagcatggccaaggacggacaagcaagccagttgtccaaggcgttatcctatgccctattcaagaacgtggttgattacgctgaccattatcgcggcatggaacgggtggtaatgcacgactatgaagcgttctgcgatatcaagctcacgccagaacgccgaggtatgttccatacgccgccgcactggatcgatagtgtttcccatcttgctggtcttatcatgaacgggagcgatgcctccaacacccgcgattacttcttcgtcacaccaggctatgagagtttccgtttgctggcaaaactggaccctgacgtcaagtatcagagctatgtgcgcatgttcccactgccagaggccaacatgtacggaggcgatttgtacattttgcaggataatcagatcattggcatggttggtcatttcaagttcagacgagtaccacgcctgctcatggatcgattcttttcggctgaagcagcctacacacaatcaatggcggcttttgggtcgtctgagcctacaactgcaaccaaacatgccatgatgtcggtctccaaaccggacacggcgccagctgaaccgacaccgttgtggctgtccacagtgtaagcgcacaatgccaacacccctcaacaagtaacgccgtcgaaacccgcaatgaacggcgtgaaaacgcctgaagaggagaagcccggcaaagcagatgccgaaggtccgaacggaacgacctctcaaccagaagcgaccggcgtagttggccaatgcctgcaattgatcgctaacgagacaggacaaagcgtgaatgagttgacaccggatgccacttttgtgcagctaggagttgactcgctcatgtcacttgtgctctcagagaaattccgggccgagcttggtttggaggtcaagagctcgcttttcctagagtgcccgacagttggagatatgatggactggttagagcagtactgttagagaaagatgcttggaaatcagtatagctttctgtagtttcaatgaagaatgagtattagaatgatctccatacgcttcagctaccaatttagcccattatcaattcatttcgatggttccccgcgtggaatttggaagagagaaatcaataaactctctggaactctggtgttatggtatacagagtgctcgactcggcatcattggctttcaagggttcgtctctgtcgagattgattggatctcattccgtagacatgcaacgtcggctaggaattgttcgaccatcctatatcttgtcattccttccccgggtgaaaagacaggatcataaggaacgagacgttcatcatgcatgatgttgggtctgcagacggagagtcttcaagaatcattgtcc

SEQ ID NO: 4187 - DNA, 6961 bp, Emericella nidulans
aggtcctttctctccttgatgtgcttctcttctaattccttcatcctccaccccaccatttatctttctccagagtccagacacgtgaggtatatgatgcacaaatgcccaactgccatgtacccgagtttggaggcgacgaattaccatgaatgccagcctgtgactcgatcaaaccacttccaaccaaccagcctgatcttcgtcatcaggttgttctttagaaactctagaacttgtccagcaagctgccgcggcgggtctagtcttactcaattttttttttccctctcgcgtcgagtctttcatcacgctgagcggaaacgcccctgatttatgcgagacacttcagctcaggcgacataaaacaggccctagtcgcttacggtctcatgcagagcggcatggctccctggcatttggggtcaagggctgagggattcggaatggttttgagctgcttgctgtgagctggcacggttttcgggtcgcctcgaccttgcaaatgaccgtgagtggccggatgcccattatcaacatcaaaccgcttttgggcaactaaatcacccctccttcatggcccctccatggctgggtaccgagcattgtcacctctcttctgttcagccgttcttgcttacaagctcatggccacgtcctccatgaggcggcctaaggctgttcatacccgatgccacctccgtgctcgcggattgttagtggctgctggagtcacaatgatgcgagcaattaaattaaagtgctggaatttcaacgcgatcattcgtcccaagccggccccttctcctttgctgtacaacaacgtcattcgtgttggcgccctattcactggcaactcaatggatctccctagccttagccggggctagtggtcctcagtcctcccttacctagattccggcgtttcttcaagccatattctttgtcggctgcatcggcccgttcccgttgcagcctcaaggcgatgatccgcaggttctcgtccctcgagtggagagtagtggagggggtttagccttaccttgaccagcgtagcatgcataaatatatctgctaggttctggtgattaaattccgtgttgtcatgccaaagggcaagaaaaaccgacaacttgcctgcactacgctattttaaaaagcggcccacactcttacctataactccttcctctcttccgtctgctacgtctaaacaccaactacggctacctataaagcaagcactatcgttcatcatgtctgatccaagactcgacatcaaatatgactggcggttgagacttgaaagtatgccccactttccagctattcttttggtggaaaaagttgtgacgtttaaacgtttcgtttcctataccttcttcccacatgcttccgcggcgatttaattattcgatgtgctaatacaaggcctcatagtgtactgcaagaaggtgggctttggagatcccgtttaccatacgtactccgaccgtcgaggtaagaacatgatgctcaaatttttcctgtcttctttctattcttgatgctccaaagtctcagcgccgtgcttgccggatttcgctctcccgcttcatgtctttgtgggaagatggagtgggtacattcaaacgagatcaggcctacattctctctgaatatgcagtgattttgtctcagcggaagagtggagtcttttgtcccctcaccgacttttatactgggccgtcaaatttttcttcgttatcatgctaacggcggttgtctcctcttaggaggtcgcacagcgtggtcctgtaatgtcactgtccacaaaagtaacctatgccgcccgatattggttcgatggttcctgtttacaaaacgccaatgaagatgctgcggaggtggctctgaagaagttggaaccgtccgaccagtatccgagcagagagccgcagggaactgtttagatgggtgcatgagctttgtgcgctgtacaattggcgttcttctcttctctcttttcttcaactccaccctcgtgaggagttcagtttccgactttttttgtctgaactttgccttccaacttgacaactcgacattcatgcgacttgctccggattgacgccgatctcgcagacatgtacaacattaccggctgtcgacattattgccaatttattttttcacgatgcacgaacaattggttacaaaaggatggacttatactgggtacacattcggcaggacagaatgcgagcctttaccttttacgattattattattgaagacttgacagttcttgaggctttcttctggttggagtttcatgagaactggtctgaacagcgtgtcctgtggacggagtgcgtttaatgtttctactctatttccttcccaatggcaagccggtgcgacagaacggaccccgcggcatgaaactttgaccatttatttttaatatttatggcacggatcttatcttatacggtgctttgggatactttagagttgggtctgacgaggcaacatatgatctgtcgcaagaacgcaaagcaagccagacttctttatcacgcgtgaataattgtgacttattatcctgacgaagtcatttttcagtgccacaatctagccagtaggagggacaaggatacccctaccaggtgttgaggtagattgaaatgcacattgctctttacaagaacaaatctggccgatcaaatacctaaaaagttaagcctgtcgaaggtggataccggccacaaaaggggcacttggtagtatagtgacttctgagttttatctaatcggtagcgtaaatctgttctatgggagaaccgaattgcatgtactaattacctattcaacagtcctcaacagtacaacagtaagcgcaaaccttcaaaacaagttatactcacgctcctagatctggatcttgaaacgtctgagcttaccgcaaccttatttccccagcttatctcacgtgctgagcccgttccatggttcagctaccgaacaagcggtttcctaacccttttagtcggatgtttccgtcaactcatggcgcttcgactgccgtccatggtcgacgacaaccaacagcctcctccttttccgctgcgggtcctaccgcaccaagaccgcatccctggggaagaaagatgtcgagggtaaggttggatccgcatgttggctggtctacttttcggactcagcctgcaataaggtgatcatgacctgtaccattgtgtaatggagtcgcctattcccgcgatagcaatttgaggtccgttcagcttgtttcagctgcaatgtggactctggacgaagagaacctggcagcgcgcccatgccataaatttgaccagatgaatatacggtcgaagtatgcaaggtcctgaaattccaatctcaccgaagacagcttcttcacgccctctggtgttctgacctccgcacccttttttccggtattatagtttggattgcagtttcgaacatcgattgagtagctggaaggaggtaaacgtggaattgccgggttgtattggacatatcgtggacatagccgatatgacggtcccttctacgggtaccttgcaggccattaaaatagtatctgctatcgcttgattcagcgattattgcggctcacagccttaatcgacttggggacaatataccgttcgggtgctagagcgtccaagtcacctaactcgcacatatgtttctgggagaaagataatgatgacctacacggtagataagttagcatttgacatgggcacaatgaagtgaaggtagcttcgctgtcacgtactcaccaagatagaacttggactcttgagtaccaggctggagagcgttaagtagctccatttaccttcggttctgctggccgtctacaatgtcgaatagaaagtaagagtggaagtgaataagactgagagccagacaatgctttactcattgtactgtgaataggttgaccgtgaacaggggatgagtagatagtcacactactgaggggaaggtacagccatgtgcttgttgacaaagatttttttcgatcgtccactttcttccccctgccacccctcctttctcaccctccgtctaattccatgacacctctccattcttcaacctcaaccatatcacctctcttagtaccgctgaactgatctcgaaccgggctttaaagcacaactgggacatctctgtgcctccaacaagctagtctccatcctcccataaacctgattctacgaccacttccgaataccgtcgttcgccatagccatccaggttccgagcctcattgaaaataatgataggcttctacactgcagcaaacttatagtctcctttcacttgcaatggcgagcaccaatgtcgagaattccaatctgggcccatcgtggacttaggacgccgaatgccccttttgtcgtgatgctctgcaacaatcatcatattcaattattccaaacccgtgaatttagggcagtgtctgaaggcgggatgtgacaagtgtgggcacttggattattatgtgcagaataacgactctggtgcactgatcggagcttctggctctagcctggtactcaacgttgccctaaacgtggacggggtcttcaacatgattttaatcccacagccgacaagtctagcaataggatggtaggttcccaagatcctggcttaccacgagatactgacacctgagataagaaccggtattgtccggcagcaaaagttagcagagagccgcctagaggcttattcccttcgcttatcgtaaacccgattcaagacatccgacagtattgaatgaggacgcacagtataccatcagctccacctacaccaacaagccattatcaatctcatcaggacagcagccggtaataatcaaaagtcagcattgatttcgaaacggagccagcagccgacaatgcgccaaaactagcagcagagcattgatgggacctgcaaccagtcaagagtcaaacgtctaagatgacggtttctttgatgttctgccctggtattcctccaaaatgaagatggggttgcaattttctctccccctattatgctttgagaaaagaagagacaagaaaaaagcgcagaatgcatgtcgtgagtggatcataatgtggcatttttggtcgtcttgaagcacattacgcccctcgcacattgttttcgcgtcaaggaaggctcgactctcgatatcaccttcgctgcttataatttctacaccgaagataaaatattgaggcgtattagtcccaggtattttctaaatttgttacagccaccccttttcctaatcaaagcaagtctattcgctgattctagcctttcgtcacggtgtcggaggttctcggtttcacacgcgcgattacgtccagagccccttacaaggaagtgcaagttagattgacgcggtcaacataacaaccggcttgaagccgggtgcagagtttatagacccagggtttacggtcatactgaactagagccagggcttatggacattctggatacagtcagtgccaatcaatatggatatacaactttcaagcagtctcgtctaacgcaatctcactttcgaccaaccaaaaggcgtgcctacagttgtgaacctccttgacatccggcgatatgattcctatccatgtggacactggcacgggcgtcagagaacgtcagatttcttcagaataagtgtctagtccggatccaccacttatgcaattttctcaattacggcgagtgaggagaaggtgctgtgatcatcgtcacatggagtaccgggtgagccgttctactatgcctttagtttgccttgggttagagtcgcccagatctcttgagccaacgttgagaactgtattcaggtcttgctataattgatcgcagtaagctaaccgtccaaattgattatgttatagtaagattattttaagtacttaatgtcaggcataaaccgccgtcccaccatcttcattcacatcgacgcagtagattaacaaatcgacaaaccagccaatacaactcaataagcgaacctctggccactcccaccagcctttagtctcttatttctccacccgtaatacaccctcaatgccaaacagcccaccgtaacaagcagtaacagcgccgcatttgtccagtgacctgtcggatatcccctcttcgcctcattagatttatagatccatacgcctacaatctgtcctggcgcgccaaatgacacgttcaaagcgatagcgagacccgttccggctgtggatcggatgttggatgagagccagcccaaaagtggcgggatgcaggcaaatgagccgcttgttgcaacgattaagcagccgtagcggtgctgatatgttgttagtcccatttactataattgttgcagggttatcggtggagggaccctacaaggtatgcgtctgcggggagaacagcggaggccagaaaacccattgcgccgacgaaggagaagactgcggagtggaggccgcggctgaggttttaagttagttttgcaatgtccttaccaaggatatacgagggtacctattaaagtgatctgcagaccaagcaacagctgttgtgacgacataagctaccgcccaaggaggtaccgtcataagctgcgcgttcagactagtatagcccagaccgctagtaattgccggggtaaaaagcgagagactcgagaagggagcagatatgccgaagtagacctgtgcacagagttaagaagctttcccctttaaaacacggcatggccggtatcactgaccacgtagtgagcgtataaacgccagtcgagtaaaatctctttagcgtcctgccatgtcattgcttttgcgccacctttggatccctcgaccgcgagccgctgcgccgcaagtgccttttcctcttccgacaaccagacttgcg

SEQ ID NO: 4188 - DNA, 2188 bp, Emericella nidulans
acatacatttgggtatccacagaaaaagtgtctacacacatactagctatggaacagaagccgaatcagagacgtacagcagattccggccatgctgacttataccagaaattccatctggggaccctccggtgagattggagcctagtgacggtagtgagccctgcacttgcctttcttcctgttgggtcgagccgtgacggttgcgctctcgccggttgcggtggagacaggaagctcagtagcgctgacggcgtcaatggaagtgggcacagcggtggtctcggtggtctcgggggttttagaggcgggctgggtagcaacctcagagttggtctgggagacggcctgcgtttccgcgctcacggaggtggacagggagacagagcctgtggaggaagcagttgcggacgcagtcgtgatggcagaggaggtcgcggagccaggcgcagaggtacttgcggatgccgaagagccagaagagctggagccagacccggacagagagatacaagcaaaagagatcttttccgtggtcgtggtgctagaggtatcccactcattcacagtcccatccagatcccactccatgttcacatacggccagcagatcttgctgccaatattgaccatatcaccggcaacatagacatcagaagacttgatggcagaccccacagtcgcaccagtcttgtcaacatgctggaagtaagtgcccgcgaacgtaccgcggcatcccatggcgacgaactcgtcgcagatggggctggaaatctcttcccacgtaagcagggcattttcagatccgaaggcagcggcgtggacgttcgtgtggtccgcgtcgccagtggtgatccagttgatctggctatcggcgtcttcggtgccaatgacagaggtggcctcctcgccgacaagggtgtttttgtcggagaagatggcaatggcgacgttgcggtttaggttgcgagggagaacatgcgtgtagccttcacccatccactcgttctcggtgacatcaatagcaccgcgagaaggccaggcgaagatgtaccgcgaagtcgtgtcgagcttaacgagctggctgtagctgccgctcataccacccatgggctctcccgaggcaccattcgtcgtgttctcattcgagatcttcacgccgacagttgtcataccctggccattcgtattcagccagattgcaccctgatcctctgcgcaaatactagcaaagggagcttcagaagctgcttcgaatgcaatacccgtattgtggctgcagccccacgtgctggttgcaccagagatggtctgaagctcgccgctgtcattaacgtactggatagcatcgccgtagtggccggacgcagagcccgagtaagcggtgacaacgaagtaggcgccgtacaggccagcttcggacgagtaaacgagatcaccgttgaggtcgggggaagcaaggtagccctggctggactcgacttcagggccgcctagccaggtcttccaggtttgttcgccgtttttgtgtaacccgtgtaccggtaagaccggataccatagggagcacaatgtagtgccactagggcaaagccaaagcgaggaagttgccgtggagataaaagcaaacgctaccgttcataatcgcgagatagggactgacgaaagcgtcctttttgaggacacacgcaccccacacgcaccccaggcgccttcgacaatgaacattgctatccgtccgaatgcgcctcaagaccttccagttctgctcagtagggtgagcaagctcggtgcatcatacgcacagaacgaggacgaggatattcgagccgaatacctggatgcgggcccgccgtctcgtctattctctcgagactcctcgtgaagctatgaacagatactgctggtctcaggttcgctccccgcaacagcggagaatgcatttaatgtacgcagagcacactacgctgcgattgagacctgtgtcgacctcggcgtcttcgtttcgttgtcgaaagatgatactcccaaaacagtggctgagctcgccaaagctacccatgctgatcctttgcttctctgtatgctgctcccccaaagggttctactcttctctcccatctggcatgctgacaagccagcccgcctcctcaagcatttatccaccatggggtgtcatcatcgaaac

SEQ ID NO: 4189 - DNA, 3626 bp, Emericella nidulans
cggatccgaggttatcatgtgatattagtaagtgagagtatgtggtcagagatgaacaaagtgccgctggcgttgtctgctcagctgaacaaagtgaaatcgtgttcagtgcagaagtaggtgattcaaaaagacgcctctttgaggctcgaagttccaagtctgggctgtcacgtgaacacatacgctaagctatatttagagaggcccggtcacgaagtatatgggaagcggacgagaactcaccgaagcctcagctatggcacgcgtctcctgaatagtacaagtatgaggaagaagaaccaagcactcgtgtaccagaagggtgtcattacagtagtaaggacagctctaggtggcagaaggagcaaaaaaaggatctgaaatactgagaagcgtcctacacaagacagataaggccattttgttgtttcagtcttaataggatgacaactagactgaaaaatgctgccctgatgcaactgcaattgggaaaatgaattgtgattgatgagctagttgaatgtcacgtgatgatctcaaacaatgaacccagcggcagagctacctgaacttgggatgaatcaaccacaattgcatcgcgacaatcctggctgtaggttggaattttcaaagcagctgattgctgcgaccatccaacagccaatatggctgccgctacaattgaaataccgttcttgtcgtcacattacgcgatcgcagagtcgactctgagcaccctcactgaagctcccacggtcgaactcgtcaaccaactactggaagctatcacgaagaaggcgcgagagactgatgaactaaagtcggataagcttcgacttgaagtcgagcttgagaatgcggttcgcagcagcgagaccaagattaaggtgctgaaaggttcggtcgagaagggccatgcggaggttgaggaaacaaggaagaaacttcacgaatcaggtactcatcttgctgctgaattcgcccgagttatactgaccattcagaaactgtccgatcatccttagaatctgaaatcgccgcgctaaagtcatcgtccacatcaaacgattccgaactcagctcactcaaatcccgtataacctccctcgaagcatcaaatcgcgacactctagcgttacttgaatctaaatcggctgcttatgacaagctcgcggaagaactatctacacaacacaaaaagacaattgagttacgacgtgagctttccactgccgagcagaatctccaggctgcaaactctgcttccgctagtgcgaacttcgcgaacaaagtctccagaacgagctggagctgacaaagaagaataatgagtggtttgagacagagctaaaaaccaagtccgcggagtacctcaagttccgcaaggaaaaaagtgctcgaatcgcagaacttcagcgcgaaaacgaagaggcaattgcgactaccgagtctctgaggcgtagcgaaaatgcgctcaagagccgcctggatgaagttgaacagcgctatgaagaatcgctctctagtatccagcagctcaaggaagaagcgatccaagctgccgagtcattccggatagagctggacagcgcaaatcgtctagcggagctgcaagaaaatgccgcaaagacagctaagaaccgtgtgcaagaatgccagttggcgctggagaaagtgagggatgatgcgccggaagagatttcgcgtctgcgtgtagaaatcaagcctgagcacagtgataagtaggctgcggagagtcgtgttgccgagctcgagctcaccatcaatcaactcgaaacggagggcgcagctggaaggagatccatgagccctgcccgtggattgaatggcgctccaggaacaccagtacgccccagtactccgctcggcacattttctccccggacatcgcgatcaaagggtagtttgactcttacgcaaatgtatacagagtacgacaagatgcggacaatgcttgctgctgagcagaagactaaccaggaactccgatccactttggacgaaatggttcaagatctggaagctagcaaacctgagatcgatgagcttcgcgaagaccacgcccgtttggagaatgcggtcgttgagatgtctaatattctagatactgctggcaaagaacgggatgaggctacgaaagagagcaggaaatggcaaggccaggtggagggattagcacgagagggtgatattttgcgccagcaactgagagatctgagttcccaaatcaaggttctcgtgctggaagtcactctcttgaaggagggtgaagcaaactatgaccgtgaagaacttgaaaaggtcgcccgcagagaaatcgaagactcttcggccgacctcacccctactggccgattcattagccagaacctaaccacgttcaaagatctgcacgagcttcaggagcagaatgtcactcttcgtcgcatgttgagagagctaggagataagatggaaggcgcagaagcacgggagagggatgttactcggcagcaggaacaggaggaactaaaggagttgaggatcagggtgcagacataccgggacgaaattgcaaacctcattgctcagactaagagctatgttaaggagcgtgacacattccgcagcatgctgactcgcagaagacaaacggttggcggcgatgctgtattttcacagtctcttcctcttggtgccgctccaccggcgtctgaaaactcaacgggcgtccctgactacgccgaactgttgcggaaggttcaagcacactttgatagcttcagggaggaaacagctacagaccatgcggctctaaagcaacaagtcaacgaactttcgcgcaagaatagtgaattgatgagtgaggcgagccgttcaaacagtcaacttgttgctgcaacccaacgtgcggagcttcttcagagcaacttcaatatgctcaagaccgagaacgcagaattgcagaaacgttacgctgcgctgttcgagaccgccaaccgacaggatcttaggactcagcaagccgcagaagatcttgtcgagtcgaaaggccttattgacagcctccagcgtgagagcgcgaacttaaaggccgaaaaaactctctggaagaatatcgagaaacgactcattgaggacaatgagaccctacggaatgagcgtagccgtcttgactcgcttaatgcaaatctgcagaacattcttaatgagcgggaacacgcagactctgagagtcgcaggaggcttcaacagagcgttgaatctctcgaatcagaattgcagacaacgaagagagagctgaacgagcagattgaggagtctaagaaagccactttacgacgcgagtacgagcatgagcagaaccagaagcgtatcgacgacttagtgactagcctaagctccacgaaggaagagttggttgcggtcaagacaaccagagatcatctacagtctcgcgttgatgaactcactgtcgagcttcggagtgcagaggaacggcttcaggtcctgcagtctcggcccagtgtttctggcgctcccgctgaaaccgctcctcctgaagggtcacaagagtccggcttgaccagagagcaagaactcagcattgaagtgtctgagtt

SEQ ID NO: 4190 - DNA, 7334 bp, Emericella nidulans
  unsure (1)..(7334): unsure at all n locations
cactttctgaccgggcttcatgatcctcgcagtactcgtatcccacaaggccaccgaaagattcaaccctagcatcaaaaaagacaacgccttccaccgcgatggactctcggatcaaatttgctgctcgggaaaatatttcctgcaaggaaccttgaatgccgtcatcgtcgggtagactgtccccagaaggttcgcttcggcagatggcccgcctttgcaaatgtgaattttgcctcttgtgcgtgccaggtcttgcgtccgtttcgtcatcatcggcgccaggagaagaatcttttcgagccggacgatgaggaggttgtttccgggtattgtctcgcgcttcctgcagatcctgctgtcgtttatccaacaagccttcaatagtctcgtcaccgtgtctacctcgcgcagcatcctgctcgttcgactcaagccatgaatctcggagcgtcgatttcccctccacaaagctacccagaccagtgatcatcttccgtgcttgaatattctcatgctcgagatgcatcatgtctaagtatctcattatggtcgctgccatgtctttcatgaagtttattgttgattcatccacccctgatggccttggctgcgagtctaagacgccatatgaccctatcacttgccctcttggactaattattggcacaccagcatagaaccgggcggcatatagttgcttgggcaccgcgtatcgctccttattttcaccctgcaagtccggaataatcaaggccccatgactaacagtcgtattatccggaagattggaaggcgtggttgtcagttccgtgcagatgctattctctttgggtagaacacaacatcctagccgtagttcgtcgtcaggcgagcctgtagcttcggccagaatatactggttcgtagggccgaagagcgagatgattgcccgctgggcaccaagtctcatggctcccagctgggcaaacgaggtcaaggcatggtcttgcgaagatgctggcgagaacgttttccggctagagtcgtcgaagggagcaaatgggtaagagctatgatcacgtggtaggtaccttgcacaggtcggttagcaggaaccgaacgaccgcgaggctaagccaacctatagaattcgcgctcttttgctagattgaagggataactgtctggatccattgtaaggcatagtattgccagttcgttcggaaatgctctctccaggggggttaggctctactgtttctttaaagtgagcgtaaatcccagaacaatgatatcatacgatttccgcctacgtcatccctccgctgtaccatatggacctgcattagccctccctggatccagaccatgggctacagtgcaaataccgcgcttgaacgccgctgatgaaacggcccgctggtcatgtccgatctggggccatcaggacctctcgggcccgggatttcgaagtgtactcaagagtagatcaaacaaagttcatttgtaccatatcaacaagtgcaattttattacactaacagtccacaattaagcacatatggaatgggaagcatcaagagaaacgccattcatatcccgccgatccaagcgcccgagaatcaacctgaacaaaaaccgcaggcaccaaacataccgccaaataacatgtacatgaaacagcctggacagagctgaactgtacgatataaacctatctgaataaagagaaacttgtcaaccgtatgctaatattgaaaagctcgtaaatgcaatcattatgtgaaggcttaggaccgattcttcggctgggccagcatgttcaagcgactcatgctgagcgcacggttcctggaacgcgcacttgcgggcgtttcccttgcggatggccccagagccaagacgggaaggagtctgtgaacgggatttaagcgggcttaacgcctggatattggaaggctgaggcgtattgatcttgacccgcttcacgcttcgtcctgggctatggtcggctggagggacattttcgcggtcgggctcatcctcagctgcccggtgtctctttttgtggctgaggccatgcggcattcccggaacttcaggcaaggtggcctcaacagggacatcagagggacgaactgaacggatagtagctgacttttgcgcgttacgatccggagtcaagacaggaagggtagggtagacgacgtcatatgtcgaagggtaagtaattgtggccggtttcttgaagggcgatggtgaaatcacttcctcagcaagctgagtcttggtacaaggtgtgaactcgacccgctttttgggagaaggggtaggcgccgctccgggggagctttcacgggacggttgaagcaaaaggtcgggcgtaaagtcttgagctgctcggtgtgtcccagcggcaatcttagaggggtccttggagaacaaaggctgatggggccgtagaattgacttgagactgctcagtgtgggaatgttgctcttaaagcgcgggttgaattcggtgcgaggggtatttggtgcctcggcaggtttggaaagaggagaacgcgcgagggagggaatcatgctggtgcgagggggtttcaggctgccagattgacgagccagggaggcgcgtgttggtgtcaacaatgagctgcgaatactggacctgggccgtgcaatcgcggacttgggtaggcggctttgaggtgtgactgcagctctatcctgcttggtacgtttcgcagacggcgtagaaggagctgaggccttaagcgtggtagccgcaggggacttttggctctcaggttcgtccaggcgggctttcgaactggtcctcttaagtgtcttttgaacaggctggaaccgccctggcgtagctcggaacgcggaggcgtggccagcaatggaatccattttcttgaattcggccatatgaacgtctgaaaaccgaccggcctttcctttcggcttagcgatcttgcgttcacttgtttgtggcgcgtcaccggntgcattcgccttctcattgaccatattagccttgatccgagccacgtccngtggtacgctctccatgagcttcttcgcctcgtgctaagctccgtgtcctgggcagagaacttgaattcgaacgctggagtgccgtagaatgtcgacgcaggagaggcatttgttttgctaggtgtgctctgcgcggggtcatctttcaccacgttgccatgggcgtccttcttgatgggattgaagccaagaatcaagcccgagtccgcctgtttagtagtgctttggtgtaccttgctgggatgcatctcgaagtgggtaggacgcgtaagagaagtgactggtgttttcgccggcgattttttcaactttcctttaggagtgtgtgcgacttttgccggtgtggactggggtttaggagactcaacaggctcttcacgctccattacagcatccaacttattttcggatctatcgttgttcgaattgttttggttcaactccgcgggagtatcctgcccagagagcgagggtcagtgacttcaccaagcaagggcgtcaggagcgtcagaaggaatgagtacctgggcgggcgactggcggctcctaagacgagccgagcggcgaaccgccattatgagaaattactgctatatcaggctaaacaaatcgaaatgagcaaatttgaggggttttgagggtttgagcacgagtattgcgatcgaatggtggtgtgagtggtgttgagtgggagttgttgagacgaactaacggtgtaaataaaatgtcggaatcggtaggcggtgagctgacgtcatggtccacgcttgtttacatcatgccctttttggacgcgttttcctttcgtgtatactcgcggtacggcgtcgtttctgttcttttccttttatcgttggttaaataaaacagtgatattgacctgtcaatatatgagcatctgctagagtgcgacatccccgcccggttgccggttgaacaagtggaaactcggtccgtgctattcggtagctactacgaacgttatagctactctccaggtatcttataccattcccaaaagatgtgatcctagtcagtgcattaatatataatactatgtaaagagctcttttatttacctgtcgttgttggcctattagagatatttgatatcgcttttcaatacatctttactaggagtacggatttgccgttgagatgatgcacagcccaggcaaggggcgccactaccagcgttgcgggatcgaacttttatggctcgatgattaaatatggtggttcagaagtcctggtatgggaatgcatgccacaaaatggataggatgatccgactagcttcgactactgctcaagctttaatcgctccagctcctcaatctcctccttccccagcagacccaacgcctctctgcggctcttagccttggggtcaaaaaacggcttctcagctagtgcagtaacccgcgtgccatgccgtggctcagaaccttcataatcccagctagcgttgtgtatagtgatcctaggaagtcagcaatgccagtgcaggtggagccagccaaaacataccgattatcccatagtgcactactacgaggagtccacttgaacctcacctggatatcaacattcttctcaaacacatcatataaatatcccagaattaggtcgctttcagccttgtcgagcccaacgatgcgaaccgtcatggctcgattaacccacagtgccttccaaccagttgctggatggacgcgcacaagtggatgttcacgctcaacatacttaggcccagcttcagggtcattacggtcaaggtacggatgagcggagcggtagacggctgtccgcccatcgatgatcttgcggaacgcaggggagagcttctcgtaagcagcgtaaccgctggcccagagggtatcacccccaatggatggaaccgtatcattatgaaggtgtgtcacgccggctggctgccgctcatggacaagatctgtgtgccatcgagaggcgcctcccggacgacgaaaactggctggtatttcggttgcctgcagagcaggccacatgaccgtcacaccaggaacaccggggacttgagcggcttgaggctgttgtagtcagtaacttctttgctttttcgtaatgggaatgatacatgaacttcaatctcgccgtaccactcgccgagtttcttctgctcctgcggtgagatgtcctgatcgcggaagaacacgacgctgcgttcggcaatcagcaggcccagctcatctttctgctggtcagtcaagtctttcagctgcagccctacgatctcggtccctatgtgctttgtcaagtggaccacttccttcgcagcggaaagaagggctttcttctccggatcggcacgagtaccgggatcaatgtgttggcggtcatagtcgcggatccggtaaacatcgtctaagtagagaggacgagaagggcgatagggatatccattcgagaggtcaactgtgcccttttcgagtctctcgcgggccgtggccggaagaccgagggtgtcctttcgcggctcggcaacattaatgatgctcgggtcgattggggctggggccattttaacgatctttgcttggtccagtataatatcactatcgttgttcgataatatcaacacatttcaaagtggatcgggagagcagcgaacttatctgttcagggatggatgttcgtgatgtgcatacccaatcttgaaaggacgctatcgcaccatcgttgcatatcattgcgcattgccacgagcttgtctctagatggtccgatcccctcttctcctctttgtctctgtgattctgtccattcatttttgttgttggagatactcccattccgtcttgcagggatactatcacgcattcttctgggatttctaatcgcctactcagcgacgaaggattcacaagagctatgccatcatacgagacatagttcaaagctagatagactgcacttatgacaccatcttagagccgatagcgttaccctgcttctagtcacccacagatcgcgcatcacgaatggtacttgatataacgcaagtgcaggctcggctcgctgaccattgctgcggagagcaagagcagacagcatgacgcgcccgcaaattcgacgagttgcagtcattggagctgggattagtggtgttgtgtcagctgcacacttaatccaggctggattggatgtgactgtttatgaaaggtctcatgcggctggcggcgtttggtatgtcaactcatatatatcatttcagtaacctaatgttgcaggttgtatgatgagcgcgtggcaccggagccatcgtatacttccttgaaaccgctcgagtcggaaaggtattttgataagaatgagcacaatatcgccctcacccatgcgccgcccgggtatgtctcttcacccgaataatagtttcgtgctgatgtggtaggccatgctatgacggactcaagaacaatgtgccgacacccttgatgcgcgtcaagcttaatgcttggccagaggggacacccgacttcgtcagtcattccgtgatgaaggaatatatacaagatacctcgcggaagactggtgtcgatgatattaccatctacggcgcacgcgttaagaacctcatcaagcagggcgattcatggcaggttacctggtctaggttggagcaatatgatgacgaactcaaagaacaagagcgcaaaactgtgggtgtcgtcctgaattgattgaacaactctgacccctttcttagacattcgacgcagtagtagtcgcgtctgggcattatcatacccctcgaattccagaaacgcctggtcttgcggaagcaaaagcgcgctggccagatcgcatatatcactccaaaagataccgaaagccagagggctacgagaagaaggtacctttgcccggttcggtagttaaagcaactgctgattagtagaatgttgttctcatcggcggcgcagactatgacatagacatcgtccgtgaaattggcccgcatgcggctactatctatcagagcacgcggaatggataatttgatgtttcagccagcattctcccggaaaatggcgtccgagtcagtgaagttacgcggtacgaaattctttatgaaagttaagtctttgactggaacgcttccgttgcaaggtcattggaaataccgccagtggcctttgggactgcaccaggtgatcatttgtgcgggattccaagtcactctcccttttctggcccatttccataacgacagtcttttgttagcagaggttgactagacaatt

SEQ ID NO: 4191 - DNA, 3125 bp, Emericella nidulans
tctccgaggaaaaagccaagctatacacaacccaaaagcaatttctttacttcagcccaaatccttcactgttcagcactgcctccgagagtaatcgctcgaacttctcccgtgtcttatacctgtacaacccaagccggttaaagcatgtatgtgcggttggaaaccgcggcgagtcatctcctaaacaaatcagctggatgttcagactcgttgcccccatggccggaatgcggtcgctgctcgtgacgaatgaaaggattttgcgctgtgcttcgggatttgcccgttcaaaatactcccaaaaccatcgcaccacgggcaccgactctggctttggtgtcccccagttgagatatgtggcgaccgccctcagcgatttcacatctagctgctcatcagatccacgaaccaagagttcaatctcttcgggacggaataaggacaacgcattgccgccgcagacgctgaagaatccacgccggaagggctcgaactgccgcgccaccgcggtgtctaagtgataatgaacaaagagatcgacaaattcttgacggttcgcattttgcacccggttttttttgccgccggacaaagtggggcagagacaacctcaccataccggtcgacgtcggcaacaaaagtatggcaaaaagtttcggcgacatcaccctcgaactccaaaagtgcccgcaggcctctagcaaggacaggccgatactccgccagatcttctaggctgcacttatatgtaggacgtgtcgttaatggctgcggtccagtcgtctgcggcgctcctgccagcaactttttgaatgcgaacggcggaagggcgatgtcaagaataatcgagttatagatagccagcccaagcacaactccaactaagaagaactgctctgacgattctaagcaatatgggttgaaataacaataccgagaatcttcatcgtagatgaatagtcctagaccgcaagttagccgctgcaattatctcaagggctggacttgggacgtaccgtgatggggatcaaacacctcccggacgaggagcaggaaccactctttccgcaacccacctgcgtccacaccctcttcaccaacgaacccgatacgaagcccctttttcatttcctcagggctcgaccccagaacctcactgacacgctgcaggctggcttctaccaagcactcgcgccgtactcttagcacgaaatactggctcacggtctttcgcgtcagaatgctactgaagaacgcttctcgggctttgacctccatttggcggcgggcatcgtgttccaggatctggattttagctccaatgctgaggaagaagggatattgacaaaaagagaatttcgttgttctcgactcccaggcctcaaagtctgccaccacaagatttgaataatcaagccttgtgttataaaaggagctgattggaatgatgtgcccacggtgagctccttgctgcctggacatgactgctgattctgttcctggtggtttacgaggtatgtctgcattattcgcagtaaacagtaacgccattactcggcctgcagcccgaacctgccaatcatcactgtacgtcatgggggcatcggcctttttcttcgcctgcttgttctgattgattccattgatggccgcgtgtaactctgatggcgtattcatagcagcgctggataagctaggtattaggtagttgtcgtcattcgctgattcgctttttcttcggacatgctggcgggatagacgatatgtcacaaatctgcctacaagttcaacgagcttttcaaaatgaccaaccgagaagcgtgaaaaccatgaaacgaggtagtgatggcagtcgctcggtaggtctgacagtaagcccaatatgcgcttgattattccagggtgctgaacaggccctccgctttgcgcttttgcagtatgcgctttattacctgccgcccgcccttcagaactatttcccacagaatgtgacggcttcagctcaccatcaacaactgtaagatttgccagtgtcgaactaggcggataaatcaggggattgtatagaagtattagcaggaatctgatatcatcaggtttcttcaatggcctccgtggtcgtttgagaaggctctccgtagctttcaggagcgtcctatgaaggtgtgcgcgcgagtccgtaaactccttttcaattacactcagatctgccataagccatgcctctgccctcgcacgatcctcttcctcggagaccttcatgactgaccacttctcgacccaagttgtaccagccgttagaacgagctgataccacttatcgacatcgatccagttgatacgtgggctcctagaactgactattttcgtagttctgtgtttatgttggctatgactcggcactccagtagaatcttcgtcgaccatccaccaagaagagttctcaaccaagtctcccaccagcaaagtcttagcatcaagttcaacggctgtatctacctgtgctcttctaggatttcgctccacgtcgcgttcaggttggctgttttctggtgtggccctgggagcatgatgggctgaattgaaagacacattcaaagtgtcacagcctttgagtcctgatattatatagtcctccagttctcggaatatgtaaggatgtttctccttcccactttcacgtagtcgacttctctctctagagttaacagaattgggagcattccgactgtccttaggtggaggaacaggggggtaaggattttttgagtagctgaaattcccaagctccgtgtcaccaccatcggccttttcgcgcgtgcctgccgacgacacgctgcgaccccgtggcgcagttgggtgttggggtacagtcaggtgctcagaggctttagatgaggtctgtcggaagctttcgctcgatgtatccttcgggggcactggcggggctcctaggcattgttgtaggtaagtggtgatgcatcgatcgataatgttcttggttcgttcaactgtcaatggaattgctgagataactgtcagcttagttccacaatgagtaagacgcggctcaactgaacggcataccttttctgggaatcgtctggattggctttgcattc

SEQ ID NO: 4192 - DNA, 3318 bp, Emericella nidulans
gtcgcgggttccagttctgatggtcctcgtatagctagttggttagtgtcagccatcttgtcatgcattacgacattgtggcaggctcgagctactgggtacgatcttctctcagttgatccaccccacggcgtaattcgcgatgcgactgatccagcacatatcgttcacagtaactggcgcaggaccttactggatacattctttgataaaaataatatagttatcacagcagaaaccgctctcatggcgcagatgaagcctggatttgcagtgcaatcacgcgacggatgttcaagtttccggggtaggcacacatccgagcattggctacgccgaggtctgcggaatgagcgagcttggaatcaccgaaccaactcctaggtactcgacgtattcttctccagccagcatgtctttgctccctgagtcgggaggggcggttgagatgctatataatacgcagcttgcaggggcctgcgtgcacacattaaccggccgctaaaggcattcagtaccggatactcctgctcaggtataagtaatcatcgcatatatgttcattcaggaggccaggtcaccaataatgaagaggtaataggctcgctggttatctgctttaggcaatgcgccggcttaatgtacccaagacgaatgcctatgcaacggatagtaataagacaccagtcggaaacatcctgaagcgggaaatgaattggagatgtttcccatggagaaacaccttggaatggcaactgccttctggagtctcagggtggccgagcccgtatactgtgcggtatatatcaatgcatggagcctggagatatattatgctatcttggtcctggttcacaggggtcatagccccttgaattttgccagtggcatttgccgtgcaactcagtcgactggattctaatcgaagcagtttgcattgatcatgtgcctgctatatcatctctggagagcattccctatcgttgattgagtatgttctcaagtaatccaacaatagaccatgtaccgctctcagacgcagcagggtagctttcattacaccctcctctcgaatcaaccgtgtttttgtagatgctcgaatcaaccatcgtatgagccattcagctgcccacagaaggggatcagggcgggccttttgaggaacacatatgtgctagcctgcacaaaatttgctcaagatggccagggtggaatgaacctgtcgaataatgagactagttcaagctttcaccgtattctcaagagcagttgttgcctcggcccggtttgatatcgggttctggcgagtcaggttttgggagactgaaactaagtgggctcgttgattggaggctaatctagctgttggcaccggacgcttgtaggcatagcatcttgcttcgggcattgcgggtgaggtaatagctttttgggaattggattcgggtggcggatagtgaagagagaatggagttgctggaggaaaggtagaagaggaagggagagagaaggaggatcgtaaggagagacgtttggtgaggggactgtgtgaggcggtaaaaggatggcagagattaaaggacgcacatctgatccatcaagccttaaaactgttggctacgttgatttggatcaaagtggtgtctgaagttgattatcgttatcagctctaagtctaaaaggaatcgaggagcgaaggagcgccgctaagacgctgtaagctgtttgttatgcgggtgctcctccagttctataacacggaagtgtccataattcgtagacagaccgaaatctaatccgttcatgtgtcgccttcctggctcatgtaatgcaaatctattacaaaccaaaaccctgacatacccaatatcgaaatgctcagataatggtacccatccaagataatccaagtgcaagccggagtccagcacacagagcaatacgtcaaaaagaaaacagaagaaagtcacggctgcatcccaagcagactcatctgccgcttcatgggactatttgatccggcgtcgccgtcttcgctcggtccaaggccgctatcggtgccgttgtacccggcatcggtgtctatgtcccattcctcgtcctcgttctcatcatcggcggcatccacagaggtatcgccgctatgccagctcttctggactgccccacgtgtattccagcgaagcgcccgctggacgctctggaaccactctccattgttggcaacaacggttgggaaggggtattggctcgcctcgacggtgacatagtcaccttggcgaagttctacacggcctttgccgtcaaacgaacagtatgccgtcgacctagaccctgacgggacagcaatgcggaggagaagagaatcggagaggaccatgggacggaaagatagagtatgaggacaaatgggtgtgaggagaattccaggaatagaggggtggatgagagagccgccagcggacagtgagtaggcagtggagcctatgggagtaagtaacctggctttcaacgtaatctgaaatacataccagtcggagtggaaaagatacagccatctgcttgaacaacggtaagcagatcgttgtccgcgtacagctcaagattcgacacatatggcgacggccctcgatcgatgacaagctcgttgagcacctcaaactgctcgccttcttccaccgcaccggcttccgcgcccttactccggtcctttcggaaaactgtgcaggtgaatcgcattcgaaggttgactctcataccgacatcgcccatgactgcgttcaggtgagacttgtaattttcgaactcaaagttcgtaaggaaccccagactgcctagagaaaaacaaaggacaggcgggacgatacgttggaacagccaggacgtgaacaggacagtcccatctcctcccagcgtaacgacaaggtcgaacttctctggagatgtcaacagaggtctggagtccagtagcggatcatatgttcataagctgggttcttctgaatcaggccctgggcgtcaaatcgctttgaatgccgtagcttagcatccacgtacacatttacgccgaggtcgctcccgtaacgtggtgtagacaggagccattccgccaattcacgagtcaagtggactagactattatcacgcgcctttgtaacgatcatgacattcttgaccgcgcgctttatcggtcggcgctggagctgcttagagacctcccggactcctgttgccgtctgcaaaagacgggagtgtgacagccactcgtcatccgttatctcttcaagcaccttttgagatttacagcatgtcgtaagc

SEQ ID NO: 4193 - DNA, 3102 bp, Emericella nidulans
atctagagagaggctcttcatggttgtcgtagagctttatgaatccgcaataggatgtgcttttcttaatgtaccctcgtcctgtgtcttgctcccgtgcaaagcacaacgcattcgaaacgtccagggttggaaggtcgaccctcgcttgctggccctgctagaaattgtgcagtgtctgggcattggcggaacgttgatgtcctatctcattcaaccgcactgtgatagtactcactggttcgtatgccattcaagtgatgtatagccaagcgcaatatggcaagagaagatctcgtgagcagccaaggatggcgtctccccctagaacacgaatgccgatcaactcgctgagatacaaactactctcaagttcatgttggggttgctgggaatttgcttcaggcatgtgagaagcatgtcaccatcctcatcagcatacacttcctcgtaggggtcatagtttcgccagctgaagcggcccagctgcgtcaatcaaacttcttcatgcatcgtttttgaccaataatcatgattgaatacattctcaatcaagggtctgtattcagagggactcaatatctcctcaggaatgcatcagcctaaattccaataattccaacgaaaccagtgctaacagcaaatctaagcccaacgaagtaagctcgaaaacatacgaaagctccccaagtgtccttgtcaatatggtcaagaagacttgaaaagttgtcagtcagtcttttgtctaaaattcttgtttctctctcccattactcccctcctgtatcccacgcaatgaccttagccacagaacttctatcttcgactaggacgaaccgcggcccctaacgtctaatttacgtcagcttcattttgcgggtaagttctatcgagcttaggttttctgctctccgtttattcagctcgattcacccctgaaggggctgagcaagctctgggaactgtttacgaccagggaggtggatgacggcccattttgggaagggtagtatgttagaagccctcacctcttgagctcttccctgtagttatatataaatgagttcttagcctgaagtatacttgcctttaggtaatgcatgtaatatttcccacgccacactatacgaaccatagttctactcgattttagtactaaacgccgcgtctgatgagtttgctcactaactacagggactagttgtttcctggcacagcttatacccagtttggatgcttctcagccttgccctggtccccagcctcgcatgggttctacgcactcaatcacatactggtgggacatattacaacgtattcattgattgctggaaaatcaggtattaaaccatttctgtgcatcctgatttctacaattatcggcgctcgaccggtttgctggctataaagctctgtttcttcactgctatcagccggtctctcagttgaacatgacgacgattgctccctctttaacgtacttcataccaggacaacgacgcgaggccatgattctaaagaatatgtgctcccggttgctgtgacctacaagaatataataatcctgcttctctgttcaccatttatggccaggcttgacgctagatactgtccagacacaactcgatatcccaacccaatcctgacataacaaatgggaggcctggttttatccaccatggatgtcttcttttctggtcctactgactgagactccagaagtcaacgcgtcaatggccctttttaagtcggagagccggtttagtcagcgccataatccctaagccatcttgggggcgaagaggaaaaccaatccagaccctccatgatgcctaactccaccctctcaaccaggcttccgacgccgcaccgaagaccagatgcgaccaaagttaccttttcgaaaaccaaggtctcgtgctaaagccggaccggcgtttgtttttgttgatgccactgatggtgttgccggtgggccacacgacgaggatacgagagttcttatcagaaggcaagccgcacggtcaggtcgcaaacagctacgagcgcagagcgcaagtcaaagacatgatagtacgctagaagattcgcaggcaatggcgatacatgatgttgaacttacggacaatattcttgcagaattagacaacgatgacaggctcatcgatcactctattgccccgcagccctcgttcacgggctacgaggcgctgagggcaacgtacaactttgacatcacctatctcgcgagtttcacggatgtagacctggggaaaacagctgctctccgtctacagagtcaaccaggtctcctttcgaacttgctccagcaacgatccacgtcctttctcagctacctccctagtcgctatggctcgagccgctgtctcgatgatgctatacactgcgttgctgcaagagctggccagatgttcggttatacagacggggctgcggcaataccgagactctatggtaaagctctgaaaaatctccagcatgcgctcagcgacccgaaatcgtgtatggaggtcgatgtgtactgcgcgacgcgggctgttgacactttacgaggtagtttcaactcagtctgtccctttagcgtcggttataacaggcctttagttcatcagcccacctgaagagaatcattgggttctccataaccggggcgggattaaactgctggagttacggggccctgagaaccacaagacgaggtttgactggttacttctcaaaagtgtggcgccgtcaattgtgagttctttcgtttggttttcctcatcaaacatatgctaggcgtgaagatatagactactccaccataggcgatatttctctctgcggatatggactggtacaaactgatgctctctagctcttggacgaaatgtacagattacgaaactcgggcatattcgaagcgtcagaatggcaaaatctctttaagcacgcatcggctactgaatcagactgcgattcaagtctctggtgggagtttttcaggctgacctgccatgttacaggtgtcgtagccagtacgcgcgacgcattcacgtcgccaatgtccgagtccgagtacatatcgaggacttcgaa

SEQ ID NO: 4194 - DNA, 1930 bp, Emericella nidulans
gttgggcttttagagttttaacaatggttacaaggggggaataaagggctctctggaaacagggtaatttggaaaaatattctctctttcaataaacggtatagtatcgatccatcagacttatgcatttgaggtggtccgatgtattccaggtgacaagttcatggccgtttgcttcgagcttggctgcaagttctcgcatcgcacgttcgatgggaggatgtatctttaccaccccatcgtccagaatcaaacctattaccagtggccgggactgtatgccccggaagacgctttcattccacggcaggtttgcgcatcttggatctagatcccaggggcgagaactggttagaagccgagttatatagtatattgagttgatatcgcgggccattggcccaacggatgagggaacgtgctcttggccctccgtggagacggggacgccgcgatagggcagcctgccactctactccattgttagctgcagttgtaattggcgtgcttacgcgaaacggtagacgtacgctaggtttgaatccatacaatcccagaatgctttgcgggattcgaatactaccgccgatgtctgtaccaaaccccaagatagaaccatgcaatgcaagcagcgcagcctcgccgccagtagagccgccaggtgtgagcgcagggtcacgaggattgattgtcaaaccccatagtggattctctgtttccgcccactggttgccgtcagatttgtgagacagtatatcgccaactgaagagacataccatgatgctttgcggtaggttcgttttggccaggataatggcccccattttcttgagcatctgaaccaaaactgcatcctcagacgcgggagagaatgaccggccaacgtagccgatagtcgagtcatagcccttgacgttgaactgatccttgactgtaactggtacaccgtgcaggggtcctatgagctttcctgttgctttgaacaccttgtccagttctcgagcttgggccaaggcatcattgaatatgacctccgtaatgcaatttgtctgaaattatcgagtcagctgagaccaaaaaaactccggcatcttggtcttgacttacaagctggtgagctacagtagccctagaaccgatcagcatcaataaatcgacaatgtccgtctaacaaacttaccttctgatatacgcgaaagtgacttgctcagcagtaaagcggcctttccggagctgctctaccagggccggaatattgtcaatgtttgttatctcctgcaccagcgggtcatgttcaagacaagagcgattcgaaacagagcggacccgaggcggccggttgtcaatgtcagagacaaaatacggattgagtgcctggtcgcgcagagcacgtttctttgcgactgtctgctcccatggttgaaggctgcccatcctcgtatgagttagataatgaagagtaagttggggcacttcaacctaggagcctttcatttcttgtcgttcttatgtatctaaggaagcttgtccatctgcgaatcatgtctcaagcgattgggcgcgttttagggcgaccatattggagtcatcctaatgtgtcgccgaccaatgtcgggggtggagctgggttcgagttggagtcatctgggtcgttctccataataagtaagttacctgactagttgactaatggcgctactgcaggttgtgctgcaaaagtggcggtcatatcagaccccgatatttgagggctgtatggtattatggttaagatgtgaaaaagatttctttcataggcatcaataacctcacatcttgtttccgcctctattaattttaactgccgcgggtgcattcatagaatcatggctcctgctcacctcaaccccggccaactctataatacaaaatgtctcgtgccggagagac

SEQ ID NO: 4195 - DNA, 3588 bp, Emericella nidulans
  unsure (1)..(3588): unsure at all n locations
ggggaggcaatgtgcttacgctccggcctccagtacccgaattgtctctccgttaacataactaaacaacggactggccacagcaagctcactcctcgccgcctcctcaggactcgccggcctgcctaacggaatatccggatacgccggcttcccatccttcgcgccctccttcgccccaagctgctgcccgggtataccaagggcaaccttcgttccgtcgggcgtggtaatgaacgcccccttctccttcgcagcggtcagacgtgtctgcacgaacccgaacgcaatggtattcgagcggacgccgaattgcggaccccattcctttgcgattgtacgtgtcaggcccacaacgcccgctttggcaagggcgtagtttgcttgcccgctgcgcataattagtgtcaatcacactaacttaagaggacggcttggtggtggtggaggtggcacttacgcattcccgtgaatcccgctcgtactcgagatgttgataatcacacgtggctccccgtccttgacgcggaagtactttgctgccgcgcgaatgagtttgaacggcgctgtgttgtgcaccgcaatcatggtgtcccattgtttatctgtgatctacaccattccatttaaacacgcatcagcaacagtccgacgctttgtgaagcatgctacgagtacgagaggtgtgcttaccttgtgaataactccatcccacgtaaaacccgcattattgacgataatgtggatcttgccgttcccgaattcggcggccttttcaacaagagtcgtgatgtacttgtcgttaaggatgtcgccaacgacggcaatagcgcgattaggtgaggcggagttgatggcgttggcgacagcgttggccttttctacataatcattagcctggccatttccttgtttgtttgagatggaatggaataggaggggtgagtaccgccgtcgatatcagcaatcacgacctttgcgccctcgtttgcgaataggcgcgctgcttctgcaccaatgccttggcctgcgccggtgatgatggcgacttggtcggctaggaggccgcgcgggtagttgaggtgagcgtttagttgggagagacgggaagccattttacaatcttgttctcgaaggagatactaagagtggaggagagaaaagagcataaggttgggaagagtaaatggatatactgttccggttgttgtagttatacctcattgaggggtttgccgaggcccgtaccaagcagccgagagccgtccggttgagtggtgccgcctacctaagacaaggaagggagactacgaggtagagtcattttatgagaagtggtgtcattagattactattagcgaccgttgatggctagtaggtaggtaaattgcaaagacattctgcctcggacatcgcatgaagaaacgtatcggtcatcgcctccgatcccccaataatctgctgcagccaattccccccaggtccatcctcaaacccagccgcgcccttgagtagccccaaagtctccttacagagtaaaagacggccgcggatgaggaagcggcggacccggcgcgcctcatctgcctccatctcatactcgccgtagccaacctcgcgaggtccctccctggactgcgggaggagttcgtacgaggtccagtagtcgagtaactggagagtaaactcgagggtggacatgcaaaggatgatgcttgtgtcattggcgctatgattgtccttgtgcccacttgggcactgcaggaacccgcggcacaccgagagtgcggcctgcacaccctggagcatctgatcgaaacgcacctgtgccgggttgactaccatctggcgaagactgtcatggtaaaagactagggtctcagcacattcacatgtgggtcgcagagcacttgggacgtgcaccgcaagggggaagctggtcaggcctttcgtaatgaactctttctggaggaacgtcggcgacatcgaggccgcgcatgagctgtccgcgagagactctccgtagggcgaagggtactcgcaatcggccaaaaacagggccgcatcctgcatctcgcccattggcgtttccagcggctgttcggttggtagactctacatacgttagaaatgtaaaccatgtgaagcatagacacgagcgaacctacctcagtgtcgctgcgtgcgaaccctggacttggtatggcctcaatattcctcttgggtagtcgatcgctggaggtaaaggcactcttattctcctgcaactgtcccagtttccggagcgtcgaccgattcttgcttcccttgggtttgccagaccggttggcaactcggtaacggcacggtagtccatggcgaaggcagcggatgcacgtatccttgccagacaaattgcacttgaccttggactgcctgcagttctcgcaagcagtccggagcttcggtgtttctccattaccgggagagctggaggaggtgccagattcagtgagcatcgagaagggtaaatggtcttaactgtatgcaaggggaacggtcggcagtcagccaggaaagataaaagtacagctctaggctgtcagccatgtactccctagcgctctgattatatatacatgactgtatatatcgtcaagttcagttatagtagactgacgacttgagcacggacagaagtcagcccttgtgaaaccccaaatttcatctgatccacctcgcatggctccaaccaacagcgatctatggctaatctgcacgtctcagcagtccaactgacaccagcctccagaaacctaagcattccacgccaatcaccgtgcatgctgcctgttcctgataggaggtgaggacagccgcccaggccactccctaagcacggcaatgccaatgaataagcttaggtgcaacgtcatgtacagcaatgtacaagctgtcgggggcatctttcccagaatgtcggccatgagttccagggaaattttcctccatctctatgggtatccaataaaaaaacatccctcaaccgacgaagcatcaggagcatactcgggagcaggacagcgcaccaagtgagttgtaaccagatgcagaaggtcctccctgcttggcttgcgacaccgcacaagcagtgaaatcacaggcttcgaacagcgcacctttcttgcatcctctctcttttacagccttggctgtgtactagggttctgccgctgggtggtctccattctagggcaaactcaagtttactcgcagtcgcacagccaacctcttggttggacaaatctcgtaaggtgagcgtcagcgaagctattgtcaccgtcaccatgtatagcgcgctgagattggattatggccaacttctggtcccaaggtaacgtgttatccactcacaaatcttttttcttcctttgctcggtgatcaacacgttcttctcgaacgaatcacagcaaatcctcaaacttggcagcttccagcagtccccgtatgtctttaatcaaaagctctcagaagcncgtcagatgagccaccggggcgcaaactacaagcnccatgaagatctgtgcgacttccccaagatcgacccc

SEQ ID NO: 4196 - DNA, 1406 bp, Emericella nidulans
aaaaaaaatcttggggaggggggcccctaaagaatgcgcctttatttggagattcaagaccagcgaaggctttaaagcctcggcctttaagtccggcttgtaacggccgacgggcagtaaaaaacggtattcgttctaattaagaatcttttgcccgcccactctttagttttttggttcaaccctaggtgccaacgaaccagcaggctttgcacaatattttatcaggggttcaatttagggcagcttctattttgctggtgttttctccaaagcccagcattattgtaagatggggtttaacaaggaaaccgccctccattggcatcattgggatgggagatatgggcaagatgtacacccagcggttgagtgccgcaggatggaggtaatcatgatcactttgattctgtctgcaacgtggtttcattattccttatggtaagctcccttatttgctctgttgtctcctttcatatgatgacccgagtgcatttggctcgagcatggtctgtcagtgtagccttccgacgccattctggtgtttggtgagctggcaggccgtcgatgatgtaaaactctcgctaccttactatctttgtctgaattattcattgccatctcattacatgattcatcgttagtcggtcgtgtcttgtgctaacttgatattattaggacgactgtaattgcgctttataaagtatttgttaactaacattcgtactaattttcaaggataaatgcttgtgacaaacccgatagttttaataatttgaagcaagaatttgaagcctatgtacgtcttcgactcgcagctcatgctgtctgtccctaaactcattgtatgtatagagtggcgtaacaatatatccgaatggacatcttgtctccaggattagcgatttcatactttacagtgtagaggccggcgtcatcgataaagtggtcgcagagtatgggccctgtatgtcctgtccatagccagtcaaggctgcagctaaccgtcggaagcaacaaaggtcggcgctattgtcggtgggcaaacatcctgtaaagcccctgagctcgcagctttcgataaacatcttccgcaggatgtagaaatcatctcatgtcactcactacatggtcctcaagtgaacccgaaggccagcctttggtatgcatacgtcgttcacctttcacgaagcaagccggagtaacacagccataggttcttatacaacaccgtgcaaaagactcaagtctccggttcgttgaggaagttttgtcttgctttaactcgaagtatgtctacctcagcggcgaaatgcacgaccgcatcacagcagatacccaggccgtcacacatgcagccttcctcagcatgggaacagcatggcaggcgaacaaacaattcccgt

SEQ ID NO: 4197 - DNA, 4516 bp, Emericella nidulans
aattgcaaaactttctccacagctctctacgttaaatattttttatatagacagctggcacgcagactggatatgtacacatatagtcggagacggtggcatgccatgcccctgccctacaaatcacttgctcgtcgcaacttaatgacgatatcatgcagaaaggtttggcgcaccataaaagttactgtccaagctaacagatatctctctatgatttatagaatagtcatggcatcgtaaggcaaacaggcgacaagccttgtagcatatcgtagcaatacgagtacatatacgtacacaacatatggctctgcaggtgcagcaccaatttacccagtctacaacccaatgcattacattcaaagacggcacgagatgagcatagagattgccagagaaaagaacagagggcagcgagctttaccaaccctctacttagtatgcattccattccgatcccgcaagtaaacaaatgatactatagctgctaggtaaccttgaaggggatgtagatgccaaaaccgactggacggaacagagaactgcctgtgatggcggaagaggttattttgctcagacggacgcagacacggatataaatgtagtcgtggatgagaaaataagacaaagccagcagaaggaacaagacgaagaagcaataaataacaccgtatcacttcatctggtatctaggatgcagtcgtaaaaacaaatagatcaacaatcgcaggaatcttggaggcgaaggcgaaggcgacggctaggctagttatgcttgcaatgtgcggatgcggtacgataattgtggtgtagaaaggtgacaaagactttgttgaagagtacgaatgggcgagggaatggaatcaaccctcgccgccatcaccatccttctggtttgtcttgtcatgttctttcccagccgcatttgatacagcatccagttgcatttctcgactctctgcggcttttaccgaagagctgaggttaatggcgatccgcttcggaaccgcattcccagtgctaggtcgaccatcgccttgagcgactttattggggacggaaactgagccgacagaaccgcttcgcttcttccgtagaaatcctgcgcttccggttgagctactcgttgaacttcgtcgttttggtccagatgtgagcttgacgagctcgtcgtcgtcctcttcctcgcgccggcgcttctccgataatctctccggaggcgtttgcacaacttgtgagggtggcgtcgacggaacctctatacttggatcggccggtgcatcctcattagaggcctcagcaggttgcagttgtttttgagcggtgtctggttcgggtttcgtatccattgcattgacatcttcctcgtcgtcatctggataatcaaccagggactttacagacggagaggcggcaccattcggtacttgtgaaagtaacgttcccgaggcctgggtatcttgctgccactggactcgaaatcagcctaattgtcagattccacaacaaagctgatgcttacctcctcctcgtcgtccgacgtgttgaagtactcctcttcagcagggtccatttcctttacgccttgccagcgtccagtaggttgcatcttcaaaccaggtgtagactcctcttgagagtatagcgttgaatctccttcctcgctgtagccctggagttgttagccctcaagtatcaacccctggaatgtgtcgaaaaaagtgatattccgcagcttgtcgccatattttccgaccacatggagagttattggtttgatatgttcccgcttgatgaattcgaaaagttcaaggcaggcggagttgagcaggttatcgcggggcatggtctcgtaaacaatgtcaagtatgagcccgaaggtatcattgtgcgtcatcaaagcttgataaaaggtatcttggaggcttagaagggtcctgaagaatttcaaggcggctagagaacacttagtaccatcttcgagagcttatggagtaaacatacttagtttaaggtgcttttgcggtactcggagaagttgagttatgtgggctgcgagccgctcattctgaatgacgttacggcatcggtaaaggtgttggcggacgaagaaggtgaggatatcaacaagatgagagtataaagctacagcttggaaggtcaaaccgtgcgctggatacctgtcagttgccaatgcagatcagccaagcgccaagaacttacgactagattgatcttcaagtcgttttagcggcgcaaacagcctccttgaagattcctcgaagtggttctggacaaaggcgtcggaaagtatattgggccgcactttggcggcctcgggaccagcccgagccatcgcagcctggatgggaacctgtgggtctaataagaccttgatcgcatctgcaagttggttcttcacaccgagatccgtctctgtatgaagcaagtcgattagcgtgtcggtaaggggcgtcttcttttcattgacggccttgagcatataactgcgcatcattatggggtcgtggtcaaggagcgcaactaaaatgtcaattcccgtagtccgaatagccgggtttgggtgcttaatggcgaaggcgatcacagcaaaaaggccgtggctgatgaggtttgcgaatagggtggcacgctccggaacctgtaagtttttcgcgattgacgcgcattggtgaaggaactggacggcgtcctctttgcgctttgcatctgcgcttctcggatcaaagaccgaaaatagctcctttagaaaggcgccatccgactgaatgtggttcacaatgtcgacctggttgtaaaagatcatagagttcaagacggaaaaggtaggatcgtcgaggattcgggcgagtacaacgtctttcagatattgcaaccgccaagtgtagcggatcttgcgtcgaattgtctcgtccctgataggaacgacttctttgtagcgcgactcgtcggacaggtattggcgatggttcgctttatgcgtagggaattcggggtcatctgcagaaggttagcggcgtgcactcaccgaaagacatctgtcgacacatacattttaatgccccaacaacttcaagtatgacagagtccgtgacgactgtctcgataatagtggtatcgttgagaaggatgagtgatttcatgatgttgcagagacggtgcaagtcgggaagactctccaggtcttcggcgactgtgaccaggggtaggagcttctggatataatcatcccgaatgacacacttcgacagcgcatcgcggccaggtttgagccatgctggcggccctcattagatgatcaatatcgggaagattcgccagttcaggtgcgggtagagtaacggaatgcatgctctcgagatcttcagatagtgcgtcatctgcgaaggcgcgcaaccgatcagtaacagtaacccaaggcaggggacaaaacgagagcccacttaccacctgcggcgagagtgagaaggtgttgctggacagaattgacaaagttccttgacattgtaagtaaggcccacaagagtgcgcctggacgagtatttaccaaatcattgcgcatccttctgcttcctgaaagcttaacgccatatctgtctggttcggctcggtccacacgatcaatgtatctaaagatatcgcaaacaacgtcagtgctaccggctacactcgttcgtttccatctcgagggaaagactgaccttgctgcttctgatacccgccatctttggagatctttgtctccagaagtacccggttgggtttgtcttctgattccacaaatattcgcggttcatcctagaggcaaaaagaaagctgtggttagcgagagattcaaatatagacaaacgcgccgatcccattaggcggttgcgctcgataaccgcttgcgaccgctatcgcgtggccaggacgggcggtggtggtgccatatgtcctgtcatgcgatagcgatgaccaaaagatagagcttacatcaagaatctggccagtgcaaaaccctgtaccccgatcgaaccagtcattctcctttagttcgtaaactttaacccgcttgcgatcgctgggcggctgtaattccaacgccatgttctgaccgaggataagatggtccgctcgtcactccagacgcctcggaacgacgagtgcaccggcgcgtgaagagcgccaaagtagaaagcgcgggtcggcggatgggatcttggaggaggtcgggcagacgaggatacgatactgttgctgcggggttaaccggtggggagcgaatggaagagaacgacggcgggcgacgatggagaaaggccgaaatctgctggctgctgacgatgatgaaagatgagtgtggttgtgatggtggtgacggagtcgggaccacctggcggcctcggcagcggtcggcgcgagagtcggattcacgtctctcagggtcttgcgtcggccagactttattcttgcgcgagaagagacacgatgaaacgaacacacgcgaccg

SEQ ID NO: 4198 - DNA, 4589 bp, Emericella nidulans
aggattgggagttcgaaggaacgggctggacgtagcgggcgtgatcgtagttgagagatgcgaatcaagagggtctatgtaagttgacatagtagtagaatagacggtagcaggcacaagcgtagccgaattggtatacggataggaggggttattgtaactaatccatggggttattccttgatatggtgcagggtaagttgacaaatcgagattttccgtcgacttcgatcgcagactataatatgatgaaggaggatacgagataacaccgaattctggctgttctgtctgctggctgttcatgatcaattgcagtgttgaaacctatggcaggctttaaaagagcaagtagataaaagtagcgacaccgctggcagaatgggcaagggctgggaagataaagcgatgagcaacagggtatcgaagagaaaggtggagacgaatgagagagagtggcaagctggacttgaatgtgttgcttgctgttgtcgtagttggtaacactgctccttcccgagtaggcagggtgctgcaaacgctcttctactgaagcaattaattgcgaatgtttagaacaaacgattaaagcaagtagtaatgactgattggatggctcaatagaaagaatagtacaacaatgcaaagctggcgcccctgatttttcacagaattgcaacggtgatcccacctgggaatctgcagtaaccaggcaatgaagatggtcggcaacatagtcatattgccaaatcaatgcttgtaaagataggtgtctcgttggcttctcactcgacttcgtcaacctccgcagtgggactgacaagtgtcgattgggaatcaagaaaacgatcgaagccgtctttatgaacgctgtctttaatcctggagagatcttgagtgggcgagagaagagttggtgagagaagcactggctccttcttgttaatgatgagacagtcgtctcgactggaattgaccgagcgcctctttctgccatcagtcggggtttcaacgccgctattggtcagcacgttgagtttggaaggtgtttggcgtgctttatcactgtctctacaagccttttctgcttcattctccttattctctagagaaatcccttctttcctgctcttaataggcccactagggctggcgtggagcttggctgccgctccctgttcagcagaagggtcaggtggcatggtgttcgatgccgcggttgttgaaccggatacatcgcgggagttcgaacacgacatatcctctaggatgttggctgaggcacgactatttccacttttgcggtgggatgcggagcgtgcttctgctgctgccgaaagcttagttcccataggtatggcggcagtggcggaggctgtcgtcggaggctgagtactgcatgtgggctgcttcgtagggctgagagcctgaatcaactggctgtacgcgtcatcaccgattggggcaacaaggcttggatgtttgctatgttcgtagctgattccggtcatgctcgagattgctcggctcccgctagagttagagacataatccggcatagatatgtcctcccaagactgtctcgcgccacgatgtcgtgcagctgggtcaagcacataaggatcgataaaagggtcggcaaagacggtctccggaggtgcccatctaggctccctatagttcccctgccactgtggtacaggcccttggtagctcctatttctccagaagttcagtgcaggtggattaccaatttgtccggtgataggagctaccggtggccgggtttcatcgtgccgagcagccggtgaatgggcgtgtgagtcttccgcctctttggggtcactcactccgcttcctgcgttatatttgaaaaggcgcggttccttgctccacatagatgtattaggccaggcaatactggagtactccaagacgtctggtcaaggtgagccggtactccttatattgagctgtttcgaaaactcacttagaggcgcgtgttgaaatgcgaaagcaatgatttctttcactcgctcgaagggaggattgcgatgcgggcgtgcaaacccttcagcaacaactaccctgattcttccatggaggtctcctgcatcccagtgcctctgttcaagtatctcctggtggaatggcggaaaacgtaaggtgtcctggttgccgttcttgtcgacgtctgtggagttcggtgaacgtaaagtttagtctacaacactaaaaggtggttggaatgggggagagagacctacgcgagctcaagtctgatataccgcagtattagtcttctagtcttctcttgcagaggtctaggcctactggacgacttaccaatgacatgtggccagtttgttcgcgggggaaagacgctgcccctgcatgacgacgatgactttttagtgcgacatcccccttgttgatgccaagggtgacttacgcgacgcacagtccatccacgaagactctgacctcaaatagagaggtatcatctggctgcaacagactctccatcaaacggcttacatgtggtggctcccagctgtgtatagacactcggaagggactgtctgcggggagacttggtatgaaagtggtgagaaccggcaagtaaccaagatttccttgcggttgataataggccgccgacccaaagaaggcagggttgtgcaggtaaggggattctaaaaaatccgatgtgatgtcagtatagatgcaatctggaagcaataatggtacgtccctcggtcccgggtcacaaaacattgcgtcttaaattcctgcacagggaccttggactttggtgagcttagaactacgtcagaatatacgtaacgcatcgtgaccgagttcgcgtaacgctgctggcgtgctatttgtaataagatgagaaacgaagaatctggagcttggactggaatcaaagtagaaaatatcagggttaacaacacggccacatctgcgagtagggacaagaaggatgggttcgaagtgagagtggttgagttgggtagaggtggcaggggatagtgaacggtgtttagcgggtgatggagagctcctgccacaatcggacctcagtgaagagcagaaagcgcctgcctgactagtaggtaaagaaccaagtgtaggcgaagcagtctcgcattgtattgtggcttggtgttggacgaaccctatctatgaacagaacgtgatcccgactgggaagacagaaacagataaaaacctgacccttgtagaagatcaatacgcccagaacaacccggtgcgtgacgccataccggtctcgctatcgtgattttaaaacacaaatgaaggcgccggcgctaaacaacgaagggagctctctgcatatcgaacaggggaatcatccgtaagaaagacacaggcactaagacggttgccgatattcgaagatgtaacaaaaagcctcaagtggacatggaaaaagaagtagctcatatggtcactttgctcagtaagtgctcgacatacgtccaacagcattgacaggtcagcacacggtatgcgatcaaccggaactccgaaagcaagcacagacaaaaatagtgccgtcaaacccagcagttacaggctagtgaagacccgcaagcattgatccatgtgcaatagcgagagcaggcaatccagactgaccccgaacaacataacatagaacagacgatgcgaacaaggcagtggtgtacaggcaatctaggaacagaaagcattattcagcatcacgaaactgaaagagaaattcgattattaccttcatgccaccctcagagcaaactttttttgcagactgccttcccatggagtacagaaaagcacaagaacaatgcgcatcagattgaagacatacgaggaatgaagctaagatttgaatgtaacagcagaaaactcgaagagggaattggaagggggtagacacagctagaaaagatgttggaagatggcagtacatacggatttgctttcaggggcaaggaaattgaggtgagaaattcgaaaggttgcagaagcaggtgcgataaaaactcaggtaatgttaaagatggaagcactgcacacatcacgcacataagaacaggagattgggtccatcaagaaccataaaggaaaccgtcccaaagctgaaactgtataaatgaaagacccatattttaaagcgaagcgagctcctgttgctccatctcacccgaagagacgctaaactttcactgcagtgaatcagtcagcagatattcagcgaagtcggcggtcacaggtagatcagtaagcactcaccttcataggggcgaagccgccgtactgatgttgaggagggaggtacatgggaggcgggggaggagcgggccgataaggactgccagcagggccagagttgttctgcgagcggccccagctcaaacgcacacgtgaattaccgatggggtagccctgcatctgattgatggccatctctgcggcatgacgctgaacgaattggacgaaaccgcatccctttccaggaggaatcttgacgtaggtgatttcgccgaaaccttggaagaatgagcggagttcat

SEQ ID NO: 4199 - DNA, 4866 bp, Emericella nidulans
gctgtctagcttttgcgtcacagctcaagaggaaagtctacttggagttgggtggcctgtatgtgtctgcgccttaagatgcgcacacaaacagattattatcgcttgcaagatgctgcattaatcgtgtgttttactctctgggtcctggcccagaagtccggaaaatggaaccatagactctggcgctggagattctacgtgatagaatgcaataccattgaccttggttagggcaaggtgaattacccgctcgggccggaaagtaggtgggttcgtggttgctggtcgtgccagtcaagttgagtcggcgaggcacagcagtcaagctaacagtactgagtcacactacagccatgggtaattcgagcatcaggtattatcaataaattgccttctcctaaaccctaatactccataaccataggctttcgtgcagtctaaggtatagcaaataggggattaagacaaacctctatagtcttctgcctatgtcaatatatctatttaagcaaagtgaaaactttaaaaggataaaatatgaaaggtacaggtataatgttacggattcagccagttttttatcagagtgtgaagcctcaggcaaacaatcaggtctcaggcattcttatccgggatatcaatcagtggaaccgccgggttcagccgctgttttcaaaatagacttctgataaatagacttcatcagaaccttgttattggttacatccatgtgtctccgcaggtatattcagcaccatggagggttccgtgctctgatctccaaggcttagtcttgcatttacctcaactattcattctcctattgttaacttcaaatggcactggtatccttgcctggtcaacaggctgtttactctgaagaagtatattaccaatattactgaaaactaccagataaggtgcataaagtttataagcaaaatatatctaaacatattgcaaatctatcttatgagtgtactgcaaagtgtcgacatctatgattattgaatatcactgtatagaagagaacttttttctatctaatacaggatcgtcggattacccatggcggtcgggtgaaccctggttacgctaagatatctacagcgtgacaagtacttggaaatgataatattcgtccctgctgcctcatcgaaccctgaaacaatcaacacatctggtagcatggtcgtctgaatatcctaagtgactaactttacgcgtgtaaacttgataaggtaagcggatcgattcttgtgggtaggccgaccttggagttgctgctacaccgcccgcgataagctgataaagcggctccgataagcggccggacatcaggtcctcgaggcatcatccgcagacctggaggcaaacaacaaaataatgcctagttcacaatacttttcacgcttaactctgacatgacacgactggatccactgtctacttgcgtgtgccatattatcccttcgcgtttcatttgtatcctttgcgaccctctttattgccattctccgcttttgttaccttgacgttggaccgctccgagtccatttactcccgttgtacatctagctctggttgcggtttttcatttgcaccatgacccagaacgtcgacttcagtgcgcttaaggcgcggactatgagatctggggaggacgaagaggctgtcaccgtagacacaaggggcctgatttccaaggtattagcgcgttactcaggtcaatggtgagttagcagccctctgcttggttacctcgcattcagttggatatcgaaatgacacttcgaaggactgtattacgagagatgatccagaatgcagctgatgcaaacgctacgaaaggtatgcatttgtccaagcggagagaaacaaattgacaatgtcgcaatcgcagttactatcaaatttgagactctgccttcgaaaacggtcccatttccatccaccaccgacaggacaagcctgataaaacatactatatctcatcatacgattaaacgcctcctaatctctaacaacggactcctttttaacgagaaggactgggctcgtttgaagcgtattgccgatggtaatccggacgagacgaagatcggagcgtgagttcattagttacaggtaataccttactggctgagtacttagctgatctgatacgcgtattcagtttcggcgtcggcttctattcggttttcgaagattgcgaagagcccttcgtctcctcaggttccgatgcaatggcattttactggaaggagaacgctctgtttactcgtcgactgcagttgaacgagcaagcgaactctgaaacaacattcgtcttggattatcggaacgatacttcaccgattccgtcgctgatgcaactatgccagtttctatccagcagtctcacatttgtcaaccttgaatgcatagagctgtggctagatgactggaacatactacgcttggccaagaaggctccccagcatcgcccttgccttgccaaaagatatcgagacgaagactcaggaagggttaatgaagatcaccagtgtcacaagggaggtcgcgcaggtcgacgctgcctggatgcaagtcgttgaatggaatccaaattcgagcactctcgttgagggtattcgtgatactacatcttcgttgcgcagctttctgtcaagactcacccagggttcgtctagcaaagtggcagatactcagaagaaagaagctgccgatgacacaggggacttaacaaagatctcaacagccacgatatttttgcacatcaacaccggaagcattcaggcctctatcagccaatctctaggcagcgaacttgaacgagccacaagaaagcctccacctaaaaagacgtcaattgcagtgctgacaccttcgtatgatacgagtctagcgtcatcgtcttcgcaagctgaattcctatctaccatccttccctcgaagggtggccgggtctttatcggatttcctacccagcagacaaccggtctcaacgctcatatctctgctccttctgtcattccgacagtggagcgagaaagcattgaccttaactcgagatatattcgcaaatggaacacggaaatgctaagagcagcaggtataatctgtcgaattgcatggtctgcggaaatggcttcagttaaaaacagaataatctctgggaaagatccgtccaagcagtcaaagattcgaaaagcggacattacaactgtccttcctgaggctatccatactgcaaaccagttcgtgtttcgtgagtctacaccattatccgtgctcggtcagataatagaggatgccttttggacttgtaataagaacgcttccatcgaggtaatttctacctgcggtgttgtccacaaccatcaggcacgcatagccaccaaagacttaactttcttagactctatacctgtgttgccagatgaattcgtggagggctcaaaagagtttgtaaagaaactgacactgctgggccttgtgactgaagttacagtgactgatatcaagcgtgaactggaaacttgcccgctacgttcttctcaaatcaccgaattcctttcttggttggcacgaagaacagtatctggccaactcgattcatattccgcgaggagcatattgaacgtcgcggtggcttctgccgatgaaaatgataccgacacgggtttgatagttttctctggcgtatcgctcttcttgaaccctcagcgtatacctgctgacctacctttgccacctgccgtgatgccgttcaaatacactaagtctctgagcaaaaaagacctagaatcatttggatgggaggaattgcagatagtcccctggttgtgctggcttgtcagcaatgccggcaatcgggatgtccttccacaaacccaagatatcactaaatgcccatcctttgcagcccaagtactccctgtgatatcgaaacaatgggaaactctgggtcaatcctcgaaacaagacgtgatcgatcagttgcaggcgcataccgtgattcctaccaagatcggcatgaaatgtccgaccgaagcgtacttctcttccgtccgcctctttgacgacctgcccgtggttcatggcctccagggagtaaaagagaaactgctgactgctcttggcgtacgtaaaacagtcgagcttggtgttatttttgagcgtctcctcaatgctcccggttcttctgatggagacaaatctagccagggaaaatggagccacgttgatttgatacgatatctggcatctgtcagtagtgacatacctgccagtgacatcaagcggctcaaggataccaatttttgtaccgccgagcctataattgaccatgatggttcaagaagaccaaatgaagaccgctacaaggttcagcaactttacgagccgaacgacgcgcttagagccctgaggctcccaatcctagaatggcccgcaaagttcacatcgagcagccctgagggcagatttctggcaagattgggcctgcgaacctttccacaaagtactgtgctcacacgaattatggctgcggcggccgagcacaacgactgggcactgcacggaaaagccatgtcttactacgttactgagttcgaaaacaatggctatggcgccatcgattgcggttcgataaacgatgaatttcttccagtcgaacaaataaacgattctggcgctgagaaacgctacaaagttagcgctccaagcaagtgctttacagacgaaggtgccgctttgttcggttatgacatccttcgtaaggatctccaccgtcatgcttctaaactgggcgttcaacgacacccaaagttatccaattgccttgatacattgatccgt

SEQ ID NO: 4200 - DNA, 2799 bp, Emericella nidulans
atatcaattctccagacaaatacgtattcacagatccataatactccttccgaatgattactgaatatacaagaaagccgtgcaggcaggctgaaacaaacaagaaaggcaaaagaccgctacagtccctcgcccaggaccatccacgcaatcatagcaccccagagcccaacaaaaaccaccgtcagaatgccagcgcccgcgcgatcaccagtggtaataggtttcgcctcgcctgtattatgcttgctatcacttgtaccggcatttgggtcgcttgtactgtttccaccggtcttggtggtgagaggagggtttgacttttccgaaacaaggacagacgagaggacatcagtcgcaataatctgttgctccataccgattgaaccgtcccagcttgacttgtaccatttgatgccacacgtgttgttgccagctccgctgcaggagagggccgccgcttgagcggacgtttggagtttggcgaaaatacgatcgtaagtttccgggacaatcaagccaacgaatgtgatccatgtcgagactatgcctttgaaaagaatttcgttgtaattgcagagcgctttgggttcgcatagatattcagagaagattttaccgccgccgtactgttcaggaaagaattcgtccaggagtttgccaagtagaccgtcgacaactgttttccattcagctttctcagtctggtgcggttagtgctagatcaaaaccgaagggaagaagacgaacatagttatacatgtaggcggcgcccatgagccatgcgccataattgtaggaccactggttatttccctgcgaagtacagccgtcgttgatatcggtcgaatcggccacgttccacgtcttgttgttcactaacggcgaggaaacaacccagtcccagaccatctgagctttttccgcgtatgtgtcgttgtttgtataccgggcaagacgcgcagcgagctggaagagaccggcattggaaatggagttcttcatggcataaccagcctggtagggaaacatctgccatcgcagaccaccaccgcaatttgacgtgtcccaagctctaatctgtgtattgtacacaccctgcgcaagcgataaccacgagtattccacatcgtcttcgggaaacccgatttcggcggcgagcatggcggtggcgccccagaagaactgatcatcgtaaccctgacatggtcagtatgatcgcgctgaggtatggcaattcgaaccaaaggaggagacgaactaagtaactgctgtagttggatggtagatagtcgccgttccccgcctggtgttgcatcccctgagtgatcaggctattgtactgcgagtcgcccgtgtagtaccaatagagcatcaaactcataaacaaagcactgccttcccaccatttctccgggaatgcaccgggattcccaccggtctcgttccctgaataccataacagcgatccataggcggttttcgaagcggcgtctttgatggattctgcgaggaatgtgggttagaatgaggcgccggcgggggtttcagctagaaaaacacacgaggatcattgagctggatttcgagggcagaaatgcgaccgagcgaggccagcagggcccccaggatagctagacgcatggttgttgatgccagaagagagtgggaagagcatgtaagaaagagcggcagtgccaagggatgctcatctcttagctagctgagtcagcgccggatgcggcctctgagtggtcgttattcttagcggattcgtaagtgatcgaaatactgagggagaagcttttctgtgcccacttaagccttacgtcacctccgcgtgtccccttggcgactttcccctttttcccctggcccgatgatggtgtgctcaataactgcacaatgctcagacacaaaactcggttacctggatgtctcattcagagtcccaaaaagacggaacaaatacatattacccgctccgagtcttttggccatcagtttctctgtccatatggccatccgcaactggccaggctgcgctctccggctcctgatcgatcggtggagtctcgataaaacgtgcctggattacagtggaggaacgaggctaagcgcggaattagctgttccagctgttttaactgttccagcctgcgggtcagcactggcggtacctctgcgcgttgtattgcggtcaaaagcggtccaaagcacgagaccgatatctgctggactagacacaaggctcacgacgatcaagcgacagagtcgataaggtggatcgcagatcggcaccgtgacattccttggtagttccaggaatgtgggcatcggcaccatgacatcaggatcttcgttccgtctcgggatacgcctggttgccgtggtcgaacgcttaggtacagggtcctacgacgacggaagcaggaggagggttgcagtaggcatttttaggcttgtctacgctctctccactgagcgttcgtcgtcgcttgtatggcccatccggccctgacaatcagaaacacggttacagcttgattgaatgcatccaccgcacttggagctccagaatgctgagtatatgtttgagatgaggagtgaagatacgcaaacacaaaatagtaataaaatatcgaactcttacccggggacaggtttagctccctgccttatgttactccagcttgtttggttcatggagcctgggcatttcggggcaccgcgagctttgccggataatattacgggctgtggctggggaatggcactgcacttctagacatcgaatcc

SEQ ID NO: 4201 - DNA, 2964 bp, Emericella nidulans
tcaatgggccgatgtgatggtcatctgcggcatgcgctacccagccactcttcgtcgggctctcattttgagtggggtcgctgttctggcgacgacgagtgattggggtatccaaacctggttcaggaacccggcttggggtctgcttttttcgtggactctcgttctcctttttcttcagttgaaatccggccgcggtcgctggacgcggtttcgccgctcctggtcgcatgggtgcagatgacaaggttgatgtaggcttcttctgtagagtattggtcttcgtcgtgacaggttgagtagagcgtgatgccaatttgggactcgacatggctttaggaacagcaatactagccttccctttttcagtagtcacccccttcgcggccgcacgagctggcgtgctgctaaatagccccgtcgccgaggaacccgagttcgaaacaaacggatcctccgacatctttagcatgtccttttcaattaatttctgtgtttttggcgaaactgcgtccaagatcctatcgtttattagcccaatttcagtatgaaaaaagaggggaaaagatatcaacgtttgagcgaacgactcactttttagctcgcgccggccagacgctggaaaaccggaagaaggtatgacggtaagccctccgaatgtcttctttcgcatcctcaacgccctcctggatgcacgcggcgatgctgttcacgccttcggcgtgagtcttgtggcgattttggccatcaatgatgatttcaagccaacccgcggagaagatccgcatgttctgattcttatcctttgcggcgcccgtaatctggtttaatacgcgttgattgcaggtcacattctcgagtatagcgacgatggtcaagttgctgttttgggaagtaatgcccttcgcgtttgcgcagagtttcaagacgttctgcaagacgatgtgaatagagctgtcgagtcgttctttgttgacccgggcgagggactgaactgcccgaagcccagcggtttgcagagaagtccgaacggaattggccgtaataaagacaaaagggagcgtcatcttgacgaaacccaagtatgccgtaggccatctctgtggcgcatttccatgggtgattcggcggatcaagatggtgtactcttcacgcctctggaagttcatttcagtctctctgccctcaaaccaaggagccatggtagcctgtagccgatcaagttcctgagaagagctgagatcataaggctcaatatcaagaggctcaacagcgcgtttagctttctcaacggcatgtccaagggctgaaggagcagctgcgtggccagccggagcgttcaccattccagatgctttgcttgcgttggttctcaaggtgttcttctgcttcggggaatcaaaatcgttggcgggaatagaatctgtaacggcaattcgattatccgatgcagcaatcatgccgccagtgacgggagatgttcggaccggcttggggtgatgcagcacaggagcgccatcgtcggcagcagagctagaatctacatgagtagtggtcgatccggaacgctcatcaaacgtatcagctcgtgacggagcacgcgaaatatcggctcgtgaagcagcccgcgaaatggcggcccgcgaaggagcacgcgaaatgccggcgcgcgatggcgcgcgagaggcggtggcagctcgggagggcgccctttgctggattgaatgttggcgtgaagagtggctctcgtcataaagttccgggtcaagaccgataccagcaaggatctccctcgcatgcgacggcctaaccttgtattgttcaagtgctctcttcaattcgtgtttgctagagtcacgttcgccgctattgttgattagcgtaggtgaacaaacaacgcgatactaaagacttacatgaacatctgtacgagtagtgctctcgccccttggcggacagtcggatcggcatcttcgacaaaactgataatctgtggtagatactctttggcggtagttctgcataagcggcagtaatttctgaacgtgtaaacgcctatggcggacagtcagttatggtcaaaaggtggaacaaaggcaacacacaatggatagcaaattgagacaagtctgtttctgaaaagggttctttccctggaagccaacgctgagtacaagattctcaatttgggggcccgcaccctcccacaagtcggccagggcatgggtagtctgctgtctgatacggtccttgttgtcacccatacgatcaacgagagtggggagtatccggtcggacatggcggcgaccagttggtggtgttcttgaatatacagccgtttcaagaaatggccgagcgtcgaaaacccggccgagtaaagggcgtggaagggtgaggctattgcatgtcgcaagcactcaaagatcacaggcacagccttctccggaacattcttttgcttgatgtcggacttcaagccaaggagatgggtcaccttggcatcaaccgaaaggttgacgttcttcagcaccgaaagtatgtccctcgccttgtaatccatcctggctacgagaagcttgaagaggggtagcgcgagcttggagaagtgaaaggcgaaggggaagtacacgctcgagcgtgcgacgaggaagaaaacgttgaagaggaagaccccggcgtctgatagtgtgtagattaggataaataatgaggcataagctgctaaatcagtatcagtgaagagggacatggtcaaatacgatttaaaacctgatatgaacgtgcttggggaagcgggtagttggaggaaaaccgagaaggggaaatggggtggaagagtgagtatacgtacgggagaatagaatagtcgtagcagtcgcagctcagttttccattgggatgaagtaggtaggaagacaaggacgacgacaaggaaggtttgaggttgttggtgggcgaggggt

SEQ ID NO: 4202 - DNA, 2009 bp, Emericella nidulans
aaactgtcagtagcgaattattgataacagagctcgaatcagctggagtctatgcgcggagtcactcttatacaacttagggacgggtaatagaccctaagtcagggctgggtggggcacctgacatcgtactctgtaggatctgacatccgatacggtgagtcttttgagtcaggatcgtaatggaatgctcagagaaagcagggtgagtcttcttggctacccgtaattagcctagtaagaagcagatgctttgaaaataatagattactgcatttgctagacaattggtgctttgatagataccaacaggcagttgcgattggagacgaaatattcattattatttgggagatagcttgctggtctccaagaaaactgttagttctgtctccttaattataggaagagatagctacaaaaatcagcaaactgtcttttgaaaatatctcattggcaaaacttgtatcttgctctttcaatatcgtttgaatgccgactcctacagcatttaacaagagatacgataagggccaagtttttcaagggttgtagttggtgagcggccaagccaccttgaaaagtatggagtagtatgtaaagaacggatgttcactggaagctaggataaatagttaactggttaggtaaactacttattaggtatgccgtctaccggccatcgcgccgctgcaggagcatcggcggggtggctggtctgatcaggctgttgatgcatgtatagtcgttattctggttcatgatgtgatgactgacggtcagataccttacaattgtaaatcagaacctgcgtacagggtataaacttttccttatatgacctactctggtacgtccgctcagcttctattttggaatgggttggaaagcacggtggacgttataaagcagtcattcaatgatccaagctttgcttgtgatatttgaaaccttgattgaataatcatttatcgggagaaacaagccaaaaagcgtcgggactaccagaaaacacatagacagtcatacttcccggctgaccattattgagcatccggacaccccaatggtgttttaaattaggccagtcttgatcctccttattgccttgtcatggatgctgcagtcaatggtttctactattccccttgtagcaccaataagtgcatctgctcagcttcctccatccaaactaggccagcatagaggtacaagacgctgagcttgttggtagtatatagggaaaaaggatagagaaacaaactgaagtagctgatcgcaaattatagcttgaacacgacgtctaaaacttccagaagcctgagaatcatatattatagacgtgaacatgcttgactgcatcagaatgtccactcgtctagtaaagctctcatacgggcagcaccagatgctgcagcatatggttgccatactttattcttatgggtgtcagcataatcacacacccccttgaccacgaggcagggtagccgtcctaggcccctacaccctcatttcgaaagctatcccattattctgcatagcaatgaggtctctatcttgtccagatttcatgactgtatccccagatgcgataagcccgacatgaatattaggggaaggtgtatgtccttgagtaagtgcatgctgaggccgcttgcgttgcacaaatttatccttgtggcatttcagttgaagacatgatatatcaaacacttcatcacagactgtgctattagtagggtgagcacagctcatgcaagcagcaggatcatgatgcttatgttgataagtccattgaaaaagctcatcctgctctaccaccggatacaggtcggtgtcaatgccagcggcctgattgatgactctcaagtattactggacaatgctatcaatccgcttccgtgccactgtctatattatcgaaaggagacctcgaatagacacattaggaccaccaagttcgtctttgacagatgtcgtgccgaagaagtgccctcaaactcctc

SEQ ID NO: 4203 - DNA, 2509 bp, Emericella nidulans
ggtgaagcacagccttatcgctgatcatcgttcttccacgagtcagatcataacaagccaccactactccacgataagcatcgcaaagcccagttatttcattgttttacatcttgtctctgattttgctgattcttttagagcactccctgctgattatcatgctttcctgctctatagcttcttgagcggcgcaatttactgtttcatgtctcccaaagcccaaggcggctgtgctatctcgtattcataaactttacagcctacaaaaaactgaaacaactctattctctgcttcctctatttttaaacctgccacgctggtctctttaaagaggctttgccttgtctcgtttctaggcagcacttcttggtcgtgttcctatatcatagcttcaccgtcaggcttcccaggataagtacctggcactgcactgccccaggggctcagcgaatcttggtctttgaagacgtcttctccatatttaaacaatagtcgcagagtcccgtgcttacctcaatctctccagctcggcaccttgaacaagaaaagattacaaaatagcatggcatccaaccctacaaacagcgcaccagaggctaccccacctcattttagactgatggagctgccaacagagctacacttgcacatctcatcgtacctttcatatccagatgcactggctctgaaacatacctgccgccatttctactcgctggtgtacacaggcgtccatctgaaagtcaattggctggtggagcgcttcgaacacaaactggaatgtcctatggagaagtgctctttccgaacagacgaagccttctgtaactggcggatccgaaagatcatggagcgcaggcgccggcatctagaatgcccccggtctcaaggtgggatgtctagtcattgaaggtagaacctgtcagatggatttggttccgacgtggctgaagaggcaggggagggtaaagatgctcaagcggctgggaaccaaggtcggttctgttccactacgtaccaaaaagaggacccggacggtgtcttctagttattatccatggggtgatggtgttttcaatgcacatgaaaatgggtgttctgtcaaaggtttgaatcacccctgcacttattgttcaaaactaaccaggatagatatgttttagttccagccatcattagctactgatcatagtttgaggacttgatcaatgaaagctccaccagaacgatattattgctatgcccgtcttcaatacgtgaacattgagcgtcaccttgcgacaaatattacgatcatgcggcgcgcgcccgcgccctcgcaacgcctgatcatcgtcccaaccccaccgtccccgtctactttagtaagggttgacgcgtgccttgttatgttgagtgcagctggctgcgccgaagcggttggggaattaattgcctcgtgtgttatggttaggctaagagtctacatatgtgatcacaatataatgataatgcttaatcgatatataccaaagatgttttctgccgggcacttgtccagcgaaccagtactcaaatcacagagaagcatcaacaatgaatgcacatggtatcattatagatatgctacaagcccagaacatcaatcacaaacgcctaaacaacaagaccagagcggaagatccggcaagacaaaaactaaacaccccgcttcacattacgtccctccctagccgcctcgcccatagcttgagaatccgtgtgatacgtcttgaatttccaagccggaaccctcttcgcaaacatctcgtccaattccgcataggtccttcccgccgtctccggctgataaaaccacaaatagacaagggagataaccgacagcccaccaaagataaacgtcactttcgcgccgagatccgccttgtctgggttaaataggtacgggagaacaaaggaccacatcgtgtagagggcgttttgcaaggcaaggccaatggctattgtcttaatccggagacgagaggttgagacctctgcgagcagcgtgtatcccgctgccccgatggtgcagttataccaccagcagtagaggagaatcagcgcgacggttcccttgacagcaccgccggagttagggttacttccgtcggatgccacgacgccaagtccacccgtaatcatgaggatgcaggtcatgatgccaaggccgtaaagcatgaggttgcggcggccgaggcggtcgatcaagaggtaggacatgagattcccgacaatcgacatgacttgctgtacaatttgaagacgaaagctcatggcgtcagtgtaccctgctagctggaagtagtaagtgctgtaggaggcggcgaagacgatgccggacatggcctggatggagagtggggcgatagagatgattgtgcggcggaggttggaggtgcggaagcactcggcgtaggtgacgccttcagtttcgcggcggatctgatccctttagtagggttaattgcggccgaatcttagcat

SEQ ID NO: 4204 - DNA, 2526 bp, Emericella nidulans
ctcgcatttgcaaccactctttactctgcagtctcccacggttcgcagctgtcaacctggatgtcatgagcacgctacccacctctcgggctattgtcgagcatcatgataggcactgctgtccacttgagccacagtctcaggtttgtggctgagcgtccaagtatttgaaactcccctgtttagctcgcctgtcaactcccacgcggatggtcgaataatcgactcgatcagcgtcagactcggattcggaatcgagcggccaagacgcctacgcttcattcttcccgctgcctcgccctgccgggtctcggcatccccaacctctcaagtggccgacatatttacgcagtgaatgccgtcgtgcagtagcacgggcagtcaatagtccgtgggggcgttaccttttcggccagtcttctaggaccacggttaccaggaggcctgaaattacgtccaccgactccgttcaactggaggagtcgtagagatcacgccgagttggcttatatcatgggagacacaaactctaaccgttcgattggtcacaacgtgcggtctcacctatttacatcatgagtcgtgctcagtggccatgcggggttgcctgcggaaccccggcacctgccagacgcctgcgtggcagagtcaaatggaacgcaagccggatgggcaaggcttgtttcaggctgtatggttgttttcagtatgttctcttacacttgtgccatcttccgtccgtatcctgtactctcggcgattttgctagagaagagagccggcatttaaccatgctgccaagagtatgcgtccggttttgaacgtccaatataagccggcaaagtcatctgatagagttccaagcctttccaaatccttcgaaggcaggtagtcgtaggagaatgttgctccgcatctcgaagccttatgtcatcctcaggccacaaatatgcagtctcaggcataaagcaggtgaccaatcagcgatagccccgcactctttcctattcgcatcgaaatttcaagctgctggttaggacactacacgcgccaaagctcttttcctgctcacaacgcgaatagctacaaacgcaacgaagttgttacttaccttgactaccaaatatacatataatggcaggaccggtcgccgatcttcacccgctttcccggtctgatggttcagcttcctacaaatgccctttcactgggtcgaatatcctgggatcggtcaatgcgcctattgagctgcccgggcgccgagatgctttgaaaccggaagaggcgaccattgaagtgtttgtgaaaccaggtactgctcctggcggtgttggtgagcgatacgtggagggtattgtcagaagcgcgttgggcagagtcattttgggccgtgaaaaaggatacccaagacggggggttgttatcaccttggctatagtcggtggagagggcgtggccagaggaggatcagtatgtttgttgataaattaataagagccatggctaacttgtggattgtaacagtacctcccgttgctccccgcgctccttcatactgccaccctcgcgctgttatcagcttccgttcccctgtcggtcacactgtcggctacgatccttgccgtcgatcccgccggtaaaattattcgcgagccgtccaccaaggaggcgaaggctgctgcctcccttcatgtcctcgctttcacatccaaagggcacctacttctcaacgaaagtgagggtgcgtttacgtatgatacatgggaggctgtatatgagcgcgctctggttatctgtcttggtagttccgctcttagttccgacggcgatgtggccatggccgagtccacagagagccagcccctagaaggcatactacgcgacaccgttgaagaccatattcattctgaatactcctggaagcttgctgcttgattgatgcattattggtgtcaactgatggcggcaaaccacccccgcggacggcatactatcactatgacagacgctgcaaaggctatttggggcccatgcgagtttatactgaagcctcgtatctgcagcttccttcacatgcctaagggcagcacagcctttaggacctctcatccttattactggggctcgcatacccaatcagcaggcaattccggccctttgaagcggattggtggcacacggcacacaatggggccggggaacatgaattacttggatagactgcggggaacacgctacaaaatgttctgctagctgacgtgggatcctgcttaatcaatcaaagatgccgagcctatcactcggccaactgttgttggacagatcaaacattttacatttcagtgctgaggattgtctgattatacgctaaatcttgtgatatgcatgtggccgaggccgcaaataacctggataatatgatgtcaaattcatcgccgctagtaccatactccgtagaacgttcggagtaaaagccgctcttcgagcgcttttcaaggaaatgatcgatattctgtgaccctcacc

SEQ ID NO: 4205 - DNA, 2162 bp, Emericella nidulans
gcccccaaagcccaccaaggaaaagagtagtatatacgccacctagaaaatcgactccatatcatccagaagcggagaactcacaatcagaaaatgaagcagtttcgcctgccagcaagaagagcggatcgcagacccacgaagcaatgatgcaagcgaagattttcgacgttgccgagttagatgggcaccaactaaatgatcatggggacaacattgccaaaccttcgctttcaaatcgtagcctaaaagacaaggaaacaaggcctgagtccaaggaaaggatgagttccgaaagtcttcatatgttcatcgacatgatctttctcttcgtctctcaggtgcaacgtttctgtagtcagttgaaagcgaaccgtggctcgaagtttgttttgttcaagttgtttcgtgaacagcatattggggatgcttgagcactgtctgcacgttcttcgggatggcctagccgtcatatctgcatacaatgctacaggagcgtggcccataacaaacgacaaggatcttacgttggttgtcaccgatcttggccaagccgtgatttatctcgtcgtgctgggttttgtggccgtcgtcgtcgcgcgagctgtgggatttgtgattctcatcggaacatggataatgtggtttgcacggccatttgcattgactttccgtacagttttgcgcgttctatctttatgagcattcttattgtattctagcctcaaggactcaattcctggaactttgggtctggccgcaaaatacttatctcctcgcgtcttctattcttacatctagacctggtggtgccatggtatccttagacttgccattattatgcaaggggtcactctcatgtatattattggcgcactcaagctacccgatcgtgagactgtgccgcctgccgccgagtactcagcttgaatgcatagataactaagaatctggaaggcagagacctattgtgattaaacattcatcttatcgtaagacgacaattttgagaatcatacgagttttctacttcgcttgacacgagagaaaaggtaatatatctggctctatcaactaaactcggtacattcctgtaccatccagccagtccattcacgatgtcagagaatgcattaaacgtgatgagatataagagagtatcaacagaggaagatgcatatgaattaatttccaaagcccatcaaaaataaaggggaagaggaaaagaaaaaggaagaaaggaaggaaaaagaaatactccagtccgtccgtatcccatgttgaagaggattcgcttcgatcacttttttcgatcactttttagtttggcgctcaagtcacgaaaaactccgatccaaaatcccctgtgtatagtgttgaatattataaaaccactccaccagctcccttaatgctgcttttaagtcccaagagggaatgataatgttgaataactatccgtgttgaagattgatttctcgtgccgaaagaaaagtcataatgggtatattgttgagaattgaaaagtcatgttgaattaaataacgctgagaggaagaaatcgttgagaggtcttcattcgtgtcgccgtaaaacatttcgttgctggttctagcctggggcttgcccaaggcacagatatattcgttgaggttgattgagtggtgaagattaaatatgttgaattatggctgtgtagatgtgcagaagcagggtggcattgtgttaagcaacgcgtaagctgtagagtgcctaatttttcacggggtcatgggcggcggtcccgttggcggatggggtttgggttatgcgattggctgttccgttgcggtagtcctgatcctcggagaccccacctgagatcacgagttcaaggtccttgacgttcaagtccttgaatagctcgaagaggtcgtaggtgttatgtcaactcgttgttgacatgcaattgtggttagtacgaagtacttaacgtcacgaggaacactcaccaatattgacgaggtaccatgaatccattatgcgctggagcagcttacccgttggacttgacgcttcgtgacacttggcccaatcttcaccgagctggtacgcctcgtcctctcaggccaggaagctgactgttccacaattgttggctgtacgacctacgtccggcgaat

SEQ ID NO: 4206 - DNA, 7652 bp, Emericella nidulans
aaaaatctaggaacgcccttgaacactccgaggcaacactctataagcccccaaaagacgagaagcgctcctgcgtctgccaaagtgcgcagtccaggcagatcgccaacaccacccggagctaagatcgaggacttgcttgcttggagcgactccgagataaccggtcacaatccgaccgatcctgacgatgacggctacggtatcaacggcataggctttaagcctactgcggcaattgcttgggctcggtcgcagaaaagaaagaagcaagttgcagaatggaaaagtcgagaagcaagggaagcgcgcgagaggcgcagagagcgacgggttgccaacaacatggatcagttgcggacagttcagtcaggcggcatacagaagaaggttaagttcgacgtctaagctctattcttacccaacgtttccgacggcatactttcaatcttaacgtatagctatcttttattataaagcaaggttatacgaacaatggcggcgttcctcggagacatcgaaatgggggcggattcttgaatagtgaattgggcgttggcgttaagggaaacaaggatttatatacaataaaagtacatcccaacctttcataatatacagtatgggtcaaactccgtgactccaaccatgtgcaagatatctaccagaacttgtagtttgctagattggtccagctcttgcgtttccgttcctcctcggctagacgagcggcctccgcagccttttcttccttctctcgttgcttcttaattttcaactccttcatcatttccacagcttgtttcattccatccaattcttgtatccgacgtcgctggcagaattcatgtgctgcgagagacgtaatagcgaagacgccaacagcccaattacatgcggaccagatagatcgcatacctgaataaatcaatgtcagacacaacttgtagttgtagaaacacgagatatattcttacctcccaaaacacccctcaccccgcccacaccgaagccagcaccaattccaagaagaagagaatcgcgcgcgcacggtgctttgtagaatgaggttgcgctattcagaggtaacgatttcatagcttccgtaaccgaaatatcgtttgcttttttcccgtgcgctgtgggtagcatgttcacctggtcctccgggttgccgaaggcctcccataatttcccgacttgcgacttcggaagctcatactttggctttgatttaggcggaagctcggataattgctcagtggtatccggcgattgggtaggttttatcggttcccgtgaatcgtctgccattgtggattgtgctgttaatcgaatattggactgataccaagttcacctttttcagtaaaggatcatgatatcgcggaagcatgttatcccgtatacttggaaactgatttggaaacagttagtttatccggcggtcaggccttaccaaccaatcacaagagacgcgtatagtagaacgcgaacgcgtctgtctcgctgcggagcgctttgatgggattctgcatgctggggctaatcgaggcccatgacccattagatcttgattcttgacctcaatacctatcgctcgctctaatatttcgaggatctagtgtctcgaacagggtccgtctcttcacatctgcttataatccgatcgatgtttcatcaacttccgtttccagtcttgcagtgatcctcagctgccgggggcgtatcgcgatgccttcgcgaaaaccgagcaagtatggaaacaaattccggtcaggcgccgcatcatttaaccctaagagaacgaagaccgtcgaattttcctctctgcgatcctcagaagcaacctcccaagatgagaaattcgaggcaattcggttggcaaacagcatcgacgaaagtctggggtttccgcgctttgaagccggcgagaagagagttggttggctcatcaatatgcacagcacgtcaatagaggatccgaatgtccctggagggcgtgccggtgtcgattactattttctcgacgacgatggcggcacgttcaaagcaactgtcgaatacgacccttatttcctgattgcagtaaagacgggccatgaggcagaagtcgaggaatggtgtcggaggatgttcgaagggctcataaagaaaatcaaaagggttgtgaaggaggatctcaagttaccaaaccatctactcgggcatcggagaacttttcttcagttggactttgccaatgtgagccatctgcttgaggtgcggaagacccttttgcctctagcagaaaagaacaggaagaatgtcaatatgatggatacttatgtggagatctcgaggtaagacttctgtgtgcttctgtcctaccgctcaagttaactttgtctagcgcaaatgctggattcgatctgtttgatgacgaacttaatgaggcacgacctaatggcaccactaatgcgagtgattttataattgatattcgagaatacgatgttccgtaccatgttagagtggcgattgataaaggtatgcacgatcactgcctaaacatagacagcagctgaacttctcccagacattcggataggaaaatggtatacggtagaggctactcatggcattatttcattgacttgcttggaagaacgacttacaagagcggatccagtcgtcctcgctttcgatattgagaccacaaagctcccactcaaattcccagattccgtaatcgaccagattatgatgatatcctatatgattgatgggcaaggattcttgatcacgaaccgggaaatcgtctcggaggatatcgatgacttcgaatacactcccaaacctgaatacagtggtccgtttatgattttcaacgagccaaacgagcgggctgttatcgagaggttttttgaacatataaaggaagcgaagccgacggtgatagccacatacaacggtgacttcttcgactggcctttcgttgaagctagggcaagcgttcttggtatcgacatgtacaaagaaatcggcttccggaaaaacagcgaagacatctaccagagtgaccactgcgcgcatatggactgttttgcatgggttaatcgtgacagttatttacctcagggttcgcgtggtttgaaggctgttacagtcgcgaagctcggttatgatcccgacgaacttgatccggaactcatgacgccctacgcaagcgaacgtcctcagacgctggccgaatactctgtttccgatgccgtcgctacgtattatctctacatgaaatacattcatcccttcattttctccctctgcacgattctcccactgaatcccgatgatacgctgcgcaaaggtacaggaacactatgtgaaatgctgcttatggttcaggcatataaggggaatattgtcttgccaaacaagcataaagatcctccagaagcgttctacgagggtcacctacttgagtctgagacatatgtcggcggacacgtggaaagtattgaggctggagtgtttcgaagcgacattcccgtgcccttcaatattgatccaaccgccgtagacgaattgctccgggatctcgatgcagcgttaaaattcagcattgaagtcgaagagaagaaatctttggacgacgttaccaactacgaggaagtaaagggacagatcgccaaactcctgacggacctcagggagaatcctcatcggaatgaggtcccgttcatctaccatctggatgttgcatctatgtatccgaatattatgatcacaaatcgactacaacctgactcattgatccaagagtcaaactgtgctgcttgcgatttcaaccgtccaggaaagacatgtgatagacgtctcccatgggcctggagaggtgaatttcttccagccaagcgagacgaatacaacatgatccggcaggcagttcaaaacgagcgctttccgggcaggacgaagaaaagccctatgagggcgtttactgagttgagtgccgaagaacaggcggccatcgtcaagaagcggttgcaagattacagcaagaaaatctaccacaagatccacgacagcaagacaatggttcgggaggccatcatttgccaacgggaaaacccattctatgtggacactgtgcgtagcttccgagatcgaagatacgattttaagggaaagcaaaaagtgtggaagggaaaaaccgagtcattgaaatcatcaggcgccccggccgcagagattgaagaggcgaagaagatgattgttttatacgactccctacagcttgctcacaaggttatcctgaacagtttctatggttatgtaatgcggaagggctctagatggtattctatggagatggccggtgtcacctgtctcactggtgctcgtatcattcaaatggcgagagaacttgtcgaacgtattggtcggccgctggagctagacacggatggtatctggtgtatgcttccaggaacattccctgagaatttctctttcacactcaaaaatggcaagaaactcggcatttcctatccatgtgtcatgctgaatcatttggtccacggaagctacacaaaccatcagtaccagtcccttgccaacccggcgacatttaggtatgagacacacagcgaaaactcgatcttcttcgaagtcgatggaccgtacagagcaatgatcctgcccacttctaaagaagaggacaagaacttgaagaagcgttatgctgttttcaacgacgatggctctttggcagaactaaagggtttcgaggtcaagcgacgaggagagctgaaattgatcaagattttccagactcaaatcttcaaattttttctcgaaggtacaacactggctgaaacgtatgccgcagtggctcgggtggctgacaagatggctggacgtactgtatgagcatggagcttcgttggctgaccaaaaagctattgagcttattttccgaaacccaagcatgacgaagacctttgaggagtacggaaatcagaaatcaacgtcaattaccaccgcgcgacgtttggcagagttcttgggtgagcagatggtcaaggacaagggtctcaactgcaagtacattatctcagctagaccgaggaatacacctgtcacagagcgagctattccagtgactatcttctctgccgaggatagcatcaagcggcactttttacgaaaatggctcaaggacgaccctggtgacatggatcctcgaagcgttattgactgggactactacctggagcggttggggtcagtggtacagaagcttatcacgattccggctgcgcttcagaagattcgcaaccctgtccctagggtagctcacccagagtggctgcagcggagaatcaacaagcaggatgatagattcaagcaggtcaagatgactgatatgtttgggaagtctgaaaagaatccgctctctgatatctccaccaacataattgaccaccgcgttcaacatgctgataacctcgatgaagcaatggcagattcaatggaaaagctgaaatcctcgtctccccaaaaggcgtctggtaagcgaaaacatccggagaaccaaacgaaaacttccttggatccctttgccagtctgccagcgaaaatgccatccatagacgatgactatgtcgggttcctgaagtatcaaaagcagaaatggaagatccagaaacaagctcgacttcgccgacgacaactctttggtgagagggcaaacacgggaggagattccctgagtcacctctttaggaaccaagctgaactgctgtatattagtacatggcaggtcttacagctcgccgagacgtctagacctggaatcgtacgggcatttgtattgattgaccgcaagatacatgctcttacaatcaaggtgcctcgatgtgtctatatcaacctgaagcaggactctcttcctgatgtggaagttcctgaatgtgaggtggagaaggtcaaccatacgctaccaaacggacatccctctgtgcatctgttcaagcttactttgtccgaggaaactttcttacgggaagcggataagatccacgttctgctgcaacacccaagcgttgaaggggtctacgagaggaatatccctctaaacctcagagcagtcttgaagttgggcagcatatgtacctttgatgaagcacagcgcggagtgcttggagatggattagaacgaggattcgatctttcgacattatgccgtacaagctcagaacaacagtacctacaagactcacccctggcatatcattttttgtatcatgtgtcatctggggaaaagcagatctttgccatcttttcgagtacgaagaacgaagcgcacattgttatactcaaccgcgccagggacgttcaaggtcttcccaacgtcgacaaaatctactcggaacttcttgcacgcaagttgcaaggacagggggatcaggcagagggtgcattccaatatcaagagaagattcatttccgaaccacccaaatcacgacaagaagaaaggcatacttggaagtaagcgatttgatcaagaagctgcggaacgatgagagccttccagctattatgatcatacaatcacaacaaagaagtcgcctctgccatgatattccgatattgaaagaatatccgattctctcggtgaaaccagaggtttcggacatgaatctgctcctttaggttggcagtctttcattgccaagagacttgtgacgcactatctatacctctcatcctgggttcaacatcttaccatgctcgccagatacggcgatgttccgctctgcaatctcgagagtgatgatcctcgattcctgatcgatatctcatacgccaggcggctccaacagaataatgttgttttatggtggtcctcaaccgcgaaaccagaccacgcaggatacgagaaggatgacattactggtccattggagagggttggcatgccatgtgtcaatgttccaggctcttatactactgtctgtgttgagctagaggtccgcaacctcgccattaacaccattctcacttcctccatcatcaatgaagcggaaggagccgactcgcttctagccccgtctgatccgtccgccgaaagtagcgggtctggagttctttactctgagaaggcgtttgcatcagccggtgcggttgtgctacgcgagatggtgaagcactggtggtcagaagcgtgtcaaggaaataacatggccgatatcatggtgcaacacctgatccgatgggtagagagcccagcgtcgtgcctttacgaccgctcgttgcaccaatacgtgcggatgctgtcgagaaagtcttttcagcagcttatggctgaattcaggcgcgtcggttcaaatgtcgtcttcgccagtccgacccgtctcttgctccagacttccaagacagaggtaggcaacgcctatgcatacagccaatacgtgctgaagtcaattcgcgccaatccgtcattccactttatcgatcttgatatcaaggaatactgggactacctggtctggtacgacgagtacaactacggcggcaagggctgtcaggaagtcgcagagacggaagaacagccactggaaaccgtcatgcactggcagcttagccgctttctcggggttctctc

SEQ ID NO: 4207 - DNA, 3423 bp, Emericella nidulans
cggccagctttgcgacgtccaaatggtaccagtttcagatggtattgcaccggcttatggtgaaactatatagggagcctgttcgtacctacgcatggggagttgatggagtatattctgactttgttaggactacatgtggaacaagatcatcctgcacatcttcgctgccttgttctcgggatttactttctggaagatgggcaatggaaagtttgatctgcagctgcggctgttcgctatctgtacgttttccttaaccattctcaacccattcaaagcatcgaactgacgtgtcagtcaacttcatctttgttgcgcccggctgcataaaccagatgcagccattcttcctgcaaaaccgggatatatttgagacccgcgagaagaagtccaagacataccactggctggctttcatcgctgcccagacagcctccgagatcccctatctgatcatatgtgccaccctttactttgcgtgttggtactttgtcgctggattccctgtcgacgcttctatctccggacacttttatttgcaaatgatctgtgagctgcctccgctctatctgcatcagaggctgtagggctaacagcacagtctacgaattcctctatacatccatcggtcaggccatcgctgcctacgccccaaatgagtacttcgcagcgatcatgaatcccataatcattggagcagggatgatttccttctgcggcgttgttgtcccttactcgcagatgcagcctttctggcgatactggatgtactacctcgacccgttcacctacctagtgggaggcctcttgaccgaagctctctgggacgttcctgtcaagtgtctagactcggaatacactaccttcagcgcaccggacggtcagacctgcggcgagtatatggcagactttctgtcgagcaatgctgggtatctacgtgatgagaatgcgacctcgatctgtgagttctgccagtatgcgaccggggcagactatgcgaggacattcaatctgcaggagagatattatgggtggagagatgtaggtcgctcgtcccctgctttagcttctgggtggtatgctgatcgatatccctagacggggatcacggcgctgttctgcattacgtcgtacatggctgtttttgtgatgatgaagttaaggtcgaagaagacgaaggaggctcgatcagaatgaatccattgattctttattcgcgggtcatatctgagatggatttgccagtgacaacctacgcttgctgatcgcttgcttcgcaagcgacttgactaatatatatgggatagatggactgtttgcccatgtctgcgaatggaatgccatatacgtcggctattgttataatataccgagctcgaaatagactattgaaccatcaatacaatacatgaatccttgagacccttccgcacagtagccagattcctgttgcactctttccgccactgctggtaaggtatattatcgggacaaccttgcgaatgataatactgggcatgctggctataacatcgcaacgccatcgcacgacgcaattagttcctctccttgggcgcaaagctattcacgactgaaattccctaaaccggctcgggcttcaccctctccgccaggagaactaagctcctcattgatagtataaagaattctagttccccaacaacacagccatccatgctttgctccaccaagagatgcggcaggcctcaagacgcaatcaggattgcgttgctgggccaggtccgtcacactacccaacgtgaacattataggcgcaagcaagaacctcgaaataaagcctacagaaacctacactgcgcctacctaacggtcatacaactgcgcctgactcggcttggtcgggcctttctgggccgcccagttgaaaggctgggatctatatcaacgcccgccttttcagattgcgcactatggtgggtatacggtgcctgacaagcaaacttgaaatagattgattgccttcatcgtcacccagtccgcaattttcaaagcattctaattccggtccgatgtcgctgccgatctttttcccattcggtagagcgccgacgctttagggctcgctacttatgaacgcttaatgaacgccagccgatttatccaccatagagtaactgacaagcttcgtagcctgttttatccgaggcataatacaaccgccgagttcttcagcagttgcagatagagatagttcgttttaagcgagaggcgtcgtggccgctggttggtggagacaaagtatatctcaaacaggggattcttcaacctcaaacacggctcgcaggttggcaagacgctagggcgttatcgactctggaatagtcaggtagacggacatatataaattggtcattttctcaatgtctgctgtctccccagtgagcaacaacctagcttcattgactgaagtctaccctccctttcactcacaattgcgctggtcgcttccgttcacttattgatcccattcattatccatttcttttcaccttcccagtccctttacagagaaaaaatgtcccgccttgtctcctttgcttctctcctggcggctgttaacgcccacggctacgtccagaatatcgtcgtcaatggcgtctactattctggatgggaaatcaatacttatccgtacatgaccgatcctccagtcgttgcggcgtggcagattcccaacagcaatggtcctgttgatgtgtcaaacggctacactactgaggatatcatctgtaacttgaacgccacgaacgcggccggatacgtcgaggttgcaactggagacaagatcaacctgcagtggtcagcctggcccgatactcatcacggtaattcctgcccaagccagatattggcgtatgatatactgatacctccgtctaaaggtcctgtgatctcctacctcgccgattgcggcgacgactgcacgaccgtcgacaagacaacgctcgagtttttcaagatcgacgccgtcggcctcgtcgacgactctaccgtccctggtacctggggtgacgatgagctcatcgagaacaacaactcctggatggtcgagatccccacctccatcgcgccgggtaactacgtcctgcgccacgagatcatcgcccttcacagcgccggcactgagggcggcgcccagaactacccacaatgcttcaacctgaaggttacaggctctggcacggattccccggccggcacgctcggtacagagctctacaacctagatgaccccggtatcctggtcaatatatacgccagcctgtcgacttatgttatccccggcccgacgctgtacagcgcccctccacgcattgcccaggctacctctgcatacaacggaaaccggctcagcgacttctggcgctgggggtgctc

SEQ ID NO: 4208 - DNA, 4747 bp, Emericella nidulans
gacgcccagcaggcaccgacagacaatcaactcggccatattgtcaacggcccctgcacacatggcagcagcaccccagctgggtatcgtcagcactaatagaacaacaagggtagtatttgaaggccggtgttcatactcaccagatgcacaagcaagtaacataaatgtgggccggaaagagtttccagaagacggtcgtccattcgaagagcacataagagatgtagaaagcgttcaagacccaagcccactgcgaatcactgattcccaggtctttgtcgagaccagcggttttggcattgccgatatttcctgcactgtttgagctctcggaaggttaagtgtaagacagaagttggggtcctacctctgtccaaataggatagcacatagagaatacacacgatgggcaggactctacggtcgaacttgggaattgtaagcaactgtcaggccactgcctgcgagtcagaaacatagtgccataccttcttgcgtataagggcctcctcagttgccgaaacatggatgggccgttcactcctttccacatctccaaccttttcggaatggacggtctccagatgaagggagtcttcctcttttagggcagccattgtgtgtttttggagcataactgggtttgagattgagaacatcgacaacacatctctggtcctctttatactccgtaccgtcagggtaaaactctggtcggtggccgcaagcggcccgcatgagacgatgagtcgctaacccgaaaattgatggtaaagtcttgtcattcatgtcctccgcatttgctgccccatggggtatcagggggcgaggccctgtggatgactacggtggttaattggcaatacccgtcctccaagccaacctcctctttaggccatctggtccacgaccaacaacagagactcactgtaaatgaacagcaattgattggagtaaagaagtctaagtaatgtcttctttagagtttaactcctcattcctcggttgggagctcgccattgccgacagcgcggctattgccaaattgccgcatctatctggtctagaaatatccgctcttcaacgtgcagtttcccgagacgatatttatacctctttttagcacaataagtctccggctctccctcagaagtattgtgaaaacacatattcaagctatccaaaatgcccgtcccatatccttttaagttcaccacccccgaccagccaacctcctcctgcaatggcgaaataacctccctaacgatccaactcgagaatgtccgtggccgaatcccctctgcacaagcatcgcgccttcggacgatgatgttggaagcgcataacgatcccagcaagatcatcgctcacgcctgctcatacgacgggctgtcatcgcgtcttgttgaagaagccggtttccctattgtgtttttggccggctacacagtggccagtagctttggtctaccagatacagggtacattgcaatggaggatcagtgcaagagaatccaagaagtggtgcgcctggtcaaagttcctgtcatggcagacggggataccggttacggaggtcccatgaatgtcaaaagaacagttgagtcattcgcagctgcaggcgctgctggtattatgattgaggaccagacctggcccaagcgttagtgccgtttccagactatgttgaaaagcttcgctaacgcaaatgcaggatgcggacatacaaagggcaagtccgtcgttacccgtggtgaagcctacgcccgtatccaggcagctgtcgacgcccgcaacgaggggcaggacatcttcattcttgcccggaccgatgccctgatacacggctgggacgaagccctaacccgtgccaaggagtttaagcgcatcggtgtcgacgcggtctttgtcgaggccctgccggatagggagtcaatgcggcggtgtgtccaggatgttggcattcctacttttgccaatatcattgaaggtggtaagacagaaaatatctcggccaagaatctcgccgagcttggtttctgcgctgtagcatatccttggacgctggtcgccgctaggcttaagagtatccgcgagacgctggacgccctgaagaagagtatgactgaaggggcaccgccaatgattttgagctatgcagaggtctgtgagggggttggcttcaacaagtactgggtatgtaccgtcttcttgtcctcagacctttagttaaccttgtgtaggaacgtgagacccggtacgagtacaatcaggatggtctagtcaatccgcccaactgaagtttcaatgcatatcgctgtcttgtctattatcatatttgcaatggtgttctagactgaggctacatttactctcgagttgtcaagcattgactttgtacatcagagttagggctaatataatgcattgcataatacaacaggtagagttagaaaagcaacaggaagcgtaagtaacaagataccacctgatggcgatatgtagtggagacttgatcagataatggccatttgtggccccagtattatttcttctatgctgaatgatctatactgaagctatagcagctaccgcaagaccagttgcctcttcaccacaagatacattaaacttcgactatcctgcaatcacttttaagaggtagacgctgagagtggggcacatcacatatcagatatctatcagacatataaagcacccgtactatatcctctcatacactagtggctgcaaagtaacctgatgctccccatgacgtcaagggccacacgacacctacattcaatcaaccacaatgctcacccacgccaccgacagcataacatgcaagatcctacccacagatctcaatctcgatgacacctgcgccaagccatgaggtcaacggctattgtttccttccaggccaggtttagcggctggatagtgtctatagctgtgcaaccattaaaatagtcccagcaagctgatatatatctcagaaaatgcccgcttacttattctctatcgcaagttggtaacaagttctaatctgacctgacctggctcttatttatgtatctctggaggacgtcctaaacctcaaaataaataaacaatcacctcagaatgaactccgttgcgcagtcccaacctcagtcccaacagagggcagcccccgctgaagcgggcccctcgacgccctcccacactgaagaacaaaagcgccacttctacggaattctccccgaacaggaaaggaaagggaagagctacgcgcagtgggtacgagaagcctacgccgagcagtatgagaaatggatgccatggctggaagaccagtacctgaggtggttcgggaagggggataataaggcttcttacgtcacaaaaggtactcacagaggtctccagctccacgggttttgttcattcatgcgatagctaacactccatttagaaaatctctccaaaaccaagatcaccggcaacgagcaaattaatcgattgcaagacgatgcgaataacctcgtcggcaatcaactcggcgagaatggtttgcttgcacctgttggaaacctggtgtcccaggaaggtattaaccgggcggaacgcgggggaaaggacgagaatggttcttacgggggcccgctggggtttgtgacggatccggttattaaggagggcacaagtgtgggagctagcgtgacggatggtgtgaggggcgtagggaattcaattgggagtgttttgaggggaggaaagtagacaagtgtgatatcgtgaagggtccttggagtggttaaggaagagagaaggtttttgagttcagaatttggacttatggcatgtgtgcttgggattatgactgatatctgaattgctgccgtttctgttcatgtatctagtttggggtaactgtcatgatatactcgatcgatcctttatattgatctggcattctgcaaggcgtatcgtgtctcgccgtgggtggtcagtcgatatctaataaaagtgccacaaaaaaagtcacaaggcatacgtaaggttctctcatgccatctcttgtacagtgaacaggtcagaaacggtagaaagtcacagttgggcgaaatctgattatgcaatgtgggcatgccaagatttgttgctaagataaaataatgctgctctcttcgtacaactcgagagagcaatgagcttgttcatgtcgttcatctatatatcctgataatgctcgggtggtcaggcgcaaaaaaaaagatcttgacaagagtgggatttgaacccacgccctcttacgaagaccagaaaccttgttcaggtaagatcagagatcttgagtctggcgccttagaccgctcggccatcttgccacttgtatgtggagacgctgctaagatggcctcacaagctctttgagccatctaattgcagtggacgagactgcgtctactacattatctctttgatagctcagaaatgatgatagatattacatccaattaatcaaaactatgttgagtatatgctctctaagagccaagcaatatataagcatttcttctattagatgctcaaaacatcgcacaaaaaactcctctaatgttatagcacgccgtagtatgtgtgcaaaagggagattggctacaagcgcccggggctggctgcgcacgctaaggtcaatatgaaattctcgtcatctcattactgcaccagacggcaacttagtccagcagttgga

SEQ ID NO: 4209 - DNA, 1259 bp, Emericella nidulans
cggattcggaggaggaggaggtggtggtggtggtggcggattcggtggtggttcaggcggatttggcggaggtgagggcggattcgggggcggttcaggcggccatggcggacatgagggcggacacggcggacacggcggacacgagggtggccacggtggaaatggaggcggattcggaggaggaggtggtggtggtggtggcggattcggcgggggtgagggtggattcggtggtcacggcggtggtgagggtggccacggcggcggccatggaggcggctttgggggtggtttcgaaggtggctttgaaggaaagggcggatacgagggcaagggaggctatggcaagggcggatattagaaaatgtcaggcaagctgcccccaaaggacaatgaggaaagctgacagtccgctagtctgaagccactgagccagtaccatgcaccatggctaatggagaaatgatcagtatcaggtggcttgacggtataggtaatgatttcttgttgtgcggagaccagattgacagatcttgaatgcatgatatttgtttgtctatgctggtgccggctgtcccaccctcatactgaagatagacgccccgtagtgaatctgtagcggaccgagagctggttttggtatgatcatttctgtttttatcctatatttcatatttatttggttaaggggcgggtggttaaagcaggaaaggaccggcttataatatcatctctctatatcaggaactaggactgagacgataagtgatcctaattcatagagcttcagactgagttttcactctatcatactatcctggagtagatgagtcccgaaatgctttctcgcaagaaacgaaactgtttgtcccggctcactctattctctataccctagtctctatgtctatatctaatatacaacagaaccctcaatccctggtttatcccacgtagaatcgtctgacagtgtacgcggaccactacggcaaactgataaaggccaaatacacgcggtgagttgcctccaataaccttctctcttcctcgttgtaggtgccgttgaacactggctccggcgtgatcgtcccagcactaataccttcggaaaagacaacctggttgaaatcatgcacctgcacactttcagccactgtcccattcagaaggtactcccttatcgagtagactaggcccagagatgcgaggctgatcagcgatagactgtccctcctcgtactagttgcgaggtgtgg

SEQ ID NO: 4210 - DNA, 4252 bp, Emericella nidulans
  unsure (1)..(4252): unsure at all n locations
caaataccaagcatgcatctttattatttctatagggccatagtcgatagcttcacgctaagcaatataaagtgaatcgagaacagccttaagctcggatcatcgttgccgtaagggtggcgcagcgccaggggtaccctgatcaaaatcgatggcgattctacgtcgcttcgtcaatcctagtcctcggtaggctatcagttacgtggctgcaggcagatcagagccctgattcgaatacgactgacctgcgtggctgtgtttacttggacctgtaaatctgcagggcgaccgggttttgtacatgttgaccctagatcgtggctaaagccctaattgtcgatctacataacgccacaatatacgccggtgcctggatgagtatagatgctgagataacgagtgacatggttgggtttgactaaatgacatgaatatcttcaattgacctaatggcgttgccggacctgctatatacagttcctatggcagacagagctctaaactatcgagtaagctctgcaacaccgtaacaatgccatcggtgacctaaaaacatgtaaaaagaagaacacaaatgatcataccatcaaaggcgatggctgtgaattttttttgaaaaaagcaaatatcgcagaaggcgacctttcaggctgagccccagaaagatcggctgagcgcaaacgtaagctggagaaaaagacttgagaatcctagctgccatgcctcaggcgaaataaacagccgaaagtaatcccataacgcgaggcgtgtgatccgatgcccatctccatcaactttcctgtggcgcagataacggcacaccgtctagcttaccggaggatacagcagctgtgagagataacattatggatagggcaccaccatactaaatgtccttgatagactcccgcttcggtagtgttgatggtatactctgtacaggtcgtgtttcagaaccgccaagacgcgcaccaggctcaaaagacgatcgaagggttgagtggacgctcagaactcaggatatcagccccgttcaggatggcttatagccgtcaaaacggctgttttccatgctgcaggattggtttcgacttccggtggcagctgggaaaatgggatattgccgatttcatcctgctcaatcgtaattgccccccacctgactagcgaaagctgtggacacgctccgggcatcgtcgtcatcatgaatatggccgggtattccgcgtgtaacacgaatgctggcagaacttcctccaaaaatgctaccgctatcgggggcacccggcttgtaaggatcacgagctccggattctacgtaacgcttcagtcgatcagactgacttagactgggctgtttggtcatatcgttgatgctcaatccagcaaggctgacgccaccctgctcaggaccctttccgtcaatgatacttccagtaatatcagactccgtggctgcgaccgaatccccagcaatgctaggcgcgccttttcctctgttgccattggctcgacgggcaccaggcaaagaaggccacgaatctgcgaattgctggaacataggaggatatccggatggaatcccaacgccgccaagtgctgaggaatggacagaagacacatcatcggggatgtagccaacaaccgagccggtgtcgtggaactcgttccgatgaccattccttccgttcatgaaaccactagtaacgttggaaacgtggttgtaggccatctggaatcgttgaggtccgcggtaggcctgcttaggacggctgaactggatgagagattcctgtagattcgataatggcccttcgacaagagtgtgtcgttccttgaagtgctgcaggagacaattccagagaggatgcttggatagcaccttcggattacccaggataaccagaccgtatttggcacgagtaagcgcaacatttagacggcgaggatcactcaagaaaccaattccttgatggtcgttggagcgtacgcaagaaagaataataaaatctttctcgcgaccctggaaagcatccaccgatgcaacctcaatctccttataatgctcctttttgaacgtaccagtagcctgcatagagctgacaatataactgcgctgtccctcataaggtgtgataataccaatgtcctttggctgtacgccagctttaaagaagcgggtaacgatcttttctacattcgctgcctcggtacggttgaggtaagatgttccagatgccgaaatctcctcatttccgagattcgaccagaacatcatggggctatctaagataggccaagggaaatcaacctcgcgacgaaggcgatcaaatgaagtaataccgttctgcaaggacccctcgtaaaacatgttggaggggaattctgaaagacatgggtgcatacggtactggacgttcaggcgaataggcgagcaacccaggatgacaagtcgctcgaaaagagactggttaagccccgccttcgctgccttcttattcatgataacaggaccgagctgctggtggtcaccgacaaggacgacctgcttgcatcccaaaactaacggaatcatacactcgggttcagcagactgagtagactcatcaatcagaacagtgcggaacttgagctttgccaggcgagggtcgccagcaccgacacaggtacagcaaatgacgtcggcattgttcaaaatttcacgctcggccgccctagtgagttgcttcagacgcttctcgtcctgacttgacaattccccaagttcactcttgagctggttgagtttgatgagctcgatattgctgtcattaagacggacttgctcatgcagggacaagaagccaacaggagactcaacatcctcacgggatttggcggttacgcggacagtcttgaggccagttctgtggatacgctcgcaaagttggtcaacggcaacgttagagggcgcacaaactaaaacctggcctccgttgagcttggcaaggtgatagataatggtggctgaagtgactgtctttccagtaccgggaggaccttgaatcagactcagaggccgctgtagcacactttttactgcattgatctgactgccgttgagctcaggaagtccaggaacgctgaactttttcggcatctgtgttttcatcggcgcagctgcgacttcgtgacccaataggcgatggaaaatgtaacccgagacgctcatctcatcaacagcgaaggtcttcattgcaagctgcatgcggtcgaaagaggtcgacttccaaacataatcggctgtgaagttatgcgtacattccgtgggcaccgacttgtgatctccctttgcccgcaattcaatagtaacttcgtcagactggttattagggatcttgataacgtatcctacaccttcccactttggtcgcaactcgccggtgtatttcaggcgcatctcgtctccaacggccaatttcacatctccaagttcgagcttcggcaggatgaaactagccaaatgcttgttgttaagaccaagatcccagcggacaattaagccatcctgtgattgtgactccttcagtttgcgatcgtagtctgcctcgattttaacaagcgggccgaagatgttctggtactggaatgcgtcgtcatagcgcaaaaggaccggtgcaggttcatcatcgacagctgtggccttttctagatcagcaattgtcgcctgcgagttttccttccacatttcctctagtttagcaatcatttgtgggctcaggtgacgagcccgaagttgctcttgatcggacggggcagccaccagccatgtcaagaacgaacgatcctcaataaggggctgccagcgcgaggtatcccagttcatgtccttggaagatggcatggcggcgcaaggctgacgacataagagcactacaacggtgtcggacttggcggtgatgaatccgaggagaaagacattcttggtgccacagttatagcattctagaacggtatcaccaagcgaggactctgggtgtagttggacttccttgtgcctagcgcggacaagatggttcacgatatgggagaagaatgttgccacgggccctacaaaacctttgtggagccaaacatttgcaacatggttgaatgttttccaaatttttttgattaacanacggttttcctttttcaaatttattccgcggttcccgctttattgggtttgggaccctcccgatttggggggggttttttttttttattt

SEQ ID NO: 4211 - DNA, 2515 bp, Emericella nidulans
tagccggctggtttggggtggtagcaggtacataccaacaaggacaatggcgatccacagaccgacactgacgggcggattccagtattcaatgatcaaccccgaggcagtgacctacattgtcaggattccaacatgataagaatgataataaagccattgtactcacttccgaggccagcagcatagcaaatgaataccagtagttatagccggaagcaaacccaatgctgggttcggtgaagcggccgatcaagtacggtactgagacaccgcgaatgggcaggtaggtggtcatctcgcccaggacgttcatgacaaaccagacaatagaggccatgacaatgtagctcatcagcaaaggagcaggacccgtctgggtcagcactgtcgaagtaccgacgaagagaccagtgccaatacatcctccgatggcgagcagctgcagctgtcgtgatgacagaccacgcttagttgctgtgtgctcttctatttctccctccaatgtcttggggtctccatatccgtactggacggacggggtgcgaccctcctccatgctcttggccgacgggggactcattttggtgcctaagtttgcaagaacgtaggcgtatgatgagagaagagtcccggctgggtgttataaaagtgattcctgagcgggaagaccccagattgctgagtcaacggcttatcatttccagcacgagataatttttactcatggaatggtttgtgggagattaaccctattggctccgcggttggtgcccaggggtgatctgtggggtgccccgaggtgcctaattcggtgagtagatagagtctacgggttgagactgggcgtcgagggtgcctgataggggtaacttccgcgatattgtgagataatgctgacgctgagccagattactactcggtaactggcggcttccgagagaattcgagtttcagtgttgatccttcgtcattaagccatgctggtccccgtcgctgtacagaggacatggtggcaaagcagtcctcgcttggatcaggttcgctaagatcagattctccagactccaggatctggaaatgattctggggtctccgcataatatcccgcaaataggtaatcatttacatctgggattctggatcatatgtttggtcttgcacccggtccttgaagttgtttccttgactaatgggatcctcactgctacagactgagcctacggctttgctcgattgcttggcataaaattccctcccgctaacggctaaccaaagcttgatccactggcaacagtctctgaagcgcttcgattggccactgttcacggacggtggagaccatctaaagctagtactttctgagactagcatagctgccttaggatcagggctagaaatggacgtgcaatcggtcatcctccggtggcagaggccaagaaccttcgaagaacaggtagcatactcaacaacataggcaaggactatatccaccgagcctactttcagcgaaccgaggcaacaagataagagaacataagatgccccgcaatcctttgtctgttgaaacattgcgaccgggccggttactgagctctcaccggtggggtatctgtcaccggcccgtgaaccggcgcggcatctgagatccaagtccaagctgcatgaacttgcatccgaaatccaggtcccctgcggctcaggtggtcatttgatgatattgagatagctatgatctctactacgatgagaggtaatatgtatggatagagattgggtagctggtcgggtgttctggtctggcaaagctatggactacacgtgcgcgttgtttaaaggatgaagtcaacgggtggtatagctacagtcgccacaatacctaggtatattggtatagatcctcttaatcgaaatcaaagtcgttcttgtgcctggaaccgcattcctcttcaggattccccatcatgcacaagcagatctctgtgctggttaataatagcaaatggcaaaaagcatcatcccgtgtgaccacagctgacctcttgccggttcgaagcggtttctaccggcttctaccctgtccctgccattgattgtatacgttgtttgagctacataatcttcaacgcaatcttacagaccttgcaagtatatctttaacagcacttcattaatcttatcatcaattcatccacacccaagctttctgtcatagaacatcgctttcgtacactttctaccacaacatgaaggccgcaactccacgtccttcagtgcgggcactctctagcgggcgatcttatcgcaccgccagattcgtcagccgaacaagcaacgcgaggtcgtcactcgctgccgataccaacagcttgctgcaacaggctcctccgtcacctaagaagcagctggcctcgccgctagcaaagctgcctctttcctccgttctccgctccttgctcattctctctgtttcctctcctctatactgctaaagcgatgcatctacacgctctca

SEQ ID NO: 4212 - DNA, 3232 bp, Emericella nidulans
  unsure (1)..(3232): unsure at all n locations
gcttttttccgccttcaaccaccaccatttcagtctcagcgtaacaccctgcatcgtcccgtcacaggcgattgccatatcatctatcgcctagccaaacgctgctatcaacacctcgctcgtctgtttctttcgtcaactatcgtgagcttttgtacgtcgcaacacctgagttttcccccacaacaatggcggataacgtgtctgcttcgacttcgtcaacccatgcgccgccgcaaccttcaactgctgcctcgaaccaacagtacgatgcatcccagggaaatggtcaaaccaatccctcccacatgccaccgccgccccgacctcccgtgattatccctcagaacaccaaccctatcccgaccgctatcaccacaccgatgtctgggaatatggtgtccccaactagcgctggcggatatgtgcgtcgtgcagcccctgaaccaaacaagagggctctctacgttggtggcctcgacccgcgggtcacggaggatatattgaaacaaatctttgaaactactggacatgtcatcagtgtcaagatcattccggataagaacgtgggtttccagactttgagcgctcaatttagttactttcgtcggaacattacttactaatgggaacagcagttcaacagcaaaggggccaactacggtttcgttgagttcgacgatcctggtgctgccgagagagccatgcagacgctcaatgggcgtcggatccatcagtcggtatgcgccaacacccttcacctgagttatctcaggctgcttctaacccctcttacaggaaattcgtgtgaactgggcgtatcaatcaaacaccgccaacaaagaggacacttcgaatcacttccacattttcgtcggcgatttgagcaacgaggtcaatgacgaggtcttgctgcaggcgttctctgcctttggctcagtgtctgaggctcgtgtgatgtgggacatgaagactggccgctctcgtggctatggctttgtcgctttccgtgaacgcgcagacgctgaaaaggcgttaacctcgatggatggagaatggctcggctctcgcgctatccgctgcaactgggccaaccagaaaggacaaccatccatttcccagcaacaggcaatggcggctatgggcatgacaccgactacgccatttggccatcaccacttccctactcacggcattcagagctacgacatggttgtccagcaaaccccagcatggcagaccacatgttatgttgggaacctcaccccttacaccacgcaaaatgatatcgttcccctcttccaaaactttggctacgtgattgaaacccgtatgcaagccgatagagggtttgcgttcatcaagatggatacccatgagaatgcagcctcggccatctgccagctgaacggctataatgtcaatggtcggcccctgaagtgcagcgtatgcgtctcaccaagcccaatctccgtttttgtagctaattatcaatagtggggtaaagatcgccgcccaccgggtcagttcgataactttcctggtcaacaggccaactcgcccttcgcctccagccaaggtccgtacttccctcaatatggtggccctgggggtcccatgactcctcaaggtatttaccgatccctcgtacccccctgtctgtctcgatcataactaaaattcagcgatgtttttaggcccagcacaagctggaaggggttgggagcagccgcagatggcccagcagggcttcggtcaggttccaggcaacaccggttatggccgtggacaagccacacccaactctggctggaaccagggaaacaacgccaattttggaaatggcttcgccggcggctaccaagcgtaggtcgtcgttggctcaccgacaatggtctgaattgttccctgccatactgtttgaagtggcagcgtctttctcccctttctcttacccactctattttttaaaccaccttttaaatcccttcggctcctgccacatcttgagttctgccactcctgcttgtgcttcttgatgattctcaactggatccccagcgccatatcccattctcgaattgtcttgttttctaaaatatgaaatctgtgtgttctcgtgcaccaataccccaagtccacattgttgccaaatttcctctgctctttctttgaacgatactgcactacttcgatcagagctaagcttcttgggcttcggattcaagcgtcctgcggaataaactaaaagtacttccttctgttccacacatggctgagcccgttttggaccttgtatctgcttaaattgtctttgatctgtatcgtatccttttcgtatgtacaagtggtcttgggaaggccgtttgtttctgtctgataatgcttcttcaatcagcctttttctttgtttaactagcgactcgaatttttctcttgttccatctttacttatgataggcgttatagatcttccatgtcgtttatcttctagtcttaagtataccccggaagcttcagattgttatataatcaataacccagctattacaatccactatatcttcgcgctgagtacacaaatcaggttaagtccttgcggtcacatttagagcatctccccgccgagatggggaagccgcggggagggatcagtagtgtgaccgcctatagtccactccccttttctgcccctgacctctaacatatcgaagtccaaacctccttcacgcgctcatttcacttgtcacatatagatgtggatggactcgcagacacgttattagggccacctggtcaatggaagatgcaatcgacaggaaggctacggcaccgtcctctgacaatgaaggccagccctccgggcgaacgcggtctggaagcgcaaacagcggacacaagcgcagctcctcgggctcgttgctctcacggctttcatttttacgcatgatgcaggctagccagaatccttcgggtcgaggccactccagcctcgaagcagacgacgaccgtgatgacctgnggtccgggttacgaggcgggaggcccatctctacagcgccgcaacatangaggacgcgaaggaggagaggctctttaaggaagacagctctgctcggcacgcggtttgactatcgagataagaaggccggtagacagtgnncaaacgttcggggggagaatgccgaccaacaccaggttcaatccggagcgcagcagcacaaattaaccc

SEQ ID NO: 4213 - DNA, 3824 bp, Emericella nidulans
accctcttattgttcctgaaaagcctaacatactcccgattcaacatggtgtaatgtgctccttgctcattgtggaaacgcacgtcctcccgcacaaactgcttccaggcacttaacctcccctccacccagtcgattcggtcctttgcaacatggctcaaagggtccgccacaaacacatccatacacttgactgatcccgagggttcatagtccaccgccagactctgcatattagatgctagacctacccagagaagatagtactcctctgaaaggccgagctcgtcccaccgtgcggcatcgcagtgctggcgcaggtaccggatggcgtccagacggcggtttgcccgattaaactcctgcagagtaggtttatgcgtatacgctgccagctcggtcatcagaccgacgaagtagaatagatggatcacgcactcctcccagacgagctcacgcatgcggaacttgatatgcggcggaagattccagctcccgcagtagcggacctcatcgccgtcctgttcgagaagcttgctgacttcaaatgccaccatcccgccaaacgagtaccccgctattgcgtagggcccgtggggctggcgttctttaattgcgtcgcggtaggttgtgaacaattcctccagtgaggtgaagggggtttcgggcaagccggccgccgcgttgaagccttttgcgcggaaggcgtaaacgggtcggtctgtaatgtgatgggccaggttcacgaagactaggacctcaccgacgcccgggtgtaccagccatagaggactcttggtcccgtgcggttgcagggtcacgacggggtcgtagacgtgcgtggaagactgatcctgtgagcgaggcgcggcccctgttgcgagggcgacggctagccccctggctgtcgagtctttgaggatgtctgttaggcggaggggctgagaaggctgtaggcacttattgatgcggtggatgatagcgactagatccatcgacgtggcgcctattgagaggattgaatcgttgacgccaaagctgtcatcatcagaccggatctccagctgttccttgataatatccagaattactgcttcatccggcgtctctgggctcgcacgggtcttttgctggtagcgtcttatagcctcgtcgttgatctgctgctgcgtagcgaactggccttcttccagagccgtcttcagttttgcgcgcgacagttttcccagcgtgctctttggcatatcctgcggacgcagcggcactacgcgcggccgggaccgcgtgtgcatggccacgacacggatgatgctgctttgcgtgctgaacctggcttcgtcatcgctctccacataagatggaaggtagagcacaaccacgacctcggtatccatggttgcatcgcggctgctgaacgtgcagaagtaactaggtgttgcgcctgggatctgcgcctgctcgagagcagcatccagttcgtacgggaggtatttgactccattgatgttgatcatctccttcgtgcgcccgtcgaggtgcagattgccgttgctgtcaatgaacgccagatcccccgtccggaaccatccatcgctggtgaacgcctctgctgtggcggcaggattattgtagtaacctttaaagacaacttccccggttacttcgaggctgccgcgctcaccgggggctgcctcttcgctcggagtgtcaagccgtgtcacccgcattcgcactccaggcatcggtttcccgagacaggcgaactcatggcgctgggcgtgatcatagcttgggcagtgcgagttgaagatacatccggccacggtttcggtcataccgaaggagggcttgaaaacgttgtcgggagccccgtaccggctgaggagggattggagtgcaatacaaacctctgtgacgttcgcctcaccaccggtatcaatatagagcgtctcaaggttgaggccggggtccaggatatactctggactccccgactccagctgtcgccgcaacttggcgcagaggaagttcggcatgaacgtgcgcgagacgcggtgtctgcttatcaggttaagaagctgagccgggttgatgagaagatccggagcagggacttgaatctgtgatatgccggacacgatggcgaagatatggcagtggactagattggcgacgtggtccatgtgcacccaggagaggaacgggctgcgggggaagcggaggctggccgcggtggacttgcccctgaaggccgcaaggagctgttgatgggtcagagggacagcttttgcgttgcccgctgctcccggaggtcagcatgagggcaagcatatcggtcgaagacggggttagggcaggcagaggtgcgtcagcaacgtccgcaatttcgggagctgcgaggatctcatccactgttcgagctttgatccggtcatccgctgtctgctcttcaaagggggccaagagggcaggccgggtcagacagaccggtgaattgagcgtctcggacagatgacgcagatgcctctctctatctgccgggttctggctgaacatcccatgcccggtgagggcaggtatgcccccagccagaaggacagaccagtaccatacgatgctgtccagtgcggactcaaagtgaacgaggacaatggacttggggctacatagcttctgctgcaacagtctggtggcattcgcctctgcctgatgcagcagatctttgtaggagactgtctgtggaggtgatgaggtgctgatgctgtttgggtggtatactataatgccctcatcggtatgagcagcagcatgtcgaagagcgtccacgatgttgccaaacgggtacttggctgccctgagcggtgcgatctcggtcttgcttggtgccatcttgttacagtctaagaggaggtcctagcctggccagaagggtctcaatgagtgagttatgagtaagttgggtgagccactgtgcctgtttctccgcactcaagacactttaagtatgcagcctgccctaatacgagatattcccgtcctcgcggggtaagtccaaatcaggcccgtgttgcacaatgacgatactattattattactcgttcatattacacgctgacgggatacgaggttgcattccgccacacgagataccaattcaaggtcacaaaaggacaagctgcagccgggcctggaccatggggcgtatatatgatgacagtagagtactctgaaattccttgcaaacagtcctttcttttgcgcagaaactgtcttcatcatggctacagaatactggtcccgtcatctacgctcagtgctggctccgctgttcgctgcagctggcacatactctcctgaagatcaggagtcccatctggccttcattgacgagcacattgcgcccaacctgggccctctcccttgggagccccatggaccctacagcactccttcctccctcgtgggctcccccttcgaccccagcatcaacatcgtctcatccggaaaggccaaggtccgtttcgactttgacgtgatcagtccacctgatcgaacaggcccagacccctttgcagagggatccgccagggagatcctccaccgtctcgccgaccttgtcggcgcagacacacagtggatgggctacctcatggatgctctctacctgacccccgcggaggctgaggttgcgaaaacgaagttgcctccaggtgttgctatcccgcccagctcagtgggcttcgacttcgacggccccgagcggacgctgaagttctacatccccagtgtgcggaaagcgctagcaacggggcaggatgtgtcc

SEQ ID NO: 4214 - DNA, 2159 bp, Emericella nidulans
tcacgtcgaatatgcctgataacattagcagctttgataatggtcttgataatggtcttgacaaccattcgattattattatcatcatggcatctcttcttcccgtttccctcggcccctccccagctcctcagtctcccagcgactctcctaaagcacaatcctgctgctgaagcatcaccatcaggacccgaccagagatcaggattcaactacctgaacctcgtgtagctccacggccacgccactcaaccccagactcgagccagcgactgcagccaagcacagtccaatcgcgtggtgcggccgttgcccgatccatggggagatgcgaccactgtaacctcagctctcggctcccccgtttttgtctcgatccggtcaagactcgttatcgtgcttgtcgtgattcgccatcttcaagggaaacgcgtccatgccttccttaatcctcctgaaggccgcctcaggctggcctctcatggcccatccctatccctattaaagcaatctcaaacgctcatctccggtgcccaacccgtctttttttccctcaatcatccctttgttcatcctctgtcctagcctctgcccttctatcctcgggagctctgtagcaatgggcgttgaggaaaccaagaaaggcctcgacgtcgaggccacctctgccgctccgcctccgtacgtgcaggatggccatatcctgagctacgaagaggaggacttctggactcgaaatggtctgaatttcaagtccttccagcggcgccctgcccacgttgtcgagctcaaccggtccatgaaaacgcgccatatgcatatgattgccattggcggttctattggtatgctctatgcttgaggccccaaagccgctctaacggtcgcaggtgctggttttttcgtcggctctggtggtgcgctcagtacgggagggcctgcttccttgctcctggatttctcgatcatcggtattatgattttcaacgttggtaggtctttctctcgagtattcttcctgttggtgtgctgaccgttcagtctacgctcttggtgaacttgctgtgatgtaccccatttccggtggtttctacacttactcgacccgcttcatcgatccttcctggggctttgccatgggctggaattacgtctttcaatgggccatcatcgtcccgctggaactgacggttgccggtctcactattgactattggcaagtcgatgttagcgtcgccgtctggatcacagtctttttaatcgctatcatcatcgtcaacatttttggtgcgctcggatatgccgaagaagagttcttgtcttcgtgccttaaactcggcgccattatcgtcttcatgatcatcgctttggtcctggtttgcggtggtggcccgtcggatggtatgtacaatgaatactggggtgcacgactctggtacgatcccggcgccttccgcaacggcttcaagggcttctgctctgtcttcgtcactgcggccttctctttcagcggaacggaactggtcggtctggccgccgccgagtcgaagatcccaccaaatcctgccgggcgccatcaagcaagtcttctggcgatcaccctgtatgtccccccttgctgcaagcgcccgccatgacgcgccatatctgacagtattcttctagcttctacattgttggtctcttctttgtcggcctcctggtgcgctctgataacgaacgcctcctcggcagcggtcttatcgacaccagacgtcgccctttgtcattctggcttacgatgcaggcttgaagggatacgatcacttcatgaacgtcattattttaatatccgtcctatccatcggtgtctccggtgtttacggctcttcccgtacccttaccgcgctcgccgagcagggtacgctcccaagtttttcgcctatgttgatcgctccggccgccctctctggtccgtgctgattaccatcctgttcggtgttcttggatacgtcaacgtcagctcgtctggtgaggaagtttttgcctggcttcaggctttgtccggtctagccgctctcttcacctggggttccatctgcttggcacacatccgtttccgcagagcgtgggcttacaatggccgctctctcgacgagatcctttagcactggctgccg

SEQ ID NO: 4215 - DNA, 1749 bp, Emericella nidulans
gcatataccgtaactgggacagtttgcgagagcacggactgctgcccgggccgttcgagaaacagcggggacagctatggggcattctatatactagtaagtagaagccgtctctggagtaagtgattaacgatgaacgctggggtaatttcttgcataggccagacagaagattgaaacatcctcctagccgtaaccgccgtcaatgatcagtgagccgaaatgtttatttattctaacaagccctcggaattgagccagttctttcccagatctcgtatgtcaacagcagtctcatgaaaatgtggaaaacgcagcctttcatcacgctcctgccggtcctcctggccctcctgggattctcctgcggagcagccgcatcttctaagcaaccctaacaacctcaataacacagcctacctctaccccgtcacagccccaaacacgactatctgctcgatcgcggctaccaccaaccgcggcatctgtgatatcgcgcgccaaaacttgacggtgaagcgctcgtacgccagcttggttgatcagaaaatgcgccttgacgtcagccatattgacaaacttgatttacttgcaggctatccacaagctcgaatcagcacatttaggctggatacaatcagaaacagtttccaagcagcaggactagtgccattgaattctgaaccagtgctttcaaagattagtattcaggctcgtacgcctacaccccctggaagccgtggctgccaggaaagcactttttgcccacatataccagcaaatgttgatgagcttctaaagcaagcttcttcattcagagattttcttaaacagcactcaacaagtccaccatcactgtcctataatgccctaaaccagctaattaagggctgtcaaattgcaatgcaaaagggcatactattggagcaagagaatagggcgctacatgctgaaaatgccatacaaaggcgaaacgagctcgtacgcatagatggatagctcataataatggtctgtctggagaagaggccacagagctctaggaagctcataatgcattttttcaggcaatacctggtccatgcgggccactagcagaaggtgcacaagcaccaaagacacgggcattacctacatgtagtacttgtaatagaattgggcatagaagaaatacttgtccaaatggataataattaatataaaggcgttggggttgattaaaaggtcaaaatataggaaatctgtatgcaggtgcgcagttcgcttaccaaccacgttaactacacattccagctaactggaattacatcgcatcactatcttcttctggtagaaggatttcttcgatgcttttctttgtcaaagtataaggaatctccattcagggcttgtgattcgacaatgataaataggtccgaatcgattgaatagaaccagtctgctttaatgatagtcgagatgatggagcggtgttttcgtaaaagaaagcgtcaaaacagcagcttctaactccagaacatctgttccaccgttgtattagtagagtccacacgagtaaaatcaaggcgttcgcagatgaagtcaggctctatattatattcaaatccgtaaagcctagttatacgcttggcagcctatcgtcccaaacagattttatagagcttccgggatccatataatcttcgccaggcgagcatagtggatgtcagtcacctggcggtataatgagctgttactggacgttggccc

SEQ ID NO: 4216 - DNA, 3136 bp, Emericella nidulans
acccagagcaggaggctacagccgcgtgcaggaacccagcgctgccctggacatgcttagctttcgcactattgtcttcgggatcccggcagatccctcataacggattcgtcgcggggtctaagtggtgcggattcccaagtcatgttactgtcgtatgagctcgcgagtctgtttttggactcctttttagctaccctctatggtctcttgccggtctggccgacagaagtcttccggcggcgcctaaagcagctgtatgggcctcgccccacatctagcatggagacgcatcactcagtcttgctgatggccttggctctaggcgcgctggtatcagagcaccatgcatggggcgatgttttgtacgagcgtgtcaaggcgtcctgcaatgttcttgacgacacggtaaacattcagacggtgcagcttttcatgttcatgataagtcttccgatcctctcagataagatattttactgattttcctacgcccacttccagaacgaggtgggaagaccaaactcatgctacctccatctgggagccgccgctcgaaaggcaatttctgccggtctgcacaaggaatcacctcaggggaacggggatagtgcagagtgcgctgaggaaaggcggaggacgttctggtatctttacatatatgagaagtaagtaggcccgctgtcgtactgcgcagtcgctaatcggacaaaactgtagctggatatgcttccatcttggacggccaagttcattgtcacggagagacgccgggattcctacacctcaagaccctttctgtttggctctgttgaacctttccgctgctatatgtcgatccgccgatgagctgtacggccggcatcacgagtcgctgttgcaaatgtggaggattgccaagtcaatttgggacgatttgcgggtctttgactccaagatgcagcgcgccctgggtttcgggcttgataaacgccctcagccaggcagcgtaggagttcaacaaacaatgtgtattacctgtgagcttttccccgatctgatctgagtgagttgctgatcggtcaagtatactatcacaccatcctcctcaccttccgtccattcctcatcttccgaggccgatggaatcaggacaggacacaggcttctgaagaggtcaagacaaaacgggaaatcccagactggcttaaccaggcttgtggttatgcgcttagtgcagcctgcaggactatccatttcctgtgtgagtcttacacggcaaatgaactcgtcagggtaggttgtcgtacaataacacaaaaaacttagcagtcagctgacactgccaggcaatacgataccatgcctatttcctgtccagttcatgttttgcgcttatcttcgacctcattcatggcaaagacctagccgcttctcaccttccctggatccacgcaaccctcaaagccctgaaaagcatgtctccagccgatgcagttgaagcatccatccgtgccattgaaacaatactcaagcagctcgacccagcgtacgaatggggtacgcagacgcaaactgagccgcggaacccgtcttatacatttaaccaaggaccaagtacagccataacccggtcatatgatgtgggtccgacacagcgcaatcgtcactcgccctccactatatctaaccccggtgccggctcggatcccttgttatatgacttccagggcaactcgctcgaccagggcatgcatatgccagccacgactggaagtacgggaactggtgaggatttacttgactttacactatccgacatgggttgggatttcgacttctccactatggatctggagacgttttgctcgatcaattctgtcttcgaagtgcctatggcgtgagtgttgcctgggcttaattcaacattagaacatctacaacgctggcaatgcgtaagttccctctcacactggtgctagattcatggctatggctccagcgcctggaacatgcatcgcagccaggatggctggaccagatatcttgagatggccaactaatggatgggaatcactgctacataccccagatagggtaattcttgggagagggacagggacttgtcgatggcagcacagatttaccacctctgctatccaaatttcagcttctacctcgccggaagatctgccgtccatctcaaggatcaaaattcacgcaatcaccgatcgcttttggtcgcccattgcaccctctatgtgacttggtcatactaggtttcaagggattggtaatatggttggtagcgctacggccagaaaggctcccacacctattagatgtacctacctggtactcgacataataccgacgatacccttttgctgtaaaataatcccactaccggctcagtagcttttggcagccgaagcggtgacgtatctaagagcaatagatatgtccattctatacttcttgcattattagacgcctgtcctgtcgtctacctcaccatataaccctagccatctcgtgcctcagacactatctcaggaatattctccacgaccatcaattcgttttcctatcgtacaagagaccagaaatagctgccacaacgagagcaccaagccgacgcaccacaaccaccttaactcatatttaccgccgttgccggcatgagcgtcgggggacacataagaccaaagagaatacaccaagggtttacaccctcaatgcccagcggtctctacacttcaagctattccacgctgcagaagtgaagttcgtcatcccaacactaagctcgatgccgctaatagttgccttgagctgcttcacggctcggtgaatgagcactatcggcagaagagtggttggcaatgaaagtggctttgggatacagcctagaggatgcgagtatatcccccagtaacaagtcgctctgatccctgcactgccaccaggaaacttcgacggccagaatttcttaaatagttacctaccatagccgagagacgactggatgagtcgccctctcatcggctgtattgaaaccaacccactggtgcagtattgaacaactgcagcattgaagaccctttgctagaacgtttataccattcagattcaatgtttgtctgacgtgaactca

SEQ ID NO: 4217 - DNA, 3090 bp, Emericella nidulans
catccttataagctctgatgtatgcgaatgctgtgatgtatatggtcctgacctgtcaatcaagctgatgcgctgttgtccgcaaggtcttgttcggggttatcgttggcggtgagtcctcttagaaagcagataagatagtgtgaataaatattttcagtgaaagaaatcagtcaaaaagagcgaagagaacacaaaccatcccgaataagggcgctgtgccaccgacttaagtgagagctggagttggagctcgccgtcagtcactcccttcgcccgaaggtagagcgggtgaggctgcggggtcgagatggagattcaggtccaccagctcaaatccacttaagaggcgatcgtcccagaattctttaatctacggcgcagacaagagctttaatccttcgagttcggatcatgcaaccgacgccgtgaatagtggatcacatcctatcctaatatgaggtgcgccggacaagaaacagctaattgttatgcatatcgtacaacgagcgagatcaacagcttccttctccgtacaacggtcaagcttataatcggcaatttccgtcttacaaagccattatccagagctgcccactgatcatttgcgggggctagaagcggaggtcatgagggccactaaaccgaagccagcacacacctgagatctggctcatgccgtttccgtcgacctcgtgggatagaaccgggctgttctcctggtctcgccactgacaatagtcaagtcgctgtggttcgcagcagcgcgcttcagactcgccgggtgagttctaactcacgcaccgagccgatttgccaacttatatggaaggtggccacattgacgtttgccttccatttcttcaccttcggaagaacgaacactgggacaggatacgtgttgcagctaatgagatccgtcattcgcctgccaatctgatcagcggcatgccagacgaatcggcatgatcccagtcaactgggcttcaggtatgcctttggaataaataagactgccgatgcttctaggccagctttaagcagttatgcagcctgatcgtctcaagacaggaccttctcaaggacgttaagaacgttaatgagatggcgcttagtatacccactaccctcgaaatgcgtgcgatatcctccgctaatggtcaaacttcgtggatggtcaacactggtgctggggaagagcagtaattacatccacagtctccgtgccatttgattgtaatggcactgcgaagggctcatgaccgggtcctgaagtcggagcatgctgccggggcttgggtttcttcggattcagcgcttatcatcacgggaagtcgtatttcgcaatcccattctttcatttctccctgatcctagagatacaggcaatacccttgctcgtctccaaccaaatcgcgtcttcaactagatcgccgatacagcctcggttatgagagtctcaccagggtactaattagttggacgctgactctgcataaaccgaaaaccgcttgacggagaggagaaggcggagctagaaactggcctgcattgttagctcaaggagctgttggagtcgtatactggtccctgtaaacaagctgttagtcgtgagtaactgtggagagtttcccttcataacgtgcttccaagtggtcttgcaccttgctagcaaagggggccgggcaaattgggatcaatcttccttggcccactggatcaagcggagattcttctcattgtcgtgacatttctgtaggattcttagtagcggcgataaatggtgtacgcggtcgagaccacgaacgactcctatgaggtgaggggaggacgatttcgatataagcggcctgaatacaaaggtggaaggagaaatccggagctgagttgctggaggccctttagaaggggctggttgtacaagatgaagccatcgtgagtgagcagcgataagcgaacgcccaaatcttctctgcagcccctccatcctctcgtttcctccaatccaaactatttacacaatgctccaaaaagatggccagcagttgccatctgcgaagcccgcctctgccctcgagctggcaatattttccagtgactcaccacctcttcagcacagcaatgcggaaggatcgccaactctaccagaatgggtgcgtctagagtctagaattcgccgcaaaacagatctgcgcctctgctctatcgccggaatcctctgcagtctcaatctgctggactcgggcatcctcgcctccgcctcagtaacgacattgctatccgacctcgacttgcagggccagcgctactctgtttcaattttcatcttcaccgtcgccagcatcgtctttcagctcccctgcactgttgccgtgcgctatgtcggcccgcggctctggttcgcgactatcacgttctgcttcggtctcatcaccctatgcacagcattcgtgcaaacctggcgccagatgatcgccgtccgcattctgctcggaatcttcatgtctggcatataccctggtttgacatacctcgttagcacttggtacacgaggcaagagcagcagttgcgttttgcattcctgcagtcgggtgaagttgcagccctggcgacaggttacatcgtcaattacggcttgaatcagctgcacggtaaagctgggctcgaaggctggcgttggatgtacctcgttcagggacttatcacctgcgttattgggattgcgacatactggtggatggttgatttccccgaaaatgcgcgaaagagcttccactttcttacagagacggaggcgaaggttgcagtgcagcgcatccaggctgaccgcggggatgtcgttctcgaccccttcgaatggcgaaaggtccttgtcaacttcacggacccaaaactatacggctttgcgtgcatgtacttttgtctgaatatcgtctccacgtcactcaattatttcctcccccaaatcatcgagtcgggattaggtttctcgagcaatgagtccatcctcctttccactccggtacctaccctgacttcctaattttaaggaagggcacagcactaaccaaaaccagccctactactgg

SEQ ID NO: 4218 - DNA, 3945 bp, Emericella nidulans
tagctgcgagacagttggtagttggagatggacgattggatcggggagaggaacgagcgtcaagaaacgagtggatgggagaggcagctctgcccgccagaacaacagaggctcctgaaccataaatactaataataagcagccaatgagttctgaccctttagccgccacttcaaggcgaaaatcgaatggttctttaattttccttaacaacgcgtcgggtggaccgtcgccaaaaggggtcgccagaactgcactatcgaccttagtatagcgggttggctccataaacccatcaatttctatttaagcaacactaatcaggaacaggaatcaataattatccgtcgtccttactcttgccccctcattcccgaatactccatgcataaatgcggctgtttacagctccagagtccagcttcacgatgctctctcttttcggtcctcgaaccgccttcacgtcgatatcatatcccaagcactcggactgaaagtcaggagcaccgtcttatctcgcgaacatttactagaagcttgatcccagattgggtacgctggttgctaattcctggttgcggacgatgatcaacacccttgcatatagaaacccaagcaaaccgactagagcaagccacatttcattaccttcccctgcatccacgcgtttgatgctcgactgcaacgattggtaatagtacaatggctatgcgggtacgttggtggtgaagagtccaccgacgcgtttgaagtagatgaggcttgccaacccattatagagcaagggacgcgtttgacccttaatactgctgatacgaatctccacattctgtgcaaagtgaggtggcttgcgtctgtatcaattgatgcgttccagatgcttggaaagacttcagatggatctcgcctggcatggctgatagtgggggtttgggacgtccaccagcggtacgaaacggacgctgggatcccagcaaaatgttatcgttcagctgcagcaagcgcgtccagttggcagtgccaacggcggcccttttctcgtccccagcagtgcggctatagaaggagtgtcagaagggcccttctattggagcagacattaccgtaccgcgctgagatgttcatatcaaaccataattgtcaggttgtctcgtagcagagcatttaaatgtgaaccaaatacatatcacgacttcgtggcgtcaatcaatacgatagacaccattcaattggaccgatttagctattctgttgtaaatcgctagataatgcaaagacggcgagcatcaatttagtgtatggagctcaatctgcttaggtccccacatcggcgaccgcgatctcgagtctcgaccatcacgttcaagacccaagcacccgctatatcacagtaaatggaccttcgttatatacaatacagctcaagaaggcatcagacggaataataatgaaaacatgcgtttccgcactcaagtggtcaacaccgccacccttaccagtacgtgcactcccaccttaaaagaacgaccgtgtcaaccgtgtcaaccgtgtcataccgcgtagcaaatgtgattgtcacgatcatcacctaacagcatcaacagagctaattggctctctctcttcgctcggcaaactctgctggatgcgccttgaggagtctgtcgtccgattcaccataatccccgaccagggaacccaggtatgggcacaattacctgttgtacgtctatccctatcatgttatacattcctcgatcacctcctttctgtacgtttcattaacagatgaacgcagtattccatcttcgaagacgcagactatatccttgagtccaatactggggtaataaacctcgaggtcccgcttcctgcacttcaccgtgcgctgcgctccgcagctggtgcgaaatgggtgcagctaaggttgacaaagaagggcaaggtgccactcctggcgcttacaatcagaacgaaaagttggacgaagggagtgaatccattggggattggaagtggtaatgaatcaatgcctttgccttcagaggaagcaggagcaaatatagcggcagaagcaggagcaggagaaggtctaatgggtcccccagtagcccccgcttcagcttcaaggagcgcaggaacaggccggcgcgaacgcgaaactttcatcacgcaagaaattcccgtaaaagtgatgcacgaaagcgcagtagagggtctacacgaaccgcactgccgcgatccagacgtccacattatcctgccagacctcttccaactcaaaagcatttcagaacgtttcacgagactagcagcggactctacgcccaagaccgctgcccttgcagccacaacgtcaactacggcagatgccgtgcttggtagcgtcggcgccggcgtgtcacctaaacttgaactctcggcgaacatgcacggctcgctgcgccttgcaatagcaacggatacccttcgcatctccagtgtgtggagtgatcttgtgaatcctgctcttgatccgagtcaactatcgcagactcagatggatcagttgcctagtgagcggatgagggctttacccggggataatgaggcgggttgggctaaggtaaggattgatgggagggattgggccagggttcttagtgtggggaggctgaatcctaaggttgtcgcttgtaagttccattgttgtttttgctgcagctcagttggtaagcagattgcgtgcgggcgggtttgctaatgtacttgatggtcaggcgtcatccatgagacggcgctgatcctctacgtatatcctcccagtgggtatgatgagaggggatcttgcctaacagtgagtagtccctgttcatttgaagacttacggttaacgttggacagtactacatcaactcctatatgaattaacacgactgtctacaagagccatttacgcaggaaactaagtatgaattgatgcaagtcataggtgggaggtattattataataagtgtagctcatgtttcatacaacaagcagcgtcgggttcactcggaacggcccgaaacactgccatcatcacattaacatagggaataacaaagaaaaaccacaaaaagaaaagggggaaattaaaataactggaaaagggagttacgataaatgtacatgaagcatagatgcaagaacgacaaaacagtcgtatcatcagagaacaagaagccaggccatacttccggacgatatggcatgcaagttcacaacaatgtaaggtggctgatagttcgcaatgcaagggtatacacttcgatatgcaagatggggaagatcccggatactataaggcagagttggaagcgatgttaagagcttcatctgaagactcttattgggccattacatcaacataccggcccttcttcctgcctcgagaagtggcgcccttgcgtgcctgtggtgctccaagtaagtcgtcaattgagctagcatggctcaaggacgtagaaggcctgggaggaggcccagcagagcttcccgggcgggatgaagcgttaccagcgggcggcacggcgccggtagaggcagatcgcgcagggcctaaaccaggtgttggtggaaggccaagagaagatggagccgggctgccagacggcggcggcgcaacagacggtggccgactaccgagacctgctgttccagacggtggcatgctgctcccactggcggctctgctaggagggcccatggctttcggtgggggtggagtagcacgagccggggtagcgctgttggggtctttcttgttgacccatttcttcagctctttatcgtagtagaaagaactttcctcaccaagcttcgcgcgaattggttttcctgaattagcttcctctttatttcctcccttgatccatccccaccacgagctctttgccggagcaggtttttagctcaacatagta

SEQ ID NO: 4219 - DNA, 2934 bp, Emericella nidulans
  unsure (1)..(2934): unsure at all n locations
gtcatcaataaataaattgtgattctgccatacggtgcaaacaaaagtaaacgccagcccatgccatgcctagcgcctattgttggtaatacatcagaaggggcctaggaaacaacgtaacagacaagaaagtacagataaaagatgagcaagcatcaatccatgctcattcattcgtcgtccgactctgcctttgacttgctcttcttctttttcttttctttcttttcggatccatcgactgccggctcgacctccgagtccctcttccgcttcttctttttctctttcttttccttcttggccttctccgtctcttccagctcctccggcgccacaaacgccttctcccgctccttcatcttttcctcgcgctttatccgctgcctctccataacctcttccttctgcgcacgttccttggcctccttggacaaaaagtactctccagactcgatctgcagatccaccttgctcttctccggcgccggtgggaagggggtgtagaccttcttcgacttgtcggtgaccttgaatggcgtgcggcgcttggacagtgtgcgcttcttgaagttaggcaagaatctgtcccatgattcatgggctagggtggggtccttggcgagttcgcgcttgatcatgagctctttgatgtggtaaatggggtggatgttcgccatgcaatcgtcaacaattcttcggacttccttcagacctttgtacggtcccatggcggagacggtgtttccttgcacaagaatgtaggttcctgttaaaagctcgagagccttgagagttgagccttgcggaccaaggatacgctggcgacgcttgacgaaacgttctttgttgcggacttgatttctgatcttaatgatatcgcatgcgacaccgtcttcgagaattttcagagcctgcagagagtggtgttagattctgccatgggctgggatattgggcagtggtttgaaggtatgacaacctacctgttgtacaggaacacttcgcgataacaacttgatcaaatcacgagctttgagaatcgcagccgggtcgtaagtcttccgcgtggtcttgactgtcatgctaccctcgaccaaatccaatgtgcaagcgatcccatgcttctccagcgccctcgttacaaccggccatgcttctttcaggtaaacctcgcgatacttggggaagagcgtagcaaatgatgattcttcggcgaaactaccaccggcgttgtcttctggtttaaactcttcgatctatcataggacgcaggtcagttggagaagaatgaggattctgcttaagtgcagacgcaccttccacttgtcaatatcgtccgtatcccacggcttgtccttgttgtttgtagacggcattctgaaggtgttaccgttggttgaggcggaccgcaagactgaacgatgcgaaattcttttgatggcggaaacatttttggtcggccacttaccgagaacggaagtttgtggcctgtataattaggcataaataaggcaccaactggcggctaagactcccaacattcgatccttcgatcctttagggaagcaagaaagtatgctaggacctcacttatctcttactattgagagagctttattttacatcgtctcgaccaaactgcggaacagctccagcatatgagggccggctagtcccaggctcccagtcccacggagctcagcgggatctgcctccttgaaaggacgccagcctttgtctgtataggtgaatagacatgccatgatctaaggcacgagccttgccgagtgcacgctaagggccaaaattcacgaaaggtaatactacttagtctcattccctgttagacataaccagtagtgtatggcgtaccaatttctaatgcaaggtcttgaccttgatccagacaattcggctgtaattgacacaataagctggctctttgacctaagaatggagaaagctccaatatttgcgagattgaaacagtggtccaactcgagtaggtaacaagatctgcattgaccagcaattagatattgctatttcgatatacagcggccgcggcttttgctaagtaactgcatctaagtatgacgatgcagctgtcggaggatcctccttaactctgtgaaagggccgatgagctccaagtagtttcagggcatctttagagcttctagagatcctgaaatcgcagatgggatgacatggatcgagattctgtactcctatagcgccggagccaagctcttcatgaatcgagtgagtgcattgttgagtacgcctttcagagaaaaaagccattagctcgcgtggtgctaggatacagagagccaaatccagtcgggaagtcagtaaaggaataaatccgatatgtaccacgaatacggacaagagaggggttctaccaacaattaactgtttggaatgatgcaagaaaagaaggttcaaccgcacccgccattttggatctttccactcgctctcatcatccttctttgtacatccaccccctcgctatttcatcatgtcttgtttctgattaacccgggatgttgcttggttttctgtttggggtggcttccgataatctgcctatcgcacaattctttntttcttggatggagtgtatagccgccccgattccgatgctgtttcctaagcagaacacaaaacgcgtttcccaacagtttcctgacataacatttttcgtactgcatgttaaattttgccttccagttggagctgctgcctaccttgtattggaagcaaagggttggtgaatcctttaatggacgggaaacccatccaaaatggagtttgccctcaaacaaagaagtgggttgttttttgaaaatggccctcccgccttttttcccttggggaacccctcttggggtcgggggntnnnttttacttttctctttt

SEQ ID NO: 4220 - DNA, 3582 bp, Emericella nidulans
aatttaaaatttttattgccaccccttttaataaagcccaaaagacccaaggttaataagggaaaggggttaatctttattggggattaaatgggggacaaaagaaactcttcccttttaaaagtgaaaaccttttttacccggaaaggcctggattgcttaataacggcaaaattgagggggccaagaacccggtgtttaaaccccattatgttgacttaaacccggggcatttattaaaagaacccgggacaaatgggtaaaaactttacccacaagaggtttctgttgggccacaaggaaatatgtttcacgttccgaaaggttccccgttccaccttgagccaagataaacagggtggccagctctaagtatgtcagtttaagaaaaggaaatcgctaagtgttcctgcacttggctcttctcacattcagcaatcagttccttcagggcagcgcaaaacaagccagcaagctgacctagtttttcccgccctagctctgcagacctggaccgaagacgaagctttagctgctgttgctccaagaaaggttcaacaaatgctaggcacccgtgaggaagtatggagaagtcatcctggtggaaaagctcatggagggtatcagctattggcgctgtcgttctccccagttgccccatatgtaacagaacatatcgactgcgatcctcgactcctgatatgcgagagacattaaagaagcccatccgtgtatccttgactttccgtaggaatccaagtccaccgtcctcttctgctctttccacggaccggcggatgatattgtcgaagcaccctactgtagctgacagcttaggaccgccactgtgcctgccgtttgagattataccaaagctcaacgtctcctccgacctggttactcctttaagtgcgatatgtagtgcggcaacgataaaatcctctggctgagtgcgaagcacagagtggatgctttcatcctccagcttcgccagaccagctgcatctgtttccaggataaccacatcagccaactcgattttgccatcattttggtgtctattgtgttgtctttcatttgtgttccgctcatcgtttgtgctttcgaccggcgtcgagcgtctgaatgtaaagtcgcttaggttgtgagtggaagcccaggagtcaaacgaagtctctggatacccgcgagcaagcggctttccgagtactgcatggtccaaatcgcgctgaaggatatcccaagacgagacatcgatgatggcccggtgaaagtcgagccgaagatagcgggcgaggcacgtgccgtggtcacggtctttttgcacaaataccgtggcggcgaagagtccatcctctctcttcccgtccgcttcccagcccacggtcaggtatccctgctctgcttgcgttgagatcgtcggaatctcgattcttcgatgggcgaaggcgtcgatcgtatcattgtatgtgagtcccaagtcattattttcaagtgttgtaaagttcgctcggaggatggggtggtggctgacgagcaatttcagtgccgcataaagcgtcgattctgcgattccaccttctaacttgaaaactttggcatcccaagccttcgtcgaggcatacaacttctgtgcctctgttaatggcttcgtccgtatctcggcaggctgcgcaggcccgtccagcaccgggcctgagctgagcttccctggcgcgctgctcccctctgctagttttacagactggcataactctcggatactcgtcgcttggagcatatcgttgatggtgattgtataccccgcctccccgcagcgcgccatcagcttgattgcgagcaaagagtcccctccttgcgcgatgaaggacttgtccaacttgatctttcccaccgggcggcgcagcacctctgcgcaaatctccctgatgtccttctcaacaacctcattattcgtaactgtcggtttggcgaaccggtgtcgcaaacgtactgtgctccattgcaaacgattattatgattatgattagaggccgctatcaaaggcgaagaagaaagttactgccgttccaagctggtctcagtctccgcgaagataaagccagcaacaacgtgattatcgcagaacgatatatccaggagtattactgagctgagtcaaagtatgaaagccgtgagcggtacatacgctttggacctacgcgaagacagctgatcaacaatgccgctactccagaccaccgtatactccaattcgccgaagttctagctccgtatccttcgtccttatccaccaaagtgtcgatcacgctgttccacacctctcgaacgagatctgtgccttcggcccacttgaccttcctcgtcttggcacgacatttctggtatccgcagcaaagcgggccgggtttggaaaagttggaattaagaggaaccttaaaggaagctgatgccgctttcatgatccaagtacccgtacgtattgaacctttcaggcaatatccacgaattcgatccggagtctgaactgaataaagaaaatgctcgtgacgtatcattttcccagcgcagggagcaggaaaccatgttcctcgtgaggttcataggagtcaagtgggattcgatagtcggaaaccttcacctcccgaccatctacatacttgcttttcccttaggaaaatcgggtatgactacagcggcttcatcatcactatgtcaaaagcaaagcacactctggcttacatcgattttgttttttacatcgacattgttcgcaatcatactcaaggtatacttaacgtacgattggtggatatattccattggtgctcaacaacaaccacaagaagcattgaatccaatcatgctgatcatgagagacgccctccgatactggttcgcacgcgagcgatcccgcgagctagtacattaagctcgggacagcccttgaccattcaatcattttcgctctgatattcaagagttttctcagtctgaaccggactgatggaaaccgatctaatcggcggacgtgcccctgatgcaataatgacttttgcttttgcttcttatccaggtctattttatgtatcttacgtattagtttttatccttttttatttgcgttttccttttttgtctttttttttttttttttcaaaccgagaaggacgggacgcctagatcatttggcaggtaccagaaccacattattcatgatgcgacgagtccaatattgtcggagcagcgacgatcaacaaggcagggctggcaaagatcaggatcccgactttaagcctgctagctgctgggtggcggggagaggcagagctgcaagttccagaagcgagatactccgagggcttgtttactttttttccccgattgcgtcaactcctgcacaagaacaagccggccaatggtctattccacgctgggccgtggcactatcgaccctaatgcagtggctctatgggggccgacgtgtccaagtacagatccctggccttaggtcccagtcgcgatttagcctcgttgcagcttgattggtcgcgaatccaacatctggttcctgactgttt

SEQ ID NO: 4221 - DNA, 1389 bp, Emericella nidulans
ttatagatagtcttaatgccgtcttgggaggaacttaccccaatgagggcgactcttcggaagatggtcattttgcctcgaatctaggtcaaggttgctttggtgttgaatgtactgatgaatgaatctgtaaattctgaatgcaggactaatggcccctatatatggtgtcaatttcgtggatctcgtcagcacgagcgcgggaattggctgacatctgcaactggcgcggtcgtgtggctgatatcagccaacaacacaacccttaagctcggcacaggtttctctgattgagctcggatcgcggatgcagacggattcaggatagttcttggttatgcgatcagccgatcatttattagcgtgcaccctggttgggctgttatagagtggctgaagagcatcaagccagtccgacggccagttcaaaagggctccttttcccgcagttttagttatcctttagttatcctgtaggatgggtttagcaatctgccaccgcctgctagcatgtttcagtacaatgagccaccttttagttggaaaacctgagacaacaaaagaattcatttcatttcattatcataatcatgatagctcagggcaacccttggtgcgtcttacacagcggaattcctagagttcgaaacagcctcgagacgaaaatccgtcgtgcgcagaatccccgtcggcatctcaggctcttcatgaaaccctgaaatcggtgtttcactgtcactcccatccgcaggatggtgcaaatccgtcgcagtgtgcatcgtcgttgtcgtccaggtaagcggatactcgacgtactctcttcctactcttgcaaatgggttgtattgctggtgctgtgagctgttggagtcgagtgtcagtgcgaagtctctgctacggcctctgcttcggctgccgtgtttatgcttgcgtgataagctttgtactgtaacactatcacccttaagcaaatcattcggcattgatttggattttgatttcgatctgttggaggcgcggcggacgatgatattgaacaggggcgtcagggctgggatgcacgcggctaggatgatgagatactgttcgagtgagacccagattgtgaggtttatggtgtcccaggtatagtcttcgtaagaggccatgtcgggaaggtgcgttgctttaatgatcgcggccaccattgcactataatccacctgttaagactgttgcccgaacaagaacagaacctggaggggatggtgaaactaacacgaggccgagcgataggacaaatcctaagccgagcttgactttggttggcatctggagatctttgattgtgagaggggggcatatcgcgaggataggggtcggaagcgctgatgcagctacacatgccac

SEQ ID NO: 4222 - DNA, 2454 bp, Emericella nidulans
tggggtcagcggttggtaccgactacttcctccagaacctagagacggagaacattcacatctacctgcatgaaattggccatactttcgctttggatggtatgtgcccatttagaccgacgtagatgcacaaatcactaaaagaaacagacttttacgactggacccctaccggtgtcgcaagcttcatcatgctctccggcagcgccaccgaaatcactgagttcgactactggatgctccgcgactggtggcgaaacctcaaggaccgctatgacctgtctagcgtcagctcttctgacagcacctctagctcccggtcagctgccacgtcttctacccctgtttacgtcccaaccacaacggcggcggcaacatctgcacccgctggatacgtctccctccccactgaggttgcagctgtggaaccttctacttctacgtctgccgttccgacggcccccacgattcctgttgcgactattaccggtgctggatctgagtctgggaacgaaaacccttggagtggaagcggctgggagcagccctctcaaggacacccttggtgggctgggaactcgtggtggaggcagagagctgaatctcgctcttagatgcttaagggtgagttgttgagatgtaatggccgacaggtggctcagtgctgcttattcgtgcgcatcctgccatgctggcgtgtatatgtcagtcataagtatattagcgacaaatgtgatcggacaggcgtgcgaatccacatagcactgtctgacgtggtagttctctgtcagcacgattttcaacactgggatatgcaaagccttcatcacactgccaatctctgtatgatccgcctttagtccaactcatcaagtaaaaatgtataggctccgcacccttgtgtatatagtacatcacgcatcgtaacctgagaacctaaaaacaggaataggattcttcgccgcctactgaggtatcattcattgcactcgctggtcagaaagagagtagtttgcctgttccatacgatatgttacatacatacgcaccacagtgagatatcgtcctggctttgttatggtgccactcccatgccccgagctcgatgcggagactcgtaaatacagggcgactgagcccaaacgagctcaactgggaatgcttctaagccggactacttgttcatatatccccagtgtcctagccgttcttagttcaccctgagacaaggatactatagataagttcgttgtttgttggggcgcaaagttgattcaatacctgaccctaggatgatcaattgaggggcattcaagttacgagactctcaacaatactacgaagactcgggagaattacgagactagtaagtagagtggtttgacttagtgaggtagaggatgaggccgggtggccttaccaggcaaatttccagggatgcacttgtagcactatctttaaaggtcagcgtacagagagtttgttaattgttggactttaatggcaatgggagtccagtggaacagcgagactctgcaagtactgagatgggacacgctgcagctgcacctcaccggattgactgaaccggaagatttggaaaatttttcctaatctctactccatgtatagagcacaacgactgagcgccccatacactcggtaacggtgtagagggtgtggatggcagaaaactactggataggctgtgttttcgtggcaaggataaaccaagcgtctattgccgtcgttgtttctgtgttttctagtcatgaatacttggcttagaactttcttatcatccccctgtcatattgggcacgagtatctggttcatcagtctggttgtcataccgggtttgttagtgcggtagtccatatggctagggttagtcggatatattccttgagcgtagccgctagcgggagtgtgcggggtttggattgaaccgatgcgcgggtctatcaaccggataagcatggagtgggcatagatacacgtgcatattgtaagtcaggagccaacttaagagattggctcaaaaacaagagggtaactcggcttggttaatcttaccgcatgatgtcagaaagcgatcatggtaaacatgggaatctatttgccttttaatgaagacagcagtagatggtccccaccttgtttcaaataatatggaatgtactttctctcatgcctcttgggagggggccatctcaacccctcactctgaggatgaaccttccggtctcttccaccacttagtcgtgttaccttacatattaagggttctacattctaggggttgtgttgttattttttacaatggtccaatatcccaagcacattaagctccctttttactcgtttattgggtttttcattggaatccctattattttctcgttgtgggccatattgggataattccttttgtcgcaaataaactaacccct

SEQ ID NO: 4223 - DNA, 1106 bp, Emericella nidulans
tgcgaggctatggggtttgcagatggtggtgctggctccctagggctaacggtttttaggtctgcctggaccgaatttggtcaattatgcaagcccaagtgctattatatagctagtttaaattatcttctcggtttataagttgctcttgatggaatcttaaggtgccgctttattcgctcggctgtgagaatatatcttaccaagggcttgtttgaattttcttgtcttattgggccaccagccttctctgagctaaacgcacccttaaatgcagttttaagccttttctcattatggcccgtgtgttcggaattattactaagcatgtcctactactgtgcattatgatctcgattgaagtgcataatagtcttggctttatgcacccgggagtcgagagttcgatcccgcctcaccgcatcaaatatggaattggacactactggagcagtagtggacaggaatgattgagatgaacagggttcccactgtccctactgatcgacattccaagccgcttgaccagattccaggattccaacgttaaggaacaatgggtagcaatctccaaggtttatttaaactgtccagctgtcatgatcccgcagaaattgtctgtcgcggacatgtcccattgacttctcgccgagtctagagtcccgtcgtctcagacttagcctcgatcgtgagtctattcttgattgacttcttggtctagcgctccacctggagtcttagttccaaaagctgacgtctgcctacacccagtttcgttacttgtgaaacggactaaacgcgtcatcagagctacccgatcttcaacagcttcccttcgctacgaggcgtgggccgatgatcctccatactctctccttttaaacgaactgccaacgtcgatcctcctcccttttcgtcgtttatttcgctagacaccgactctgtgccgtggtttaaacgcccctcattcttcatcccctccgtcgctccgaccgcctagctgtctctcacaaaagccacccgagcaccgtaagaaaaggcaaacaggaggaacttctgataagatgaatgtcatccgtgaagctcggtcggtttacgtatagact

SEQ ID NO: 4224 - DNA, 4696 bp, Emericella nidulans
  unsure (1)..(4696): unsure at all n locations
ctagatacacccgacaagacccacgaaaaaagcccgatccaacctgaagataacattggaatggcatcggttttcagacgtaagccaggtcaagaccatggctggatgcccattatgcaaggccttgatacaaagcaatgaaaacggtacttgttaggtcaaccaaaagactcaaggtcatcgggccgaagacattccacggcaggtgttcgatgcgtccgcggacgaagcagaatcatggagtatgtaatgcgttgcatggggaaaggcagctgggcacattatcggcgagcgatatgggggcttttgaaggggtctttgctcggtgaggtttcgaaagagggtatgtacactgcattccatcaaggagtttcttggcagatgtatacgggagaaagggattatggagatgaatgttatggagttggtggactatttgctagaaaagtctaggtaatatttcgaccatattattcattttattagtgattacgtagtagtccatgttagcctcgtcaacatactgtggctgagagattgctctttgccttgcaggtgagctagcctgtagaagtagcatttcagaaatagttctttttgagcaccattatcgtaactttgagaaagctcttccaggtaccagtttttagacctacctaattggacagtcagcattgatgtcctaggcccttgtgaagagtgacttgtaggagaggatgaaaagagtgagcaaacccgtcttgagaccactgacttgccagttttccttagagccaatcactaggactggacgccgagacaatgaagaagggcaagagacaagtccctttgttaaaagcattattccttgtacagatcggttttatcaaagctgaaggaacctttctcggctacttgaatgtccacttacaaactcaaaagggagcacaccttcaaagaccttttgaggtgcctttgtggctgttatctacaatgctgctgtaaactgataacaagtatgtagaacatatataagacgatctctcgcgcggttatggcagtatagttgatcaacgcaggcccatcagccacaccagagaccaggccattcaacaacgtctcaaagtgtctacgtacgagacaaccgcaatatgtctattccttcttacaacgactaccaaatctggatcggtgtagttgatgatcacccctccctagaacttgaagagtacatcgtcgccctacacaagagcaacggcctagtctgccactggttctcgacgatccgaacattagacgggacaatcaagcatttcagtgaatcattcagccctggtggagcagaacatctcgcctgcgagcaactgcgcaaaagaatgcttgtttctcacctttctgactggcagcttcgtaagtttgtggaaatatttgaggaaacccaggctcgtgagagccaattttttatcttccgttggctgtatgattgtgtcgactctggcatcctcaaggaggaggatgtggatagggtcaagccctggcttgattttgcggcggagagttctcatgctgttgacgctaacaaataagatatgcgtaccgtttgatgtgttggtcagttcctatcagagctttctaaatttccgccgttatttactgctctattaatcattcaatgtaagcttttctccccgtatatctaagcactttatctactttctcctaacactactagtaataagtttatctcaagtgctactacgtgaaccggctgtacaactagccatgctatttggcgccatataagctcggcaacaagatgttgtttggttgtttttaagtccgcaagtcacacgaaggcgcaagcatacaaagcagggggtagagctagctctcggaccggacagggaactccctatcctcctcgccgaaacagctgagttgagccatccatacagtcagatggtgccttctaacgcaagttgtcagctttttcggtttggtctggctaatattggccaggcccagacataaaaaggtcagttcatgcaagggactgccatgggttaccatacaagactataaagcgttgagcaagcttgctattgttcgggtatacaaaggcagcgcttgctagccaaatataggactaactaggtatataagccctaaaagccgtatagatatttgcgcacttgttaggcaaacggggcactgtatgcacctcgtgctggaaaactgcccaaagccctagcaaggctcaaacgtgcaacacaccttgccgcacatgatctttctccaggcgtagtgtaacttgatacatctgtcgaagtagcatcctccgatcagcaagcagccattcacagtgtctgaaacgatcctggatatcgcggttgccgttgcaccttattggcaagaatccaagggaccggcacgattcaagggaatgagaaccgccaatcattcttttgtctccattgaccgacagaattgatggcatttaccccgtagggaatgaagggatcaacatcttgattggaattcgaggaagaacaatggatgggaaaagaggggtatcgctatcggatcttttacggtaaatagcgatcttggtatgacaccagacgaattttaatacctcataactcagggatacttctctagttgtttgcgtcaatgtccctgtgtgtgctattttcccctcttcttacttttacccaagaacccccagccccgatgagctacaattccagcaaccatggagaagatagatgaatcacctaagacagttcacgtcgatgctgaccacaatgaaagcgagcaatagcaaccagcaccaaggaagcgcaggctgcaaacgccgccgagcacctcatgacagtccggccagccctgcgcgcgtacccctaggccgtgatctggtcacttacaatacccatgtccataatcatgaaaggctacgacactgctctgatcggcagtttttatgcgcaccctgagttcaaagtatcagtttggaaaggaatacgcacacggccatgaggttcctgggggagtggcaatctgccctgggtgctgggggaaacgcggactgcattatcggggcatttttgaatgggtatcttgttaatcgttatgggatcaagaaggtttttataggcggcttgctttttatgtgtggttttatatttgtatcttttcttggaaagtcggtcagggcgcaggtcgctggccaggttctctgtggtaagctccatgtccttccaaacttcaaaaacgattatgccaaccatggtactgtaagtataccttggggcatctttgcgactatagggcctgcgtactcttcggaacctttccccatggccctccgcccgtacctgactgcctacacaaacatgtgccttgcaatcggacagtttatcctcatgggcgtcatgcaaaccctcgttaatcggccagacgagtggtcctatcgcattccctacgccgtgccatggatttggccggcactgttatgcgtgattgcaatctccatgcccgagtcgccgtggtggcaggtccggcatatgtagcggcagaaaagacagtccaggaattgatggcaaagagcgagaaacacaatgcgcgccaggttgtcgccaaatctgtggcggacagagatcgcctgtgtcatctttgccggacaggctctctcgggctcgcagtttgcatattcgcgaacttatctctttgaacaggcggggatgagcgcaaattattcctacaagcttgcgctgggcggggcggccatcgccttcatagggactgtcttgtcttggttcttgatgaaaggcttcgggaggcgctctatgtacctcggtggggtggcgatgatgtgcgtctacctcttcaatattgggatactggatctagtgcgggagatggccggtgtaaaatgggcgcagtcatcgttgtgcattatctggctgtttacctactttctgagcgtcggaccgctgggatggtccattgcgccggaggtatcctcgacgaggcttcgttctaagacgatcgtgctggcgcagaacacgtactatatcgccattgtggttgcgaatgtcattgagccgtactttataaatcccaccgcttggaactggctaggcaagaccgacttcttctggttcggcactggactcgccacgttgatttggggtttctttaggcttacagagacgaaaggcaggacgtttgaagagctcgatatcatgtttgctgccaaggtgctgacgagaaggttcaaagcgtatcatgtcgatctatacgcggaagacctcaatattaaggacagtgcaaaggagagtaggtagggctagttgaaacagactccgaggataaggccaagcaagcgtgaatggagctctttagtaggacctgccacgagctagagtaggacatatcttgaggagacaacgttgaacactcgctatgaatcaatgtagacggccatcatatccctgcgtcatgggagtttgtccccggaacagacccagatcgagggtagcactggcgcagggtggcagagacggtggtggaggctgtacgctgtgctccaatctactacaataaacgcacacacccttgcgatagatctcacttcctgtcttcgaccatcctgtttgagtattgaggaaaagatagaataccaaagnaagctaggtaggcattgtggcgcgga

SEQ ID NO: 4225 - DNA, 2429 bp, Emericella nidulans
tgagggcgcggcaaagcgttagcaaccataacaatggaatcgagactcggtttcgtgttcgagcttgtaggtatgatgggattaccttccactgcggccggaaaagctgcggcgagatgatattgcccagtccgtgtccgacatggtaaagggcaatcacagtcgtcttctactctggttattgatacgaagaggatctgataaagtagaaatctcgttaccccaaattccgtactctattcatgttgctttttgttattgaatcagtattgtggcaagcagttgctgaaaccaatggctgctactccagaccacaagctttctaaagtccttatcgcaggggcaggaatcgccggcctcgcaaccatgatttctctttcgcgcatagctgcgattctggatctcgagatccagttgtatgagcaggcgcccgagctgctagaaataggggccagtattgcgctcagtccgaatgtgcgaataaccctaactgatatttccatgtctgccgaactgaccaggctatatcgaatagggcatgcgtactctagagaaactaggcgtccacgatgccctctcagacgattttgtcttcaaaggaccaagtggaattctccaaatcgttcggtgcgccttcaaccctacatattgcctcggtctcagccttcagccaaagaagagggcgaaggaagaggcgtggaaccaatagccagtcccaagccactggaaaatgaaccaggtcgtctcagtcgacacccaccgcaacgttcctaacgacccgcttccatcgaggccacctgcacgccgcactgctggagcatgtgccccgacagtatatccacctaagcaagaagctcttacatgcagatgcagatgggaacggcgtggtattgcactttgaagatggaactactgtgcacggagacatcctcgttggcgctgatggcttaaatcggtttgttgcctgtttcttaataggtctatgcaggatgagctggttactcgagcggtgctgactgaagtagaaagtccgacaatcctttatccctcactataaactccgcttcacgggcaaggtttttaagagatccacgttcgacgcatcgttagtcgtcgggaaaattcctgatctaccggaggattctttgcactgggtaccccaccccacagtttggcctcattgccttctgcaataatgaacgcatgcatgagcagagcagagttctaacaggtgatattagtggggtcccgaagataacttcttcgcgtgtcgtctgggttcgggcccctagaatcataaattgttcttgtagaaatctgacgagtcccaagcaagggccaatatacaaccgtcggcgcctacagcgatcctcgccaatatgacgaggtcgaaaaacgatagcctggaacgcaagaggtaacgtaaacttcctgggggaaagatataaggtagtataccctgccctaccgtccatcccattcaattccactaacacccagcagacctggcacccactcaccagagcactaaccgaggcaaccccttatacaaacctctaccccaacttcgccggcgacgctagctcgacttgggtgtttaaagatcgggtaacgctggttcgagacgcagcgcacgctcatgaaggagcgtttgcggctgtggggccaatggctttgggtgatgcctttgcattatggctggcgttcaggtacatcttgactcgggctggacagccttgcagtaaaggatatattggcattgaaggcattaagaaggcgctggagttatataagaggacgaggaaaccgcatacgcatcatctgttggaaattgtgcatgcacagctcaataccaagcttgttgcaagggggtctgaggatgaggaggatgaagagtggattaatcgtatgaagggagggcctgatacggagtggctgtcagagcatgatgtcgaaaaggcgttcgcacacgttgttaggcaagaagatgagagagtacaggccctgacagtgtcaaggagtaagctttaaacatggtacagatggcgggactctgttaagccggttgatacctttcttttcttaagtaatgtcttgagacgagctataacttactcaatattagccttgctgtttcactatttctggctcgctttccatgtcaagaccttgatgcagcattcaagcccagtagagaacactgctctcatgcgatagatacaaaccgcagactgtcccatatatattgaatctggagggaaagacttgcattgattggaacacagcccgacagttcgacctgtaagccagaatatctgttggagaagatatatggcgatacgtttgtggtcgaccattgatagatgctggaggtcacgtagatttttcgcctttaaatggttcgtgaggttatcaggagctttggggag

SEQ ID NO: 4226 - DNA, 3094 bp, Emericella nidulans
  unsure (1)..(3094): unsure at all n locations
gactcaaatacctcagtttaacattcatgtcatattaagtatattggacactggggcattctgtgcaaactgttgatctgagacatcaatacataaaggatatatggaatacttgtaaatcgtcgtgactagcccactccaaacagctacttgatatcgatgcgctttccagtaggagccccctcagacttcggaatcttaatggagagaacgccattcttcagacttgcatcaacatggtcgcaatcaaccggagtaggaaagttgaacgagcgtcggaaatctcccgtcgaacgctcgacataccaccaagtgccctcgttaccttctttagaagacgaagactcactgtggcccttgatgttcagagtgtttcgatcagggaactcgatttcaaggtctttcttttccactccaggaagctcgccgtccagatggtagctgtcctttgtttcacgtaaatcgaagcgtggtgcgtaggctgtgaactgattgtcgaaggaccggttggccagggaggagtcgaaatcgtctagcgctcgcatgagggagaacaggccccctcctgggcgtcggtgcattaaggaggacattgtgcggtactgagaaaatggcgattgagtaatatgggtgtggtgatacccgggatagagaatacgtgcaggtactcttgatcgagcgagtttcagcatctgtttgacgcttctttgctgcaaattagacggaaattatcattatatcagtcgacataatatctggtcctgggatgaacaaggttgagatgatattttgaaggtccagtagctagagagacgaggtgtcatgcaaccggtggcgatatatcataagcagtcaattacgttaagatacaaggtcagtgcagctgggacacgccaccacatattgatatacgcagttactaggaataacatcaacgtcttttcctggtcttgatcaatcgtagcgcggggaagctggctgggagagtcccgcaataatgaaccgcttttctacaatgttccagacaatgttccagaactggtgattacatactcgtttctaaccttgcactgtatgccgaaaattcacgccggccagatacatctttaccgacaaaatgtccaatagcatgttatcgtcacggtttagcttggagattcttagtgtaccagtgacaccacgtttttgctgaccgggctgtccttacagatgataggctgctgagatgtgagtatgaccctaaccgtgacgtagtatctattgagcaccgataatatcctttcttcctaaggtgaggacatcttaccatacgcaaatcatgctagttgaattcatggctcgctcacccatggtatcgcattatcgattactcgtgtccagggcacgttcccatataccttgtcacaacacttgaagacgcaatacggctatgaatacgattataggttgtacaaacttgtcggccggccggttcggccggccggtatccacccggctgattaatgcttcgaagcattatctgcttcatgatttttttggtggtgtgcttggtgatgtgctggtgtatctttgtaactggattgaattaactgtaagttctttttagtagccctttcaagtgtcataagttgtctaatatagctccttgaagctttatcttcaatgagtgtcaaggcacacgcacgacatgatagataactgtgttaaaagcggaatcttccgataggagagcgtatcctgaacggtgcaagcaagttttatcttggcttgttagatatcgcgcactcttagccaaacgactgttttcgcttgtgagaaaatgtgttgggaattctattggacctgttgtttggatggtcagcttactccgacttaggaacttgatgtagttctgacgaaagacctgaatgccaataaatatgatccatgccagcggcatgttcgactctgagaacaggaatttctcaaccggccctaaaacaacacaattacacagtacatagtacaatcgagaagataatatgaacacgacaagccccatacaggcattggctgggttcttaacgaatccgcattgcggcctcagctatactcacagctttcagctcctgggttttgacgacagacacgagataattggtcccatagtctgatgcagcgtgtacaatgacattttccccatacccacagtctgtctcgttgggccccgcctcgctatactccgcaaagctttcctttgtgattccatccgcaggagagagcaacaccttactcgcaagctcccttgccttttcgtatgaggtggaggtatgctgaacatcgatatctcgcatcagactcccttcatcaccgctgtactccacgctggcctggataacgtagtacagtggcacagagactcggccatctgggaggtcactcgtcaatccagcatcattgggcgtgtttctgatccggactcggaagattgttccatcgggagccttcgcataaaccatcagacccgcttcgcttgcaagtcttgagacgctagtttctttatccgtctgacttgctctgctctcgtaggtctcaaaccattcctgttcgtaaccggcatcaaaaaggcagctatgcgcggctgccttggccgccgaaagagagatgtatgttcctgggactcgcactttttcaacaacattgaatgggttgttgtggatatgggatgtggtaaagagaacgtgatagagatgctctgggatgtgtttctcgcccatgatgttgatgcttcttcttgccttgtcctgctatatccagaaaaatattctcaatctgcacgatttaaatgtataaccatcctgtcacaccaccagttggcactaaagcatgaccaagagaggtcgatgtcggccgagagcagagccgtggaactgcggtggcatgctttcagatgatctaatagacanacaaatgtaagcctcgttggcaaagttgaaccactaaatgctaactngcttctatcacggggtctgaaaatgctccctgcagctggtgcgcgtatgcatcatccaatactggtgccgagccttcatggagatatgcaaaaaaagctttg

SEQ ID NO: 4227 - DNA, 6203 bp, Emericella nidulans
atctaccgagccgataactgggacttcgttcactatttatcccacagatactacaattccaaccacaacgcgttatgtcttgctgagttcgcaggccatcgacgtaatcacaacctaccagccagatgcggccggttcctatgtgtcagtgggagaaactacagtaaccaccactctcaccgatctgccatccacggagacggggtcatccacagaaactgcggacgcaacaccgcccccaacgacaaccccgactaccccaatgacaaccccaatgacaaccccgacgtcagagtcaacaagacaagcctctacgactacaaggccgacctcaggcacacaaacagtcgactccaacacctcatcccaggcctctgccaatgaaaccagcaatggaaccctcgcgggggcgattgtcgggagcattgttggtactgcactcctaacatttcttctagcattcttgttcttccggcgtcgccgagcacgttcagcggccaaagagctcgagcatggcgtaggcttgaggtcgaagtccggtgcaaccgtgagcaccgctgctatttctaatgagaattcaagtgacagtttctccttagcggccatcattccccagtcagccgacgacgagaccgtccgcagccggattcttacaataatcgaccatgccagtctgcacgtcgacaactactacggggctaggtccccctatcctcaaatcaccccgggtactcgggctcggttagcggaatatgattcaggtcatctaccaggatcactcgataccatgctcgggcagcgcggcgtctcgcgcaaggtcattacccacgctctagtctacagactactgcaagcgattcgccctgggggcgagcttttaccgaaactactggcaacccagccacaagttgaccagtctcccgcgtgtacgtatcttccagggccccttgtatctcatctggatacctaattgaatcttagccactgagaatgcgctgttcgcttggcgcatggtgaccgcgcatctctacaaccaagacgcatacaataaaggtccaactcataccgccgcccgagatcaaactgcaagcagcctcgccgccgatttcacatccgcgttttccccgtacgctctgacaacgttttcagagagcgaccgcgtctctcacctcggcaagctcacaatttccacagcagaacttggcatttggctcttttctcaaccttgcacgtttgagttcgtgtggaataagagccagaatgagtttacagttgtgccacaggttatcaaaacgtttgatgagcagggtaaacgtctgccaaggccgcaagttcttattgaggcggtacaggaaaggtatccaagcacggtctaagcaataagctatggagcgagattcccacagaaaggagacacgatgggctgaggggtagcatatatagttgtaataataatgcacctgtttgatattatcctattccgtagaagaaaccattattatgactgcctcccttgagcccaccgccaagataacatgtccaagagctcatcatctagcttctcaggtgctacctcatcactttgcatgggaaactcagctgcggagatagacgttgagtgcggtgccgccgacaccggggaatttgggagtaagagcgcaggctctgtaacggccacctccatgccagcatcctgtaactggactgataaatcccatacaggacttttgggcctcggttcagtgctagacagagacgatccgtatattggcccaggggctgagggctcaggtggtccgcctactgttcccctttctgagtccccttccgtttcatgttggcgtgccgcatcctgaacgagtcccatttgcgcttcgttggggagatggagagactgtaatctgcctataacccccatcaggcttgcatgacagagcattaaccgctctctttcctctttcgcgcgtctcgaatctcggaccaaccaccgtatttgagatttcatcccaacatgcccattgttaagctcttggtctaccctgaacgtctctgtaattttaagaacctcccgtatcgcatcttccgtatcagagatcgtggctccgatccattctcgctcattctgggagaggaggtgtgacttttgcgtgaagagatggcgtgcttgcgtggattgggtttcgatgtgacgatttagagtaagtaaagaggatgttgggttgttcggtgtggttggagctgcggtgttagacaaggaggcgaggatgctggggacggcgacggagagtcgcgatttcgcctgtgatgatgaggactgtattctgtcgagcgctacgctaatggtgtgcgatgatgcttgcttgttggtatttgtgcctgagtttggactaggattttcattctggtatcttgcgatgtcgctgctatgtgttgacgactgggatttggagtcggaaatcgaaaccgttgagtgtttttgcctcaggttggtcaacgtcaatacgctcttctccccgaggttctgcaaattgcggtagaatctgggacggctctggctctgggatgtcattttgttcttcgtctcagccagagtaaggcctcgagtgcgatttgtagaggtgagttggatggggaaaatcgcggcgaaccagagcttggggaagaaatgtgacattaaggcaaagcagtttcatggatggggtcgtatgcaaattactaggctatacggtgccagaaccgcccgtctggggtgctcacgagtcatagcaatttttttggaagaagcaaacaggcgactagtgagctactacccttaagcgtgaccacttggaggaaccaggggaacatgaaacatgcctcttgaggagagcctaatagccgagccttgagaaaggcggaggttatcaactttttcggaaagcatcccacaagtatcgcgttggaatcaggtccagaacgccatccaactcttagcgtcacttaggcagtacagggcctatccaggggggagtacttttgcgtcaggcaagccccgcgttagtttatatcagtgggtagcaaggtagggtggatgagtcgccgattgcctagcgtccaattgactcacgcgctgtcacaacctcgtagcatatgactagcctctagatactctgaatgctagagaaaggaaattcaagccccatagcatacatgttcggtgttttaggaatgcgtctctactccataaacaaccataattatccgtgtcaaatggggcgccatagttgggtggccaattggctgtcgtacatgcctgaacaaacaaaccccgtgttcggtccacagggacccacgccctataccttagatgagcaatttttgtgataagagtagaccattagactaccaagaaatctagtgcactgcggggccggtcgggcgcgggccgcagctttcccctttgggacaaaatgtgacattaacttctagtggggttctgtcgagatcacaggtgacgtgctaaatgccgcaaacactaagtcggctaatccttttgggtgcgctagctcaaagcagtaaggccaacttagagttagctaaaatataatcctatttgtcaggaataggttttttctcctctactttgccgtactctgaatctccctggaaaagtataagattagtcaataattatacctaactaccattatatctataactttgcagattctagtactatgaatattctagaacagctacaagacatatttctctcgactagtttgtgactcgtatgtactacatagatataggaatgtgttatgaataatataagagggtagaaagaaaaaaattggtaagtagctaactctaggctggctattccttctgaatatgctaacccaaagaggtatggccagagttagctaagaaatcttagaaggttatctgcgaccactgaaggactccgcaccaagtcggtcaaaagcttacaagatcacacggaggtcaagcaaagatcagttaaccgagtgcataccctgctttaatttgttttgcgctattggtactctacgacagtcagaccgatttcgctttcgcaaatcgagctcggtgtaccgcagcctccttcccagctaccgcggagtggacagccctagatctagagaggaaaccgcggtatccctaagagcacttccaggactgtacagcttgctaacgtaatcaacgacatcgaaggttattgtgccatctgctaatcttctttcttcgcccgtcccttgccgtccttactcaggccgacccactgagttgctgagattgactgcctgactattactcgattagcctgcaatttactcttggaactttgatgcatggctaagtgataattgaggctccgcacaactgactgttgttgccccaagaagaatggctcttgaagataagctatccagggagcttaactgattgatagaccagatgctagacagcaagctaacccaaaccgtccatccacttcccagaattcttccagactcagactgatggtactcatggttgaggcatatagaacataagggagataaatctggtctcttagtttagtttattaaaagagttctgaaaaaagggctagtgcaatgagggtcatgatcacaattcaaatataggtttggtgcctggactctcaccttctagcgtatacagtgagctactggtagtgacatcaccaacctctgctttcgagcaaagcaatcaaacacagagagacatgcacttaggggggagcatgaccataccagcagcggcaccactctaggcttcagagcttaagtatcagtcaacaagtagcagcattgattcccttcgtagggcgtgcccattttgctttccagttgaagtacacccgtgtaagtagatccaccaatgtcagctgatgtgacacaaaaagtgccaaagaaactgactagttattatctgccagatcgtcagtcgtcgtacgtgagtactttgaggggtcatataaaacgaaaggcggataagtagaggaacatgttgaaccaactcatcgccattcgcttaacatctaaactgggtgtgtccttccctgtacaatttctatcgaaattcttacgtgtaccatcgcagctatacctaaactgtattgcacgtccggtcacacctcgcctatcagtagctagtacctgagtaccaaccgaaaagactgtcaagctgaaagccttcaaatgagatcagcatgttcgtctggctatcaaaatggagatctgatgaaagcacttaaagtgagatgtcataatccgcgggatccgtatagttggtttaactctaatgttgaaagttgagggtgacttagtgacagtaattagcaaagtatattgcctctagcttcttgaactgggtattccacctgttctttattcatatgttgtacttttccggcctcgttttgcttcgactgcgtgaaggttgacaggcatatcgggagtaatggtagtacagcctcgcataaggtaggtaagatgaaaagattattcaaaggatctgagttgacaagacgccaggattatgctatggtgcgtcagatggcttgcaccaaagctccagtatctactccattgctagttaaacgaaatgagacgccttgcttttcttgctctagctccagtactcgtgaaagcataagggctgttagagactagcacatgcggtgatacggcctacataatacctgatccatcgacggcatttgtcacgccgacaggggatctcccagccgcaacaatcctcagaccatcaatataactaaccggggccaactgcttcactaaaaactcagcattctggccaccagcatagagcaattgtcggtactccgcatcaattcggaacgtcgcaatgtcccacattcttttccagccactgtttaccgtggcggcctccgaccaatgattccggatattggttgcgtgcttgtaaaatgaggaccgtttggcaacttcgcatgcttgaacaaattgcacggaggtaaattgttcgaatgtagataatggttgcgcgttttgtggtgcctcgacttggtgaaaaggacaatcaatattccctccggcttcgcatgctccagtccgagtgccacttatcaaagtcagcccacttgcttctcgactctcatggatgtagccctgagttgctccagaacgtct

SEQ ID NO: 4228 - DNA, 2297 bp, Emericella nidulans
gtgctgctttaccaggctgcttcatgtgcttacgatctctaggaatttcattcctggatgctaggatgcactcgccatatgtgcggagtcgtctggtatgtcccgttcgttccttgcacctccgcagaccctaatgtcttatgtagacacttgatgaagtggacttcacggtcctagcagcgacgtcagtgcttagggacctgatgcacaagtgcccacccgcagaagcttgtcgtgacgcattcgaacggatgagcaaggccaccgtcgaaatgagtctttctacaactggctttgggccacaggttgaactgaaccgggtgcagaccagcactagcgggtcaagacagtttaatgcaacgcaatccagatcaaggccatattcgcgacagcaagcagagcaacggcagcgacagagcgcatctcggcgacaattacaaatgagacagtctcggcctctaccaagattcgatatgaacctcgaagatctctttggcgacaaccgcgcagtcgctgagaggcaaggtagtggtggcatgggaaagctagcccaaccctaccctgtctctgagacttcggatcctaattttgcgcggccacaatcccatcgcaatccgtctatggaatattacggccctttcgagaaccccgtctcgccacagcagccccaaccacaaccgcgatactactacaacaattccccccagcagagcggatcacccggcagcgtcgttgcggccagcggtatcccaccataccaagtaacacctacagagcaggaaaacccctcgggcatgggtctcgattatctggattacgatccaacaggtatcgagcgccagctgtccctgggatctgaagagaactcggactttaaatttcaaggcggcgcacagtcactgggccatggtgctggccataatttcgggatcgatctaggtttcggcatggccgttgattttcaacatgattggagtgaaaatgccaattatgatctattcgaggggtatttattcggtgaagcaggcgcaactggaccggaacatgggcatgggcatggctcgggtatatagattttctttcttcttgttcatcttttactcctggatatactgcgtcgggttgcctcaggctgctctttgttacggttcctcacgggcaagggcaggttatctatattgggaactgggtgataaaaaggaccaaggaaacgatttgatgaagtcatttttgttattcatgaatacttactatatcatttgatctcatgactggtaataggttggcattagttttatgagtacatacatttatgccacatgtgaggtcaggttacagctcgccccaagcatgcccaaccccagggccgtcatcctgcaatgccccaatgttgacaatttctactcttcgaggccaatggtaatgcgaattgggcagcaagtgaagctgtaagcgatttgctggcggcagattgaccaacattcccattctgattccatcgtccgattagcaaggatcccctttcagccccctcagactcttcttaccctgtggctgattcaatcttgatcctgcggacagcgcattcatttagtgtcctctcgctcagacctgcgatcttagtttctctcttttttggtctgctctatctactagatactatttaccgcgtgggggcttcgctaatttactgtcgttggtaagtcccatgatcgaccgttgctgctccgaccctgccaagctgccctctctccgcgctaagcaaaaaaagtccacgcgaactgatcaggtccactgccgggctcagcacagcttcttcaaattcaggttcagctcgttctacgggtacatccttccgtcgtgatcaccctgcttactgctctgttgcctacgtcgagtttcccttgcttccttacgactctgagtgtcgtcgtcccactttgttctggccggggttcgctttagcatttattgttaagtgataccgaagacatactagacggaagagaaagattgcatcagcacctgagatatcttataggatacaggaagggaaagtcgatattgacgcgccgcatacatcaaacaaaagacgggcataaacagaccgccgttgcttcgcatcgcttggtattatcacgcagttcaatgctgggaaagaaaacgaatatggctgacttgttatggttgtaggacgcataggctagaatttgcctgttgttctcaagccgagcgcttttggtgccgtcgagctgtaggactgttgagctcttacattccatccgttaaccaaccgt

SEQ ID NO: 4229 - DNA, 1160 bp, Emericella nidulans
catacattgtggcgaaaacacctttttccgactgtagctggcatgatgctaactaatagtaccgaatagttcgtggccacggaaatcttcaccactctcccaacttctctacaaactctctcttactctgcaattcaacactccccggccctctcaacaacctactccctccccctgacccattcaacccttgagtcactctcaaaccccctccccagcacagtaaccgacactctgtcaacctacaccccagaccttgagtccccatcgctcctcaacaaggttctagcagaatatatccccgccgtgacacgcccacctcctgtctgggcgaaaacacgcgcctcggcgtgtgaaatctgcgagcgcgactggatcccgctgtcctatcatcatctaatacccagagcggtgcatgacaaggtcataaagaaggggtggcatgatgagtggatgctaaatagtgttgcgtggttgtgccgcgcttgccatagctttgtgcatcggatggcgattaatgaggagctggcaagggagtggtttactgttgataggatcttagagagagaggacgtgcaagactgggcgaggtgggtagggagggtgaggtggaaggctagatagcttgtcctggtatagaacgccattgtgtagattagtcgaactgatgtacattttttattatcctcatgatccgtggtagccatgctatagtacattcgcttgtaaccaaacccagtgtagtatatgctttatacaagaaggtaagtaagtgtaaatgaatagaaatacaatagtagtattatcggaaaagggatgggcgagattagaggtgtctcttttccgagatttcctcgtagcactggatctggtcccctactgcgaaatcggtccagtcctcgaagccaataccacactcggtgtctttgcgcatctctgtcacgtcctttttgacgttcttgagagatgaaatggagcctgggacctgttagtgacaactcgtgcaaaatacaagtgcgcgtgtgcttaccgtcatagatggtctcttgtcctctcaatacgcgaaccttctttgtccggttgattactccattgcgtaccttacaacctgcaatagatgtcttcgcgcgtcctttagagagttttcgaaagcagcccga

SEQ ID NO: 4230 - DNA, 2303 bp, Emericella nidulans
aataaggataaaaaagaagagaattaagagatgaaataaataaaaaaagagaaagaggtgaaaaaaaagtaagaagaagtgagagaaaaagaaggaaagaaaataaaataagataaattaaaaaaatgatgagtaagtaaaagacagagaaatgtagaaagagaattataagagttaagaaaaagaaagtgacagaatagtcgggaataagaagtcatatggcaaaaaagatttgaggatgagcaatttaacaaggaataatggggctgaggaaaattaataacgaaattatcaaaccagaagaagaaaagaagagggtgaaaagaaatgaacctccaagcctttacacatcctagcagggcttgaactatgaaccctgcggagaaggaaattccaccccaacgctgggagtccatcgcggtgggctattctgagcgcccaggaactccgcaaacgagacgaaaaaaagctattcagcagaaagtggcataaaatgagattcatcgggaatgctttgcgattgcctggcccatcagcatagccaagcaagtagcgatgcaggttcacaccttcctgcaggaacaatactgaatccccatcagcgctaaagtagcgccagactcggcgcctctgcaggttacatggtcttaggcctgcagcccccgctgtgagggctcagagaagtgttaggcaactgactaaaggctcaatgggaagcgtaatacccagtccatgcagtccaaattgtgcgtcctcatagtcacggagcctgctccgttcgccactctcaatctaaacaataataatcaaaggacagcctctccacaatctttttcggcgcccaatgcacccatccgggattatccggtctactgcgtagagtagcatccggctaatacgtcttattgcagggaacctggctagcagacgcaggtacttggataaccccattgtggtattatgttgagattggtaagagagagtaattcagaattttttatttttcttttctccagtccagattcatctcccatgtagcaatcaatgtacttgggggcttggatgcccgccgtctctggattgcaaaaagcaagaccaactttgcctgcatcatcctcagggagatcgcaaacttcatcatcttgagtcaggatggttgccatttcacctggcagaatgcttctcctgtttgttttatcctgtctctcacatctagcggcctgtctctccgttgttcctagcttaggccatattcccgccggcgtccgagctgcctgtcgagtaacgctcgcaaagaacgtgacggagtgctctgatgatattcagagaccgttggagtttattccctcgtctctgctgcctgacatttgcactaacgaatgcacgaatgcgctttcctctctttatgcagaggcaacctcgagatgtggcacagatgctgtcaatatcacggtagatggcattgtaacagatactatcactcctctagacttggtgggagagttgaggtacaagtataacataacatgcctccaagatatgtccctccgccgtcattgacattagaatactgacatggttatacatgacgaaggtttctgcaaggagaggctggaggacattgcagaagacgaacagtgctcggaatgctatctgaagtctgttcagttggagatcaatcagccaattgggggctcttcagtcagtccggacgaatttgacgagctgaaagaatcctgcaatataccgacgacgtcgtatccagttgatccaacttttcctgggactccttcagagacgtaagcatccggatcatgtataggataactcagcagaactgacttttggaagaccgcaatgtacaaatatacatacagccagcgccggcgacaccatcaactctatcgccaatgccctctcggtcgccacagaccggctgctgatgtataacgggctgcctttgacgtgggacgaacccttcactgcaggcgaagaactgtgcctcgaccaggtctcgcaatgtttgattcacaaggtcacatcctcagacagctgctcgtccctcctcgtgctcgcgggacccagcgtcaccgatttaatgctgcaatcatggaatcccaccatcggccgctcatgcgcaaacctagaaactataataggaaaatacatctgcatcggccccccggcaaacaagcacgtttacccctgttataccttcgactaccgcttcgcctacaatcacaacgcctccagacacgtatacctgggagccagctccgacagcctgacaaacactgtcaaca

SEQ ID NO: 4231 - DNA, 4900 bp, Emericella nidulans
cggctgataattagatggagacgcgacagtaccgaagacggcgacgccgtagatatagccgtagaataccttgcccgataaaagtaggaaggtgccgtataaaacgatgtagaggagtgcgccgtagaggtcactatcgtccatgaggtgctggtctatgcgcgcgaagggattgaggaccgttaacgtctatgcattaggttagcctattgtccgaagatgttgaaaggtgagtacagactttggtccggatatgctcaaaattcaccccgagctcctccaacagcggcggttcgccgtcatagccctcagttccaaatgcagcaagccacccggtccgcaagccgccctgttcgcccatcctcccgctcacaccaccactaggggacccgaaaccgccgtatccagcccctccaacggggtacccttgtgccgttgtatttggtggtgcaccaaatccgccatatgatgcttgagaaggagtcgtgtgccctgatacggaggaatagctagatgggtaaaattggaggttctgcgcggaagactgagctccatagggctgttgtggatagtactgtgccatggtggaaggagttgatggtgacttcgagtttggaggagatccgaagatgacagacctgaagaggggctaatgccgccaatggcgcttgagaagcttttagggaatgtagttggtatgcgtcgaggtgaataagggtgatgtaggtgcttgtacagaacactgtcgcggtaaaccagtctaagtaactaaagcttagtcatcgaagttggcctaaaggctgaataatacaagtacaacaattctatttcaaggtgatgctcagagaatatgttttacagaaagtttataccaattccgagttgcagcccctttctgccttcctcacccttacgcaaaaccaacggaagggagatgttgagctcgaatctagcagctggatgggcgtacacaagtccaacaccagctgcaatgctcggcaggccgttgccaatttcagacaaggtgaatttcatagcgtctttcacttcgctgctgctggaaggagccgccttttgcgcgtttctcagaggcagtaaccgcccaccgttcacaaacgcttgaagccggagaggcttctcagcgcctactcgtggaactgggaaaagaaggttggcgcttcctgcagcataaacatcgcctccaactgcatcagttccatcgcgaggcccgaggccagagagacggaacccgcgaacatctgtaggaccgcctagctggaaacggtcattgaggcgagacaagcgtggccgggaatccgagtcaagactaagaggatagagcaggccagcacggaaaccagtagtaaagcttacgccactgtctcctttaactccagggattgggataggaatagcactttgtgtttcaatctcggacttccagaacgcgacgtcgcctttaagcggaccccagccagccagctcgttgaatgccttggcgtagtaacctcgtgagggcaaaaaagggttgtcccggcgatctgtggtccagctatggaaaacactgctcttgacgctgtcgcctgcatttgctcgaacggtaggggatgcattgtccgctaggccggtcacctgtctccagaagccactgtagccaatttcgtggcgttggcctgaccgactcaaccaccgaagtttactccagccgcccttcaacacctcttcgtggcttgcccaagtcttctgtgtcgagctggcgattccaccaagctctaggcgaaagtccggatcactgaaaatgggtgtgtcaaacgcggcctggtaagcagatcgcgttcttgtgcccaatgaagcattgaaattcaggttctcagcgccgccaaatacattgcgccataagaggttaccataggctgagccttccgcgttgccgaggtcagttccggtcttgagcaggacacgggatttctccttcacggaatagtatacactgatatttgtgaggcctgtttgcgtttcggaggctggagtctggtccagatacacagaaacaggctgctgaaatatgtctggtaatcatcgttagtactagacctcatagtccgcattgctactgaccaaacctgttgagcttgtccgcacggaccgatatttctcgtaaagcttcggacagggtatacgtctgttttcggtgctggctcagcaatgggttgagaatttgttcaagaaagcccctgcgcgtattctttgcgttcagaacctggacagacgaaatgacacaaggtaaagtggagttttggtcaatctaggttgtagcaagagtcagtacgccacaatactccgcggagaaaagtttgaacatgttatgaaagaaaaactcaccagctctccaagacggtcttgcgccttctggtagattgcgtggaggcgttcattgacagcctgctgctgctcttctaatacctttggatcggcggtttgctggagacgctcgaaaatctatggaaagcgccaatggttaaaaacaacgaaatagacatgaataaaaggcagtgcatacttctccatcctcagcagaaagcggggaagccattgcgacggcagcaatagccaacagacaaccagcagtgactatcgggttctcgtggaggcttgcccgaagcgtccgatgaagcaatagttcagtaagtcacgtgacgactgctcttcgccttagaacagtctatcagcgcaatgattctcgggaacaacaacacttccagccacctccttcttgcgagtgctctttattgttcttttgttcttctatctgctcttccgttgattgcgtcactcatttcgtccatccaatctcatctgttcacacgccgcactgtgggcgtttgctgtagctaaaccttcaatcacgagtgaaatggctacaaaagcagcttacaaaagggtgagttgaggaggaatttctttccagcttgattaacactaaccttagatagctcactcgcgagtatcaaaacatccagaaaaatcccccacccttcattatcgctcacccgtcagagtccaacatacttgagtaagtcaaacccacaggcgaagagaagcgaactaacggactatgatattaggtggcattatatcctcactgggccccctgggaccccatacgagaatggacaatactggggcacattgatgttcccccccgaatatccatttgcccctcctgctatccgcatgcacactccaagcggtcgattccagccgtcctcccgactctgtctaagcatcagcgattttcacccaaagtcattcaatccggcgtgggaagtttctacaatcctcatcggcctactttcctttatgactagcgaggaaatgactactgggagcgtgagcgcaacggaagcggaaaggcgtgttctcgctgcgcgctctagatggtggaactctacgggcggaggcacccacatcagcgcgactcccggggtgacgcccacctcgagaggtatcaacaatgtcaaagccggtgacggaggcttaaagtttcgcactgaatggccagaattggaccaagagaactggaagtggctgagagagaaccgtattgacactgcaaccgggcaattaagacccgatccgaatgcctcttcgagcaagtgttctccggaaactagtgcgctgcgcagacgtccgaacggtagtgcgccgggcattggggctgtaatggatggtggtaacgctgcccgagaagtcggtcagacttggcttcaacgtaacaagatctgggtcggtctcggactcctatttgggtatgcgcttattgcaaggcttgtccaagatgttcagggttaacctgaacgttgatcgcttttcttgtcttgtcattatagtttgcggggcgtcgtctcgccactttttcgctcagcgcggtttgctctcttatgttctataccgttgggatggattttattgggctgtattagctgcggacaggcgtacagagagggaacggcgttctactgacattttagccgactcgggcatggcatttcttagaatgtatagttggtagtagcactttgtaatctgtggaggcaaccaatcgcaagtccctattaaattacgatagttcccggtttctgttatcaattgcgggtatcgcccattaaatcactccaaaactttcaggccattccctcttaccacataccatctctacttcatctcgcctactgctgacttctgagccgtatctatcaccagacttttgttactatcaccattcattatgggttggttttgggcagattcgcagccgcaacttccggcgcgcaatcacccagcatcctctgatgcatctcctccggcaagtaaaacgaacagcagagagattttcaagtgctgactgttgatgatcatagccagcatgtcccatgcatgcatctcctcccaaatccgagacttcaagcgcttgtcccgtgcgatcgtcggattcgcccttcttcgtacctccgaaatcttctgctcaaccacctactgcgcctgatacaaaacagtcgaccctgtccaagcttaacccgttgaactacatgtttgcgtctctctcgcaagagcgcgctccaaatcaaaccgtggacctaggtgtggaacggaaagtctcgtctatgcccagaggtgattcagaagggaactgggagtatccctccccacagcagatgtataataatatgctgcgaaaagggtatcagacaccccacaggatgcagtagcggccatggttgcagcccataactttttaaaagaccccccttggagtgagtgtgtcgattggaggaggatcttttcgaaaggttgagggaatgcatatgaaaagtgcccctggggtagcagaaaaacccta

SEQ ID NO: 4232 - DNA, 6145 bp, Emericella nidulans
gcgcaggtaacaaggaagttggcatcaacgacaacagcagttttgaggcactcccctcgcaacatgtccagactggtgtgcagaagatccaggctgtgactcttgtttggtccaagtggtcccttgttgccgttttttgtctgtacgtacctcaccaattcctacaacatattgtttgtctatagtgtaaatcgtcgcattgctgattcctccatgcagcctctggcttgttaccctcgccaacggcttcagacaatccattctctacagtttgaccccctatgccaccagcagttttcagagccactcgctcttgaccgttatcaatatcgtgtccagtgccatggtgtctgcactgtacatccctgtcgccaaggtcgtcgacgtctggggccgggcggaggggtggctggtcatggtgggcctttccacactcgggctgatcatgatggctgcgagtaagaatctagagacatattgcgcggcggacgtacgttgcataaactctctatcctcgattcgatcttgagggagggtttttcctggtgctgatgaaatgcaggtcttctactccgtcggattcgccggaatgaactatatcctgtgtgtcctggcggcagatatcacgaacctgcgcaatcgtggtattgcatttgccttcacatcatctccttacatgattactgctttcgccggatctaaagcggctgaaaagttcctggtcaacgtcaactggcgctggggtttcggtgcctttgccatcatctttcccttcgtcgcctcgcccgtctactttgtcctgaaagttggcctcaaccgcgccgaaaagcagggcatcattcaacctcgcctgaggagtggccggaccttatcccaaaatttcaagtactacttcttcgctttcgatagtgagtttccagtttaattctaggtcccaacaaactcacatctctgactggatcactgcagtccctggtgtcattctcctagctggcgggctgaccgtattccctcctccctttcacacttgcgactcgcgccccccaacggttggaaagtctgactacatcatcgcgatgattgtgacgggcttcgtggtcatggtcctcttcgtgctgtatcaagcatactgggcgccgcagcccttcctcaaatacgagttcctgaccaaccgcactgtcctgggcgcttgtctcattgatgcaacctaccaaatgtcctactactgctggaactcctacttcaactccttcctgcaggtcgtctgtaatctccccgttgcagaggcaggttacgtaggcagcactttccaggtcgtctcaggcgtcctcttgttcatggttggcttcgccatccgcaagaccggctacttccgctggctactcttcatcggtgtcccgctgtatatcttcgcgcagggacttatgatccatttccgccagccgaatcagtatatcggttacattgtcatgtgtgagatcttcatttccattggcgggagtatcttcgtgctgcttcaacaacttgctgtccaagtaaccgttgatcatcagtacgttgcggccgcgttggccgtcctgttcgtctccggcagtaatgaggtgctgtcgggaatgcgatctctggcgccatctggacgaacactttccttcccgcgctgatgaggaatttgcccgagagtgcgaaggcgaatgcggtggccatatatggcgatctgagagttcagctttcgtaccctgtgaactcgccagagcggatcgccatccaggagagttacgggtatgcgcaagccaggatgttggctgccggcacgggcctgatggcgctgatgtttatctggatgttcatggtcaagaattataatgtcaagaacatgagccagacgaagggaatggtgttctagacaccgcactcgggtgttgatgggttaaatgtggctgagtaagatgttatgggttaagcaatccacttagaaaatgttgggaattgtttgacagagcatttgcatgttcatatctggctcacgcagtatatctaattctaatccctacataccaaaatctatcacgtactccatcgtcccttaatgatccatgctgcaaccagatagttgttccgcttcatgttctggagttgcatccacccagcagtcctgctttatctgcacagattggattcctatcccgcaattttgtctaggaatcctgatgtcttcaatgcaggagcccagcacaacacgagactcgacctgccagaagctccacgaagctcggggtcagatggggcgcgagcgcggagcgtaagcagccgtaactcggggcgctagctctacagctagtatgtgaggatgtgtgaaattgacgcaaagtaacagctactgaggccataagcggcagcatctctacctgtagctctcaaagaaatgaaccactgtcataacgttcccacatgcttcgcacctctatactacatttgccaaatgctttaataccccttgactgatgttaaatgagcactctgcttcagcaagctttagtatatctcaacttacaactagatcgacgccgaaatggctccctttcggccaaatccagctaccccgtcgaactccaacaggccggtaagcgacctgtaaaatgctacgtttcccttgcttctttgttcctccgttcaaaagtcctgaaacagcatattagacctccttcagtatatctaatcgaagccctgatgaaacctcgggcccttcttctcatcttgtctcgtgtacttcaaattcttggacatttgctctactgcttaaaagtcaactaagccttaatatataattactgctaaatttactttgattacagtacattgctgcgaggttggccatgctggtaagagtggcgggatgctctgaccctagcaactaccaaatgggaacgtcctattacttgcgcctctagcactcctttctacttccatcacccctgacctgataagttgtagttgttgcaaagctgaccatgctgactaggatatcggaatattctagccctaggacctgtttcaatgttccgtctcctgcacaaatggctcttcagatttattatacctccctttaacaatacaagccggtacccacgatttttgcgaagtcaacctactgctcgtgatattcttcaacctcattctcacggaccataaatagcgctagtgggaggtagtacctcaaagctgtcgggctgtgtgatcattacaggggaaaatgtcgcttaatcgattcgcaaacttaacactaataaccgttaaactaactgatatatttctaccatagaaggtgctcaattacttctctatctaagagagggagacttttactacttaggtgggcggtaaaagcgttgtaatcaataaatgtcagctctaggtgacgttatagcgccggacatcagcaaaattttgacgagtacccaaaacactaaaagaaaacagagaaagtgtcaaaaggaaaggactgccacaaagaacaaagctttgcttcaaaggcaatagaccagggaactgggccaggtctttgtcccgcaaaagacaggaccgtaagaagacacaggccaaagaacaggaacctccagctccaaatttgttgataattcgcaactttaacacgagcccaggtcttctaattcttgcagaccagaaaatgcaacatcaaggctcaaataaggcttccaaagcggtatagagtgactcgagaggccgctgtacccacccaaaacccttcaacttggtttttcagaccctcaaccaacggtgctaggattcatccggttggtttaaacataaagtctcttggcaaactagacctgcctttataactataatttcgtcctaatgttactgtttgcgtacgctttattatgcagatcctctaagttcgccgcaactctgcttatcaaaatatgaagggttaaccgcaaaattcctaatcccaccacattgctcatagggctcgaatttttgttatactctatatattgaactatgaataaatacaagactaagcaatgttggacgatactgtattttaaaaatcatgtacgaaacattgttagctacagcaacatcataaccaaattctgaaccacacagatatcacaatgaacatgattaagcgctcagagttggcaaaagtgatatttcagtagtgcaggttatatacctttacacttgtatatactttctgttctacgaataagtccacgaactcgctcacttcgtcaacatgcactcagttatctctatgtatgtcaaaatcctctgactaaccgtgaattctactacagacattaaatcaatgatgacagagagaaaggactataatcaaaggttatcgtcttcggaaaatatccagaagaactcgccgtttgcggcctccaggttttaaatgtgatctgatattatcgccagcaaaagggtgcaccaaggattgagcagaaggaatgtcatccgaacctcttggactctgatgtatggaaagatggttggctattagctcccagcctgcgagggtatcagaagagactatggcgtgcgggtggttcgagcctaatgctttgttgcgcaggtctgcacagttccttgtaaggcttaaggcatctgatatgtttcctagtccctttacagcaatggcgaggttttgcatacttattagagtattcggatgctcaggaccaaggaccttcttataaccttggagtgcctgtcgatgcatggcctctgcctcctcatacttgccctggccggcaagaacagagccaagctggctgacactgaccagagtattaggatgctcaggaccaaggaccttctcacggcctctgagtgcctgtcgatgcatgacctctgcctcctcatacttgccctggtaggcaagaacagagccaagctggctgacactggtcagagtatcaggatgcccagagccaaggaccttctcacggcctctgagtgcctgtcgatgcatggcctctgcctcctcatgcttgccctggtcggcaagaacagagccaagattgctgatgctggtcagagtatcgggatgctcagggccaaggaccttcttataaccttggagtgcctgtcgatgcatggcctctgcctcctcatacttgccctgccgagcaagaacagagccaagctcgctgacgctgaccagagtattaggatgctcagggccaaggaccttttctgaccctactaggtctcgacggtgcatggcctctgcctcctcatacttgccctggtcggcaagaacagagccaagctggctgatgctggtcagagtatcgggatgctccaatccgcatgttctttctcggcatttcagaacattccggagcagggtttctccctcaacatatcttccatcggcttgcaggcagcttcctattctttcaaggaattcattatagttatcctgacaagccttaaattcctcactacctgtcaggtactgtgcatgagataggtacttcctccacttttgccgattgtcatggttattgtcaggaaaaatctcgtccaatcggtcagcagctctcactatccaactctcaaaggtctctcttttccgtaaccaatttcgagtagcaaggtgcacaagtcgatgaagactaaaactactatcatcaacctgtacactaataaaggaatatgccttcagaagacctaatgcatcctcttttcgttttgctgaaatggtaggtgggagaattgactctggtatatcccgtggattaatgcaagccatgaaagacaaatagtcacttgctatttcatccacttgctggacctgcaggaaagaaatcagccaggttgtggctacagtgttctggacctctgggtatcgtgcatcatcctcaaactcctcgccgaggagttctatcgtgctcttctcttgctcatccagcaatgacatatacctttctagagaaatgtcattctgatttatataagcagcagcttggttaattgctaaagggagaaaagtaagatgctcaaggagtatgtttgtcacataatcatcttggagtatatccttccggattaataatttcctgaatatctccttggcagtattctgatccatatctggtatagg

SEQ ID NO: 4233 - DNA, 3815 bp, Emericella nidulans
cagaactgactccgacccccttcgcttggatcgccctccctcgcccccggagggtatcccacaatccaagcagcagcaacagttcctaaacaacgagtgccccgaactcctcacatccgtgtggatacaaccgctactcacactcttcaataatagaaggcccaggtccagacgaggaagaagacacaacatccgtgtggcaaaataacatgaccaccactgcgccccctgcatatccccaaacatcaacgccaatgcagatgcaaacgtgctactcggagcccttgcccaccgccatgccccacaaagatcaacgtatgcgcgcctttcccgggatcggagtcgcacctacaagcacagactccgaatcaggacatggaaccagcttcgagcccctccacacagcacgctacaaccctaccactttacacatcccttcctcgatagaaggaatgtcccctatcaaatttccggacctcgtcccaccacgccttgaagttctgatggatggcgctggagaagctgcaacgactgcggagttgaatcggttgctgggggacttcctggatgcgctgtctgcgacagggtcggcattgtccaggaccaaggtcagtattggtggcagtgcgggagtaagtgtgaacgaaggtgaaggtggcaacgagagtggcaattggtcgacggatgaggcgtctgatcagggtcttgagagatagagttgtgattgattgcttgaggtcaatatagatggaccaaaatgtatataccatctgcatcaccgttgattattgtaaggtctttcaaaaggtacttacagcgtaaatcaattctagcactggaatatccgtgattttctactagtattgacaaacccgatatattatccagctaatgcaactaaattatcgatggccatgtttgtaggtactcagggccagactgagcgcgttccacaaaccgcttgaaatatattttcctagcactccttgagaaccacacttgcacgccactataatatatactagatgaaatgcttagtctttttaattcttagataacaaagcagctttgtactcattgactgttcagcaggcactactaatttaaccaggtaactatcatcaagctaaatccaaaccggaatccatccaccaaaccaaaccagatcaacccatacacaacggcaaagcacagtagtgtagtgtactgcgcgcttgtgtataaacgaagtaacccgcaaggataaaagggtgatgagggcaacatctccaaaagacagagaaaacgaggggaaggagaacgatacgcccaagacaccaaacatcaaaaagggccagggtcatagcggccaagacgcaataaagcaaaggaatcaaaagtggatataggtataagtgactggagtctaaacatcacggacacgggtctgtttcttcgcggttccaatgtgagtgttgtgtaccttcgtggcgaattttagactcgtcaaagtctcggagagatgggcttgtaatgggctgaccatgacaaacatgagagtcttcgaattcccacccagcgagaattggagtagatatgtcaactatagttatgttagaatgaacgacggtagtttgtacaaaggagcgtaccttgctgtttcggtatgggatatggccatctttcttgccctgtcccaaagctgcaattacatcccccaggcagcttagactgcggttgatattttgcgtttccttcagtcggtctcctgtcgcaccgctgtggcttaatctctcagaaccggccaagtctaccaagttcaaggttccttcactgcgttcaccggttatatagttttctccgatcaatttgagaatgaagattgagtgggagcgggaggagcgttcgttcgccttcgtagccgctactgatcggttggctgccgctcttttgagaagagattcgaccatctctggcgattcgagttgcacagtggtggcgtccgtgatggtcgtcttgcccctctgcatgtcgtgtcggatttcaagcttcttcttgtccaactcctcggctttacccaaaaggtcgttcaaattttcattgtaaacttccacaaagttgccttccattgtgtatctccagcccttttcctcgaggctcgtggctgtctcgtaaatttgatgtactgccctgggaatcatgccgtctagcgaggacattgtgtgagtcttgccgctaccagtctgaccgtagcagaaaatacaaacattgtacccatcgagggcactttgcacaagctggctgatttcgtcgaaaacatcgctgttttgggctgacggcccgaagacatggtcaaaggagaaattgtggttcttcctcgtcactgttccaaaactgctcttctcctctggtccgataatattgatttctttggagtcttcaccctcgtccggatatgtgaattgagccgcgtccgatgcaccttcattttctaacgtaggtcggacacggcagaatacgcggatgttgcccttgagctcctgcacctgattgtgtaatttgcgccggagtgtttcttcccttctgagtttctctttggctgcattggtctccgccatagcatccatcatttgctggttcaaccgttcaaaagcttcagattgttcttcccttcctgactctaggaactcgatccttgccttaagcgcactaatggtggactccaatgtaacgctgttagaagcggcggtatccaggttctgtctgaggttattggtgttctttcgttcccgatcgagttcggtccgcagcgattggagatcctcccgagttgccgcgagttcctttattgtcttatcaagttcgatctgcgatagctgggcgtcgagagcagtctttgagtgaagctggttcaattcccggacccgcgcacatttctcatcttccagctcacgttcaaattgtcttcttagctccttaagttcggattcgtgttgtgccttaagggcgtctaagctcttctggctctcatatctcacagattcacactccgcgcgctgccgagacatgagctcatctatcgcgatttcatgatctcgctgggcatttttcagggcatcctctgcctccgcgaggcgtgatttgctgacatccagttccaccttgaggcgtatgttctgttccgtctgttcgctctttgcttcttcaagctcaccaactgtaatcaaaccgtgtgagcactattctcgcccaacctcgtgatcacctacctcttgatttgtaaacttcgagcgcatccttgaggcctgagctctcctgcccttgttggctaatacgagatacgaaggtctcaaaaagactctccagattctgttcccgctcatcttgatcccactcgccgcctatagaaatgttaaaagacttggtcgttgtttctttcgtgaggaattctggggacgggggccgtttttttctcagggggtagtttggttgttttggggggctagacggggaaataagtgcgggtatggggacgggtattttcgacgggctgagactggggtttctgtcatgtttagaaaacatgttaggactaataatttcaccagggaacgggtccaatatcaaggcattcatgaaagagcacagtggcttttcgccatgaaagggctccaggtaaggctgcagcaggggagacgggtctggccgtggggcgggtctcgccttcagggaaccaaaagggaaatgccatggcgacagcactgtgataggggacacaggtgaaaatatcaagaggggagatgtgtgcatacccttacgttttccaagtcctccat

SEQ ID NO: 4234 - DNA, 3352 bp, Emericella nidulans
aagaagacaccccccgcaatcttgagaggacagaaaaaaaaaaaaaggcttcaaataaatatagtatttgcccctccaaaaaaaacaaattatagggcatttaaaaattttttttttttaagaccggcggttagaggttcttattttagcacgggaaaaaaaatttttgctccccgccaattttcccggaaaagaaccttgttaaagttttttttttgggccccgtagttgaaactttttcctgtgttgttgcccaacagacggtcctcccaccccccacccgggtggggtttgcccgaccaattttcagctcaatgaggtaacggaatcccccgcacttctattttaaacgatttccctgagctcagcttcaaccgctgctgctcatgggatcccgctgaggaagacactcctacagtatcttacgcactatgcgttattttctcatcccgtccacgaccacgacactgagaaaccagagccaaaaaaggtcaaaacaacaaaagcaaaaaaaaaaccacttggtttcttgcaggctttgtcttgattggacagtcctgttgtgactcacttatgcacctgcacgaacggatgccccgcatttgaatgattggacttgcctaccattattggagagctatcatgtactttgacatagtgtcattgacactcgctattctcctttgttagttagcaaaatgaaagtacactgatttgctacgccaaatgtttaccgagtagctcccgacctaacagaagtagtagcctagagcctattcagaagcactcactgaatactgaatactttgtaaggccccccgcagttgcagagcaagacagattccccactctctcgccactgggaaagacaaataaaaaagataaaaaaaagccaaaaaaaatgtaggcaatagcgttggcagggtctgactcactcttcactatggtggagagatctgggttgcatgcaagttgtacttggaagggagaagcacgccctgcatatacatgcattgcacattgcgtatcctctcagggtttattggtgacaaacggtccaataatcaagagacgggtacgagctggcttgaggctcaataggctcgcaggcatctatgcctggggatgcgggagctccatagagcgattttcattcgacatcattcgaccttcgtgtcaatacagcgatagataccaagaagagctggagatgtgctgctgatactatgctaggtgcacggtgcaggtccctagtgacttgggctgcaaggcagtctatgtgcgaccggggttggtgtcaggttcagctggtatgtccgctaggctgacctgctaggattcgacactccaagccaggcacctcttttcagctactcttccttgattgttcagagactattgcaggactggtctagattaagccagatattgtatcaaggtcggccaattagagactatggagattcggtttgttggaccgtttacactccacccactcagtcttcctgaagatgccacctaataagctaggcagactgtaaacgcatctaggtattctcggatggtcaatgtgctttgatgcagattcaaaaagctgtaattcgttgacttccatatcgggacctaggccctgcaattgcagcacgggcaacctggtgggaaagaaaacggaaataagaagaatgatacgctaagcaagtggcagaacagaatacaataaataggatatataataaaaacattatgaaaaaataatagagaataatagagagtagaatagacaacagtagagaatgatagagaacataaaaatattgaaagtaatagctatataatgcaaagccgctggtaatactaaaagggatcgactgtcgtgtgatcgataggctagtgataacgcttgccccggtggactctcgtggatcgtcggcctgggaggtatcgttcgccaggttgacctccctgataggcattagtgatacagagatgaagacttgtgggctcagtctactaaggatcgcccgtcgcaacttctacctgcagtgcagcctagctgagcatcccgatctcgctgcgtttccgctacgggcatcaaagctttcccacccgatgggttgaatctataacaaggtgacaagctctatacgagaggaaaagaaagcatttcaatcttcttggtgaagctgattcagtatcctgacgcttccgcggggtgcatcgtcttgttcctggcccgaatttgttctaataatactgcgaggctgaacctcccagcttgcgccacactggtgagcgccccacgcgacagcgcctcttgaggcatcttccccatcgctttgcctttgcactctttcctttcttgagaataatttcctctggatccaaggtccgttctctctaaaccatctcccagtcaatgttttcccaccccgacgcatccaacttcatccctccttgccaagagacctgcatctcgctaacatgacttcgatctatctagctcttggccaccatcatccatcgtttcgaggtagcgtgaaagacccggtacccatggccgcgttgatgcagtcaaacaacgagcccgtcgccatctcaacccctttgaccgcctcatcggacccgattgcctcgagttccccgggatctgctacctttttaaaacagtctaaacctgactcgaacctcacctccattggccaacgcggggttaaacgtgacgcgatcaaaagactccttaccggcgatgtcaacaacagcagtgccaaactctggctccgcggagcggcagctcgaatctcatagagatgcggaccaggatagctctcggttgcgcgccaagggctcggcgctagtgagaaacatcagtctagctctgtcggtttctcactagccatacactccgaccaaatgcaggtcgactctcatcctggtcccggtgaagcgggcgatccggttttcaacactgctgagaacggaacttctttaataaacagctcgactgtagcaagccccggacccatagaagattctgtctctcaggacggtgaccaaccgcgtcatcgagacgacggcgacttgcatcaagaaaataataacaaagctttctgataccccatgcctacaggggcgttcaacgacccccggcgtggtctcagcttaccaagctccgacctccacaaggctggtcaacggtctccattcgctaagagcatagatgcccctattgcgcaccggagttcacacgacattacaacctgaaaagccacctcttacacatagtcaaaagaagccgtttgtttcacaaccggaaataacgcttccgggatttatggcctaaaggaaccaaagt

SEQ ID NO: 4235 - DNA, 1429 bp, Emericella nidulans
  unsure (1)..(1429): unsure at all n locations
acttaggatcggcaggaacgctgccagatctcgtagttcggcccgcgaatagaatagctatgggacagcttgcccggtggcacgaattctttcgcgtcctcctcttgaacagcactttcgaactcgggtagtgaagaaaaggcctctaggtttgtacgtgttagcgaatctacaaacgccgcgatctcgtcttcaaatttcaaaggcgtctaccttcaggaagaaactctttcaatgcgccgatgatatcaacaggttcagcatcgtccacagccgtgaatttctcatcgtaggaaacgtggacatgaggacgaagattatgcgccgcgaaccgcaaccggataattaatcccttgtagccgaagatgcgctcctcctcgccgaaaattgggtatgtaaattgaggatgaaagctagaaagcgtcttgggtttttgctggtcgggatgaacaatggtgatttgaacggcgtcgttggcgtcgcaggaccctgtggaagtcaaacatatcagtttgaaagcgattgacagttaagaaaaaggggtgattacattcaccttccgccgacattatgatgtctctctgtcagagtactggataactgggcggagagaggggatgggggaatatgtttcatcaagtcttgaagctctctttctctgcgcgtctctgatcgcgttgcgcgaaaggccgggcgcgggaccggtatagcccttttaggattagcgcatttctcattgtcctcaattcagtgtgccaatcttcatcttgagccccatgagatagttttccagctcactgagagttatgtgcaattagatacttattgagtatggacaggtagtaaccgtagtattgctaaaatctgttcatggttcgttgttacctcggctttctaggtactgtggttaggctgaatcattaactcggcagagatcctcctcctatatctcctgctacatctgcccagttaaccacagtaaaccacggaaaagtattaactgaatatcagactacagcattttccttactactgacgctgttggtcaaggcaatcactatgtctaacaccgttaatcatcggatcactcttatcggattaggaaccataggaatgtctatggctgctctccatctgtacggtgccacccccataatcgacgtcttcgatacacggcctgacctggaggaagctgttctaaaaacgctcccaatctttgtagtcagctctagctcaaggaccgagtcacagccaatcgaagtgactccctatttcgctgggcgcctaacattcactcatcgttgagacgnatgcgcatacgcgacatgtacagtacaggcccagaatattctatacagcaactattggaaaaagtgagctatgaccgtctcgacattctggctagactatgcttttgcaggccggacac

SEQ ID NO: 4236 - DNA, 2033 bp, Emericella nidulans
tccagaaaccaagcccaattttgacacgctgttgttcgagcgactgctcgatcatgttgatttcctcgaccatatagatatggtcggctggcaggttgcggatccaggccagggtctcaatgcccttttcacggttaccgcggaggaagagccaacgaggagattcgcggatcaagagggcgccgataatgagcaggccagcaggaatcaattgcacggcaaaggggatgatccattgtttgtggcttggggcaagggtttcgtccacgccgtactattcttgttagcaaacctggaaaaccagagaaaataaggggaagtacattgatccagaacccaacgacgccaccaatctgccaacccagctcataaaccccaacaaggcgaccccgaatagcgggaggtgccatttctgagatgtagataggacagatgttcgacccggcgccgacgccaatgcccgcaagcactcggccaccatagatcagccctagccctcgatccccattcgcaccgagcatcatgccggcaccaaggaagaaaataagagcagagaacataagaccccaacggcggccccagaagtggccgatggggtacgcgaaaagagcgccgaagaaggcacctgcttgatatagcgagacgatattcgcgctgatgagatccgtattgagcgattcccaattaaattcattttgaaaggattgcagagacagcgttgtgccgatgaaggcgctgtcgtagccgatcatgcatgatgtgaaggaggcgactgcggccaggaggtagacgcgccagttgtaaacctcgcggggagttgggcggtcttcgaccaaggcgaggatggacattttgccctgattaaaggtagaagaataggacgtggtgatggagaaggggaggaaaatagcggagactcaagggaaccttatatgcggccggggggagggcggcctgggtaaaggaaacccggggatgaaaggatttcactgggcatgactcgagcagagattgtggggaaagcatttaccaccctgagctaaagcagtttaaacgagcgacaatctgtaaaaatccccacggggtgctgggtttcgatcccggttaagcgagtgcaggttttgactctgcatgacccgctgccactagggggcgaaagtgttcttccgggggtcgcagccggctaaacgctccccgtataaattataacaccccagcttttccctctcctctccgtcacttccaagtacttccccatttcccgcaaagggaaaaatcattatatcataacaaacatggagccaatcaccattcccaccgaccgcgacggtgtcgcctacctttacggtcacccactgcgcaactcgctctctcctcctcttcatcaaacagtctacaacgcgcttggcctgaactggactcagatccctctgtctacagccactggtacatcgttcacgagatcaccggaaatatccaccttcctctcctccgtccgctccaatcccaaatttgtcgggtcgtcagttacaatgccctggaaggtcgcgatcatgccacacctcgatgacttgaccgaggacgcgcggcaagccggcgcttgcaacacaatatacttgcgcaaggaagacgatgggaagacacagtatgttggcacaaatactgattgtattgggatccgggaagctctgctacaggggtcaccgaacggtgcggaacatttcaaaggaaagcctgcgcttatcgttggtggtgggggcactgcgcgaacagcgatctacggtctgagaaagtggctgggcgttagcaagatctacatcgtcacccggaatgcgaagaaggtggaggcgattcttacgaaggataagcagcgaaaccagtcgccgcaggttgcgttggtccccgtctcagatcggtctgagacgacgacgctagaggcacccgttgctgttgttagcgggatccccaattacccgccgcagacagaagaggagatcctaagcttgggtctccctataggagtcgtgtgatcg

SEQ ID NO: 4237 - DNA, 890 bp, Emericella nidulans
tgatgtcattcctgcagatattgtagctaaccctaactccacctgaagatcagcattgcatatatccgctaccccgagttctcattgcaaatacaaatgcaaatacatcacctgcaagtaacaggttggcattgacacagttcaggaagccgtccgtccgtggcttggacaccaatagatacgacagacgtgcaggggtagcgtcgtatgtgactcaactattctaaattccacacccatctccatatccacctcctctctccatatccgtgtccccggttctagtgtattcagcagaacatttatacaaacaggctgatagatcgtctttgaggcattaggtctgggcgtacggcctctcgacaccaatgactcggtgaaccgacttatccttttcgaggtttcctattcattaccgaatatcaggaagaatagacatctctacagtataagacggctcagattttcgacggcaatatgttatatttttgtcaattggttcaggaagctctagtagatggcagtctgccgtccacctgtaaaggtaactgggggccctcttctctaacgccagataactgcactgagccggtcaatcgtgcatttccacttctcccgactggtttcctgctagagtcttcggtagcagctctggcctgtttcgacgctagggattggtgaacaaataaaacagttcaggcccttgcagggctctggttgtatagaactttatagagctttctagtctgatatcttctgcagccaattccgtaactagttggtatcgcttcaattcaaatatatgttttcctgagaaatcatggtcctatccatcgctcttctcaatcgttcaggttcttccctcttttgtctatagagataatcactga

SEQ ID NO: 4238 - DNA, 4783 bp, Emericella nidulans
gagcagagattgtctcttccagtgcaccacctgctcatttttttttgctccgccgcgctaaacatgggagtgcttccaactcacgagagataaccagctttcctttttcgctgtcaagttccaagtgacgctgccatcggctgcggagggacttcacgattccccgccgcaccgtggcgacattttcagttatattaccatcacattagtcttcttgaaacagctgtctatgtttatggcatgctcaatttcctccagctggtcaatcctatccgggtatcaacccacctgaaatcaacgattacatgctgcactgaccaccgttataaacatcgcggatgccttgaattgccagaccgggtgcgtcactttgatgtgggatgcacaatgtttcaattcacaccaacacagaattgtcttttgcccaacccgattggtcctaaatgggcagtccaacatccctgggttcaggaaccctatactttccaatataaccggaatatattctttgtcacgcatgatgcgcctggcctgcttgtaaagaaattccaattggcattgtggaagagagttaccctggggattgcccagtccatcagcccatacatgggagatggctacatatggcttgttagcgcgtttcgtcacaatattgagctcatactgctggttcccaagctcgtcctcaccacaaggggtgatcattgcaagaggaattcctccatccagaagaactgtgcgtaactgttcgttgtctgcgtggatgtgcgatacactgcattcttcttgcacatggcgagtaacatacttgctctcatctatattgtccgctacgcattgtgtcttcttacaagacttgtgtgttctgttgttccaactgggttttgtacgttgcaattgcagcagataagcctgggtatccaggtagataccggcttggcaacatttctctgcatccaggggacaccatccatcaaataaccgcagttgctccaactctttgctgctaagagaccacgctcccaagaagctagggtcgggctgggggccgtctcgcttaactgcaatgttccagagagtaaggctagccagacgaatggccaagcacatttcttcccctatgaagcgaatatagcccggaagagcgttgagaactttgtggacaatctcaactgttcgcgccccgcggttgttcttcttccaatcgccagcattctcaacatatttgtgcaaatgccttgtcgtgatgtactgctgttggccttcttgctcctcacagagaataaagtcggactggtccagctggtcaccgaaaacatagtgcagcatgccaaagtagagccaacactccatcattgatcggtattggaataagtaattcagctcctcgggtattttcacgtaaggaatgtagcgtgcaagaaagtcctctgctccagattcgtttagccagccacagcgggtgggaaacgtatcccaatcgctcccgtcgtatagtgggccgtcgtacttaattcgaaggggcttaggaggcgcttcaggaaagaacaaatggtccgccattgggtgttgctatctcttctcgagcactgcagaaggttgtccataacaatcagatctgaccccgcttcagctgaaagaaatgctcgtgcgccaagtagaacgagctgaaccccaaatcacgtggcaatcccttaacctgatagaggcaatgactatactctttgatcgtggccgctagatataaatctgtaacctgagaactgtttggcggaggtgttagtcctgatagacagcatgcgtttctctgcatctagtttgggtgagaagactcagacagccagaaggctaactgtttggatatagcagtcaaggcttagccagtattgttagtagtagaattcttgacaaaatatatcgtctgctgaacacttcaggcgcaccatcaggcgcaccatatggcgtatgagcatcgcctcgaccaaagggggcccggaaggtagaggtgttcttcttttcgcgatccagcagtacagaaagtgggccaaggacttgcatcacaacggcatagaagaagtgcagccgtattgttattcgctcatggtagcctgcaacagcaaccaagccttgtaagggccacagggatctatgcgaggaggggcgtgagagggagacttgatccacaaaaacactccacaggtgttttagcagtgtgtcagatgaattcccgcgctttccgcaactaatgaaacctttgagacaccccaacaatacacacttgcttatgtcagtctattttgatatgtgctaggttgctgctggtcgtttcgccgtggaagctggtcttttagttgttttcccgggaggtcccagtctttggatgggcctttgttcttgtagtaacaaaatctgaagattgagattcgctgtcagcagctcctggaggctgataaattcgacgttatgttagttacatgcacgacctattctatgaggcgatgctgatatcttagtcagcgatcctgtcttagggtcagacccatttgagctgcatttgccctaaataagcgtgttaatatatacatcagctttatggactgattgaagtatggtggaagtcgcacactgtaactattcattgcacgtttgatgaaaaattcacccatttacttttggttcagaaaatagtgctagatccgacccatatcccaggattctgccacctcgcgtatgtgagagtcatatacatcatcatacgcccctatggcaagacccagagaggcctcagaactgaacagacacggatccaggatctggcccgtccaggtgccggatgagagtagcgataaagattctcgtgtgaaggtgtctatacgtgcattagctctccaaaccttgacgacaaactgacatggtctagtcggagttaccaggcgtggagtttgcgttgagatcaatccacctaagcagttttcccagcgtgtccctgcacttcataagagtcttgttgccctgatcaaggcctgtaagcacctccatcgccgtgtcgagcaatcctcggagttcagcggtcgaacatgcggagtcggcctgtggttggggcacggaaatgggcagtgtctgaactataaggacaccgatgatggcgagagaggcattgaatgctagacagcagttagtcatctttcgcgcttgtcggcaaaactctcggtaactggcatactataaaaacacgaaaaccaccaagcccccagcagattctggttcctctgtgaccccacgagaatagacttgctgatccggaagacattgcggcaagtatgcaccaggcctacaagcaaagtctccccggagtttcgaagccactccgactgatgctcattagaaggagccacgtcctggcccatgacgaggaactggttgaggacaggtctcagaattaaaacccttgtcccaagatagcggagggagaggaggacgcggaacctcgcagtcccaacggtgagaggaacatcttccaacatctctttgccgggatctattatttttaagtcggcgggcagtgcatcctgccactctgccagtttccagcagagtccggagatacggtcaagcactttgcttgtcgggagacaagtttgcaatgcgaggttttgatcgtagagctgttctagtgcgtcacccatgatatgagtcaaggtcctaattccgtgctgttagtctaccatgggatcggtgggctctcttgaggttctcgtacatgatggcatcaaaaaagcccagactggatgctgtcgtggcgctagacacgttgctgaatggtatatgcacgctgggttcaagccggacgtgagaaagcgggatgagtggagggcgcccgtatctggtgctcagtagactatagcaagttgactataagcaattggctcactattagggtcaggctcgcttaccgatcgttgacgatgcagcagtaccaaagtctccgtcgcacctctttgtcgatcgccgagacatccctgaaatcccgtatatgcagtcccagctgatatgcccctttcactgcgagtccgtggacggtccatgtcatggatgaagatgtagtaccctccaggtacgcctccatcaggaggaaaagttgtactagggttgtcagatcgcaggcgcagtcgacagaaatcgcagttgggctgtttcatacccatttccaatgatggccgtcccagcatatccgactttatcagctcaagcgcttgctcgaagtacatattcgacttggttgcccgttcgttggggggcgagattgccgcggccacattggtagcaatggcaaatattacagaaagtatactgagccacgtcctcccagcgcttcccagtccgtttctttgcatttttgcatacgtgtcacggaatgagtcttcgtggacgcatggaatcatcaggttgacagtggtgaagtacaaacgtaacaatgcgtctccttctcgttgagaagggagtgtaaagagacttcttgtggtaggacgcctgcttctatagccgctagtagtagccgtatgtctttcgtcgaactcgtcaatgctcccattgccagtttggcccaggtccagtggagccgccatggccgtagttggaggaacaatttgcggattccttgcttcattgtctcgatgatgaaccgcaagaagaccacattggacgacatgcctgcgagaataatggaggataatcgttaacccacctgctggtgaactcatgaagaaccgtacaaaatactctt

SEQ ID NO: 4239 - DNA, 2765 bp, Emericella nidulans
tatacatggacttcaacattttgatgtttgtgatcgcaccttggagccattggagggtgacaagagtccctgatcccattttatggacctcgtcgtgatttggcgttacatattacgaaaatgaatatgtccgatttgtttactactgacaattcaggcctggatgctttctctctgaatgctattcaagcacgggcatttttgaggtctctggactttattacggcccatgcctctcgaatagacactgcttctggccagcacattggggtctaccctcgccgtagtcctactgtctgcatggtagtttactagtcattggtttgatttgattcgtttgtgaggcatagcgtcgatgatattcatgccacaaccgacattccttctttatacttccaactgttacacaaaatggggaaggcccacctcgtggcgtatcttgcatgctcgggtggcgtcccggcatcccgcaacgtcctctcggagcgaccctagatgcgcaccatggaactgggctggcacgaaagctaattggaacggtaaatgtgcatctctgaagctacccagtcatacagacattggtgtggtggatccagaccagctgtaacaaacagccgtcgtggaatttcaatatctttcatcctgcagtttccaaactatttagtcgcgtccacacccctacgatgtgctcgtggagtcctttgccgtaagtcttccagctcgtcaattactgccacggtcttctaatagccccggaggcttttgggctataatcagtggtattgaagtctgataaagatgccatatatcgttatgactgcagagttgcatagcttattcttggaggtggaccgaagccggcactgccgatcagcggggtcacggtatatggttgaacagcgcagcgacctcatgagtgcttttcgtctatggatgaaccagtgcatttccgtttgtcttgccttttcctgctttcaaacatatgaagtctgatttacacgcggagagcctcggcgtgcaagcaataccttggtaaagtcgtaggcggcgatgaggtcacagtgatgtattctgcgcgataagcggacgatatcttgcaactccgaactgatacccagcctgatctagttgtctttgatagttacaacgctttagtatgtaaattaacgccattcttcttcctcatggttggtccctcgctcctgcaactaccctgggtcgctctcgcctacgctcgtcccaaacaccgccaggacccgaactggacatatcgacaggcttttaccaactcgctactcaaagcgtttttgcgcaattgggtggctcttcatctaaaatggcgtctgtcactgaagccacgttcagagtcggaccggtttattcagataccgccagccaatccagctctgtatacggggatcgtcatcgatgaaaagatcagaccggaaacgatcggggccacctggtaccctgctccatacccttctcctgactcatctcaaacggcacttccagaaggccagcacgtggtactacacctgcatgggggatcatatatattaggcgacggtcgaacgtcgtcctgcaactttctagccacaaccttactcgagcacactccgtcgagttacatactctgccctcaataccgactggctggaaatcggaacggaaatttcccagcacaacttcaagacacaatcgcatcgtacgcctacctcatccacaccatcggcattccagcgtcccaaatcatcataagcggtgacagtgccggagcagacctcgcattggcactgctacgttataccatcgaattcgacaatctatccattctccctgcaccaaaatgctgctggctctggtcaccctggtgcgatgtcccgccagccgttgatcctggccgttggaaccacagcgccaattatagaaccgactatatccctgggtcatttcctgcacgcggggcaaagctgtttctgaaaaatgtcgatgtaacgaaatatgttgagcgatacgtctcccctgtcttacatccgtttgccgtgccttcgccggtattgatcatcactggtgatcgggaggttctcttcgaggaccacaagaagctttcacaaggcctcaaagagctcgcacataaggatgaacagatcgagttgtttgttactaggggcgttccccatgatgttttgatgatcgcatggatcatgggtttccaaaaggaggcgcgtgaatccgccataaaggctggggagtttgtgagtcggttgtcaaactgagttggtgactgactgaaggtctggttcatttttatcagtccacctgctgcttctcttattcactgaattgtcccaggggatgcagcggagggatcattacccataacaggcagggcttgcaacgagaatgggtgtgtcttggcatcggccgagtgatgattaattagggttgcttgcaaatcagtgaacaacaatgagtcgacccaggctatgaacagttataaaggcttataaagccttccacgacgatatgaccattcttctagttgcattcttcgttcttcagtacgagataccgtcacctgtctcttcactgtaacttgtttctccctttctggggtttcaacatcaccataatgggcctctttcagccaaaggtcatgcctctccctcacggtatcgaccttacaggcaaaaccgccgtagttactggtgcaactgcaggccttggcctcgaaacagcccgtcaaatcctacgccttaacg

SEQ ID NO: 4240 - DNA, 5383 bp, Emericella nidulans
ccaagatcgttaagcttcccctgacggaagagctcttctaaattgcgacgagtctcttcctctgctggtgactcggtgggtacattagagctcgagccgttgctatcagcaaagttgacaagagggtccattcgggggggagatcgcaaacgtgagcctgtaacatgtattgtctcacgtcgggctctaggggtatggcgctggtttcttttcctaacattgttcgggccccaggtatggtacgagaatggggatcccagtctgggtacctcggttccgtcgatactagatgactttgttggcagcgggtctcccaaatcaggttgagggctaccggggatttgtggtcgaggaataacagcagcacttggtggcagcggatcttgggctgctagttgagccaatggaccaggaacggagcttgatacgagcgaaacgcccagatctcgggtcgcataggcagctgaggtgttgacaggggcgctcgctgccggcgttacgtcggaaggttgcgagaacagatctgggaacggttccgggctccgggactgcatcatcctctggtagtggggagcaatagagaacttcctcttgctcagatatttaagccgtcgtcgggttgaggcttccgacttgggccacgatggctttggcgcatgatcttttgctgtgggagttgattcgccgctcccgggcgaagtatccccagagatgaattgcttgtcaagccgggtcgattttctttcccaggttctttttgcttgccgtgccactctatgggtaacaccgagaggcgggatactgcctggagtcattttgaagggtgtaattgtggggtcttggatatatagctggtaggtattccatagatggttgtccatatccaatgtccatcgatctcgtgtttttgtctgtttttgctgtttcttttgggcgagtagcggtgaagaatcagtcgtccgcttcggagtaagctcgatatggaaaaaaggatcatagtgatcactttcggtactcgtacagcttccaccaaccgactgtcgagagctaattgtttcgcttgacgaaactgaagagtcggaggcattggagcatgccgagctgggccgttcaatctcatctccataagtcccgggattccaagtggaccatgagttcgactccgcttcaattgggtctgggcggatctgggccggcggggtttttagggctacccgagcgcgaggcggtgcgagaagacggtcatcgggcggcaccagtgtctcatgtccatgggaagtatcgtcacgagaaggaggaaactcaatagagggtaaaggcagatccggagcgacggggctaaaagggaagtcatggctgacccgagcaaagaggtcggtccctgaccgaacgcgggacggacggaggcgcgaggcagaatgtctaggaggcggaggcggtgcatccagccgtatcaatgacgagcgctctggggttctcggttcagcagaagggtaggtaaaatccttcggcagagtgcgcgacagaccatgctctcgatcggccatggtgtgccacgtctcgtgcagtccacgggcgagaacttcagagagagcgcaggtttgtcaggaatgggtcactcttcctatgcaagcatcgcttcgccgactgggacttcgttaacaattcaataccttccttgccagcggtctactccgcggtccaattcttttcttttgccaggtattgagtggacgcgcagttgccaaaaagccagctaatcgcgttatactggtaacgtgtgattcgcgtcgtctaggaatagcgatttttccgagggactcaaaaagttgtaggtgatataagtataggcgtgttcgatcgtaaagtcgtaaactaggaaagcggcaaaagaaagatgaaaggaaactagatcgtcaagatgcgagtggtcggataggtaggaagcgatcgaattcgtgagtcgatgcgacggacctctgtgtagtgtgaactgcgacagtggtggttaatcagaatcacatcgaacgggttgcgctccgtcgacaaggtaaagtcagagtaagggagtcgggcccgtcattgaagcacgaagacgccagaccaacacaaaagacacaaaaggaaaccgtagggatagaatcgcacgagcgtgacgcccgtagtgggaactaacgccgatgcagatgaggaggttggggatggaaagagacaagaccagacaggtgaggcgaaggaagacgccgacgagagcgggcagcgcgggagtcacgggcctcagccttcaggcaccatctccaccgcagttagtatttcgagcttcgctccacctctttagttactacaatggacacaatactgggtctgacaccagaccctcacattccaatacctgtctggtatgcaatgacgatgctttaacccagtctcgcggtatctcagacgcatcccatcgccctcatcagcaactgctgaccctactgactattcctgactattccgtaaggtatatcctgctgaatattcgactactgacagttgtcattggcagcctcaccgcgcccaaaatgctcgagcaccgacaaatcgcgttgatcccgtggacctttagtcccagtatacggttatggtcgttatgcaagggtgctgcacatcaacgctcatcttgagctttctttgctttttacgggtccatcgacctcgagtctcctcaagcatctcagatctcgattctgaactatatactctctactgcgtatccgctcggtcattcagttgggcaagcgtcttgtcaggtcccgcgtactgaccttagggtgccccagctgtcgctaaggaatgggaatgtacggtgtacagcccgcttatagtgccgcgtgattcactcccggtgctcatattcgaattcaaacactcgtcgcaggagcacgctagcaagcacgcctggtgggctgggcttgcattagcctgctaccggcctcgactcaagtcatcaactcggccacaaccgctgcccacgtaggcgaagagtcatactgggtctgatcgggcactgatggtaccaaggaaaaggcatctcggttgagacaacatctacagcggatactgttttcggcccgagcctgattcctcatttcaaacatttcagaggttttgagggttgtctgtcttccgacagcaactacaagagcagtgtaacgctattacctactaggcttagttcagtgggtccaacgcgcgcgtcaagcggggtaaacgcgctgcaacacgaaaactcgcgcacacgcgcgtctggtaacaatactgtattgtcgcgcgatcttcccgcaaaccagtgtgacggtgtgacagatccatcaagatccagatgaacgatggagcttccaagttccaacaagcagcaagctctccactgcaggaaccagaaggaaccagaccagaaccgacgttggtcagctcagtcttggttcaaagtttttgaccgctatctatttatagcctgtcttacacgcttgcagtcgttcatgctcacttgattctagggcgcaagccgtgctacagggtctcaggtgctgtctctgcactgggcgtaagctggcatgatgcgcgatgcgttaagctcatatgttcggctgttctaggcgaagtacctacggtgcgcggatacagtacggagtacaacagacctctccagtttacgcttctgctccatccgccctgggagaccctccagctatccactcgcgggccaagtgggtttacgacttgtcacatcgatatttgctagacacatacgtcgttgctacaggcacttgctgtctagctaataacaacaacacgcctacgcgtctcactcacgaccttgaggctgcactgttgtcctcattcggccccattccgccagattccagcgcccgatatctgatgcatgcaagtcccatatttcgggggccgtgaacggtacgtacgagttgcatacgacgctttggaatagttgagtatgcgaggcagcagcgcgacatccacgagcctccgtctgtcggaaccaagaaatgatttggttgaaacccccgctagatcccagttgcggcgcatccacgtttccagattcagaccagcacaggccagtaagaataatagtatgcacggggatggagatcccattccttgcagattgggacctaccgcttcacttgagcgaagtcttgaagatttctcggcacaatgggatctcaagttcagccatagcacttgaacgcggtgggcattatgatgatcaccgccgcagtcccttgcagtatcgccacctagggggtttgactgaaggttggccgtctgtgtggttagagtaatggtgcaggctagccttgtcgtcgccagccataacaggtttattgacttggcgtgacgcgatgtctcttcgatatcagaaggaaacagcttgcgcttgcacccagtgtcccaacccgtcatctaacccactctggcccttcgctcagtcagaatggtcataacgcggaaaccagacatgtagccgctctaacacccatgcctgtccttgtatgtagacaatctaaaattgggacttgaataaaggacgttggtggtaccacttcactcaataggcaaggtggtaggttggctgtcgagttagggtttacccccacggccaattcagccctaattgtcacctacacgagtacttctacgcctaggctattaacatcccccaatgatcaattgccccctgtgcttggcatattatttgttcttgtacctcggtacgtccgaggcttttttttcgcgatttactctgccaccctctaccattaaggtgatcatacgagctcgaatcctatgccttaaccgattatgcagctaagcgcgcgcttgcagggatcacgatcctgagaaatcaacttcttgatcattttgacacgtttcatatttaactctgcgtgcatttaggcattctatagggctatgctaacccaacccattctctcctggtgtctctgaatagatagcggacggtgggtgaaccgtcacatcccgcttgcgcagaagaagtataatccagcctggagacttacctatctggatctatctgaatctattctctgcggttcccgtcattgcacaacaagtcccatgtccctgattgtctgaacgcgaggccacggtttcaagatcacctacacttcaacagccccagcgactctaatctgatggacttccaaccttgacgcaaaatcgaaactatcatatgaaagcacaaagataaaggctaagaccagttaggcggtcgtgcttgtgctgaccgccaatacttctcgtagggttgttcaattggtgaaaaagtcaaccccaaccatacctacct

SEQ ID NO: 4241 - DNA, 3865 bp, Emericella nidulans
gcaggggaggacggaaagggtcgcggtgtgtcggccgttgatgaggtgggtgcggactagggaggtgagcagggagaatatatacaaagagccggcggcaatgaaatagtccctgctttggttaaatttggtcccaagaaaaggacggcaggggcgtaccaagaggttaaccggaaatcgcagtggaagaagaagaacaggatgaatagcagcgcgataaggaagtgcgttgctttgaagaactcgtagtaacggtttctgtctctcttagtatattatctttctgacacggatagcgtagccggcggaagagcacacaccgtatagttggcagcgacatgaacgtcagataagcctgcgcaaccagcgcaactacacccgtccagtagacgacactgcccttccactcagagaccatttggcccttggatatgttgtacacgatgaacgggaaggtatgcaccagtgccagcacgaacatagcgtagctggtccagtggtggaagatttgaagccgctcgtgcggtacgccagtcagagctgaaactagattcgctttggtcccgaggactctgccatcatcggtaagcaggcgcgttcaatgcccggcaaatgggtgaggacgtacaatacaaacggcaacaacgcaacagccatccaccccgtcctggtcgcaataggcgggctgcctccgaaattgaccgtatcggtgtttggccagtagtatggtcgaggaccgagagtcatcgctaccgcggtcagtatctctccctactttgtgaagcgtgacatggtgaccacgtaccaaagaagaaaacagcccccaccgctatcagtgcagcaacgcctgcactgccagcccagtatcccacgccggggatccgaaatcccctgtaggagagaaaccgcccagcagcggttcccttctgccaaagcgagctgcgccgtactcgcgcgggcgcatatctcgacgcgagatgagcgacggcaaacacgaataccgtagcgcagaggaagtagacggtattgagggcgtagacatggtctgcttcatacctgaacggacgtcttagcgatcatctatcacccagtttgtatacttgatactgcgtaccaataccgccaatggccccgtcggtaagcacactgctcaggcgttaacttgcacatatccgcccgggacgaatgcagcatgacggggctatcaagccagggcagcccggaatgggcttccatgtccatatctatggagccgtgtctggctatcttcatgtggttcattttggcgggcctggatcggctgacagcctgaagaatcgcgcctggtaagacttgacagcgctgggcgacatgtcgatcagagcacagacagacggcttataagagactgcctgaacgtaatcaaacccgctcacaccacactctggcagtcatttagcaggaaacgacgaagctttgccggatccaggactggtaagtaaaaggtagggtctggactggtggaagcgccgctgattggtgcgggttcgatggagcgacaacggagtgagaacgattgagcacattttcgctagcgttacccactaatgtgttgtttgcaggtgcagatgacaataactggagcgaagggtagcagcttgctgcttaagaggtataacgccaatatttagcgggccagtgacggtttgatgttgatggagatgttgatggagacgcagagatcccggtctggggataaacagccggttggttttgggtgcttacgtacgaaggtaatgttcgccaagggatgacagcctacggctggacgcaaagacacagaaatgatgtactcatctaatttgaattgggtatggaacagatcattaatcatctcaggttgtaagagacatcgttggtggagttgatgctcccgaccgcatccgaaggtgcgctctcaggcctggatcaacatcaccatcaccacaagaattcagaaaatctcattcataaacgttcgatcagtgcgtcagctcgatcggtgccaccgacactgctggcggtaacttttctccagtcccgtttcgattcgcgatctcttccacgccgccgtctccccaaagcccctggtccctcagcgcctgatagccccctctcaagctatcagcctggatgccttgtgctctcagcacgctcgtcgcaacgcgggcagtgtcgccatggtagcaaatcaccagaacatgctggttgccgagcttagatagaacgctttccttgttcaacagtgactcgagctccagccattgtgcctccagcacggccgggttcgagaagggtttcggggtgtgactcgtgagggacttaagagggtaattgacggatccaggaaggtgccattgcgcaaaatcaggtgcggtgcggatatcgaggacgcaagtgttggggcggagggtgagattgtccatgaggttgtgcgaggtcggagaggagtaaaagtgtgtgaacaggacgatcgggctccgctcccagctttcgtcgtagcggtagaggtcgactcgggccaggttctaggcatgtcagtacgagcatagagaaaaagggaagaaaaaggaagggggcagggcggacctcgttcttgatcgggtggaacttgtcctctccaaggcggctgaagtactcgccaatgtattgatacgggagatcgcagcagaggaagacgcagtgcgtcacaccgtctggtccagccagctcagacagggtgccttctttcttccgcttctcgagcatttggaagagaccctgcagattgaagcctgaactgggtccacagacgatgccctcgcgacagaggtccagcgacagcgagaacgagtcgtacgaattcacctcctcgatcactaataccgcctccttccaaggaaactcgaccggcttcatgagcgcaaacgaccggggaccgggaacccggtccccgggtgccgcgcaaactctctctctcaatacagcctgattgccctctgtgaagtactgcctctcatccctgtcatgttccctgttgtcccccatgcttcttcagctaacacttatcctcgtgcagacgtattgcatattttttgaccgtgtccttcgtattctggcttcgcccgcttctcgtctcctcttctccctctgctatgtctccattgctctactctcgttacttcttaataccttttttacctttctctttttcttttcttatcatccctctttcttcatactcttccttctcttttatcttccctccttaccatgtctgttatctcattctcattcacttcctttcttctcatttagctcttattatctatttccttctctttctttcttttatttaacttttatttactcctttttctctcctcctctctatttcttctcttcccttcctatcctacttttattcttgctctacattgtgtcgtctcttccttatacttctttctatatttctttcttacttctttcctctgtcctccctatctctcatctctctttttcccatttcctcatctctctctcatttacctcctacctttcttacttctctcttcattcttctactctcttctctttcttcctactctttacttttccttcacattccaccctatcacttctccattattcttctcttcactcttccctctctcacttcttctcttctctcactattctctctcttttctctactacttcctatttttctcttgcctctctcactcctctatttctatctttactcctttctactcttttcttcccatctctcttccctactcctctcttccacttttgttctctacttttattatcttatcttaccctcactttcacattatatcat

SEQ ID NO: 4242 - DNA, 1408 bp, Emericella nidulans
gctcgggctatcatagcctgactcgccaatcaagggtacgaaagcggctccgctctttcgaacgtcttatccgtttatctgtggattcttccttgacgggttacgtgaaccagtcaagacaaagcctctgactccatgagcaatatcagtctacttttggacacggccccagaagcatacagtgcgctataccaatatccaatgaacaagcggctgatccaataggcggtcatagattgacttattgcctctaaacaaactgtttatctggcatgttacaccattcgattgatgaaagcggagtgaaatggacggcgtaattgccagtctcacatatagctaggttagctatagttacaaatacttctaaagaatccttaaaaggtataagcccttgctttgctctctagtaatatatgcacgaacaagtccgagataaaactttaggagtggtcaatgactaatctgacttgggcaagtacttgattccctcctcagggcagttcgactgggtcactagagtcgtcaattgttagcatgaaccggccaacacataaatccacaaaggacatcaaggtaactaacgcttctcagcagggtcaaaatctcccgtaatcaagttaccccggacatagtagaagtaccaggcctcgttcagattgtcgccatcacagccaacatacggcgcaaagccatcgtgaatgtctgagagggcggagtggatttcgtctagcgtgtaagttgcactagaggaaggggtgatgtttgcggcagcaagagctttgtaggtgtccagcgtcttgaacaggtcgacggctttttggaggtagtcgacaacttcctcttgcggggtgtagtcggtatagcaggtcggttcgatggtgtttatgcaagttcctgttacagattagtacaaagtttttctttttcttttttcatattgatagagaagcaaagtaagtaccgtgcttgttccactcatgctcccagaaagactcatcgtctccgctgtagtccatccagtactcgttcatgtacgagagaagatcacttctgccgaattccttgatgatgtctgtgatgttggagtactcgcgtgacgagtcgtacaactcctcgtatgtgccgtcgcagttatctggcctgtggcaaagcaccattatcagcgaggctggagagagatgagggggtggatttaatatgcgcaccaaaggccgtgaagagtccaagaatccgctggaccggcggacggatcatagtcccagaattgggtgagcaagactgaccccccagggctgttaaagcatcaggatggctcgacgctggagcttgtcagatgaggggggttcggtgtcgaaacctttgcgtcgctacgacgcttggaataggagcctagcggtcatggtga

SEQ ID NO: 4243 - DNA, 5320 bp, Emericella nidulans
ctctacaaatgggcctgacagataatggacggtatggcaagcatgctgaccttccaattaccccaggtctcgcgtctgacaggttacgctgccatagtcaaagctcattctttctgcctctccctcctggtaaaggccaactccaacttcccaaagtacatgacgaaattatccttcgcgtcagccagaaactgtttcccgtcctcgcctggcgcaaacttcacgtcgaactccatgatcagctgtgcgagtgtgacgcggaggttcatgagtgctaggggtcggccgatacagttgaagtgacctacgctcaaacagttgatgccttcagtctagctcgactaggaaatggagtggagattgattttaagaatgaaagggcaagattcaagagcttaccaagactaaatggcgcaaaggcgcccttgtgtctgaccagttctggcttgctataccagcgctcagggatgaagtcttcggggtggtcgtaggctatctcggctgggataatgtcagttgatatccactttgtcaaattaaaaaaatctgttgaaaaagaaatattaaacagaacaataataatgtaaaaaccacttacaccgtccaatggtgtataacgggcagaccacatgcatgtcccccggtatatacgtgccatcgacgacaaccccctctggcggggttttccgctgcaacgaggacggaacagcagggtagaggcggagtgcttcgttgatgacgccgttgagatggtctagttgagcaatcttcgagtgcaggaattctgtctttttggggttgtcgttcccgaggtggtgtggttcaagctcgtcgcggagcttggtgatatgctcggggtgttggacgagctcgtagaagatggccgagagggttccggctgtggtgtcactggtactagttagagttcgttttcaacgagatgatattgggtatactgaagcagtatactccctgcaatgacgatcagccgggagtcgccgtaaggtaggttcttctcctcaatcgtgagatcttccacgtttctgtcctttagcggaacgaataacgaggagctgatgtcggggatttcggggtcattctatacaggtcagtgggctctcttctcatcagtaatcgggaatattggcagacagaccttgaacctgtccagcagcctctccccacagaactccaagaacctccaaaagtccattgaggccccaggaattctaatcatcaggacaaacgcccaagccggcaaattcagtcccacgaagttctgcgttgccataagcagcctcattgcccagtgctcctcgcccctctcaagagcctcaaacccccggccgaaggatagatctcccatcacgtcaaaggagtataagttgaaccacttcgtcacatcaacgggctccttcctactggacatttcggagagtctatcaagcagtttctcgcggtattttctgatcctcacctcatagccccgcaagagccgatcgctgaatgcgccgctccaaacccggcggcgagcatgatgctcttcgggatcacgcatgagctgcagcgcagttgccggtgcagaaagctcgtaattcgccccttttatacagcgcgagtgggtgccgtagatgggccccagggcgtcggggtgggctattgatagatctgaagagccgatacgcacgaaggggccgtactttcgatgataatgcagtagggtgaggtgcatattattgctctttagttgagtagaggtccagactgtcgagatgcgggcagggaaaggccctggaaaccggttcagagggtggaggaggaggcggtacactaggaggctggtatagataccgaagaggtaggcagatagcagcttgaggacggtcgatagtgcgactctccagggggctccctggacgtaggagagcatgacagttgctgtagacatagctgtgaggaggagtttgaggtaaaagaatccgtagaggtggtgctctccttgcttgaaataggcgatgtgcgagatgacgccagccagcacgacggctgcgtttaatgagagcgccatatcgacgaccatctctaccgacggatagctattaagttgcttaggaagaatgaggtctcgggtgctgcactgttcgtaagccgtgcgtgtttatacaccgttctgcacctcggctaggaccccccggggcgaacaagtctgtgagtctgcgtcggcagggctcgcgtacagatgaatgggttgatcaacaaaccccacctggatagccgcatcagatggcaggatcgccccgctcggatggctctctgacgttcgttcacgctaatgattgaggtagatgaaccgagacctcggcggaatgagcgcatgcgagagataagaccctcctgaccagacagtgtccatgcagtcacccagcatgggctgttctctagtagagatgattcgccatttcctcagcattataaattctccttacgtgagtgggctaccggtacagatggagaggggaaagtactggagctctcgcaatgttacattgttacactgcatgtgccgccaatccattcctgacccatggcttatgttaggcctgtgcgtcttggctacataagtgttacagggcctcacccctctgcctctttgttcttaaggataagaggtaggcgtggtataggcttgcagcagtggtagatgcccgcataaccacatgccgtctaggtccagcactatcatctcctaggtctctctgatctgagcgtgcgttatcttgagtaatcttgacattaattgggacatcaaacatggaatgtctggtttgggctgttattgatagatagaaggatatcaccgtctagccctaactggggccgatgtgacaggtaattgcgggccccagctctcccaagtgtactgtactacagtctctaacccagggcttcggccgctcgcccgaacggcaaaaccctaatcggctggttctaccgaaatagatatcaccccttcaatgagtgccattctgctcagcgcctggaaaatggggactaaccagccggaaaggaatgtcggctcacgaacaaattcatctagtgcccgcatttatcctaaaccccgggagccagcacagacatctatcggcctttaggcttatttgcgggtcactctgggattaccaatcatcatgtgccataagcctgagtatatgcagggtcttgttccatgctattcgacatcggcttgctcgtacgggcttgccgggtcaatatgatcaagctgtatgaacaaaataacaaaattgagactatattatgactatatgaccattcaatgcgatgtatgcaacgcattctaacgactacatagcagctttcttttaagcttttaagcaagcaacagctctttcaatctcagcggcaatcgcgtccacaagctctttgacctcaccctctgccagcaagccaccctcaacacggaccccaaagccaatactatccgtggctggatcgggaccaatatcaaggaagatattctggtctggcaagtaagatgtatcgaggctatctatcgatgtagatgatgggggtagcggcttagaaggaatgaagtctgtcggaacgccgatgcgaaggggtttgaagaacccggcttcacttttctcgtcattggcttgctggctgggggtggaggaagtgctgtcctgcatccaaagcagattaacccacatattgaatagcggtgttacctctccattttccgggttaagccatgttaggactttacgaagcgaactctgctcatacggtacccgttctgcgagggatctctgaatgtttctcgcctgcttgaggacacactctttctcttcattgcccagactggttaacacatcctccacaacaaacggattgacgttcaaacagggtcccgggaccctttcaattccatcgaacgcagccaagcgcccattctgatagagtcccatgacggggctctcaacgccagtggatctcgcaaggcagcgcgcaacagcgaggaggatgatcgtctgaaggctgaatcccgcggatcgacatattttctccatcgtagatagattggagactctttcccattcgccaacgaacaactgttcgttgtttgcaattgatttctgcgtaccggcgctcctgacaagagtcggtgtagcgggcttaagagtcgaggtccagtaatccttctcgttgacatcgaggttggagagagcacgaagtgaaaagtccacgagggcagggaagtctggggctgtggtaaaatctgttggctgatcgtcgtagagtttaccaagttcagagacaagcatcggaatgctccatgcatcgtacagagagtgatggataataagcaggatgccatccctatccgcagccttgaggtgccgtaatcgcacaggcggggaagagagggaggatgggtgcaacgcttcctcgcgggcgtgcgctctggctaggtcggcaatattgtccgcagattcgatgactctgaatgcatccgagttttctgcaggtgttctcagaacaatctgcacagcctctgagtccgaggtagctgcaaaggccgtccgtagcacaggatgtcgcttgcgaagatcggcccacgcacactggagcttatcggcattgatacgcttatcatcacgagcgacaaaagcccagggtgcttcgaacagtttccggtctgacttgagccagccaaccaggtggtgaaattggccagggagaacggggataattgtttcgatctcttctttgctgagatgcagattagagatgacggtttgttcgacgtgaggataatccttaatcaaggacgaagttccatgaactgggttgtgcccgtttgtcgtggtagagacttcggattctaactgcacacgcgtacttataccgcgcagcgtattcccctgaagaatatccccaacactgactttcaaaccctttgtgcggcaaagagaagcgagcctgatagctgaaagagagtcaagcccgaggttgaaaatgctcgtggttggcttgatatcgtcagtagagattcccacgacgtctgctagaacagatcgaatggtttcctcatgcactggcacaggcgtagagggcgcagaatccggcttcgagccgtcagtcaccggttgcccgaatctcgaactcgcccgttctaacggcagtcctcccagtccctgcggtaccgccgtgacacatcttgcgggatgctcgacgacatcacagaaaacctcgacgtattgactgaggaactctcaagcattttctggttaaggta

SEQ ID NO: 4244 - DNA, 5746 bp, Emericella nidulans
tctctcgtcgtatccgatagtcatcgctgcgagttgtcagtatcgagacgtagctgaagaattcgcaggaggctcaggattgagaaatgaggtgcgtagtgaacgtccgacttacgatcgcagtaaaccttgtgcatatcctctggggggataccaagaattccacattgctcgatgactttcgggtccttgcgaacaatgtgttccacctcttgcaagtcctccattgtgatcagcggctgaacgccgggagtgtgtttccactcaacgattttcttcgcatccaggtcgacaatgccatcatagatcttgccgcctggtgcaatgacaacgacgtcggcagcacgagttggacgaggagattcgggattcgccagccaggccatcatcttctccttgcggggttcatagagggtgacggcattgaagttgacgttgccatgttctttccggatgatctcaaccgcagcatcgatctcggcggtagatagagggtcgagcgggtggggagggggagaagaggcgctgacctggagcgtcaattgcttcagtctgtcaaggaccataatgtctgtatgtatatcggagcgggtgaggggatgataagaggagtgactagaaagcagcggagagcttaagtagacaccgcaactccagagagcgcgaaaagaatatgattagatgatctagagacagacaagaatatcccgtgaggggatgagatgcgcttataaacccccaactgtagcatcttgctttcgacacgcagagcctagacaagcgacaagcaacctatccgagcgataagatagcgaagacacggattccttgtctttatcgggactagcgtgggttgccgctgtcgttctcccgaataaagcaagcaaacgcgatcctccatcttagctccatgcattaagctggagagccccggatcacttacgacttttagtcaatcatagcgtggatcatcgaaccaggactggcttgtctgttaggacagctctgtaggtactccgcattctgagaacacagactccacccagctgcagagctcgcaactaacttactctacgcagcactaggcatctagatcccatcaagcattcgccaaatattatcggggaattgaccagaagccttgcatgtacgtctcggacgaacggattgagaccgcagcatgttgtttctagctgtggtatgatgacaaacgcttgcgtaccgaggtttgggtctggtatgtcgttggcccttaagggagcatgaagctgctgataatctgtcggctgatgatgcgcaataacaggactgtccgccagtcagtacttactgaacagagcatccatccccactgcttgctgaagggacgggtgcttggacttctggttgaacaaacgcctccgcgacactgcgcatctctgtctacttgatctcattcgggtggaaatgtagcagcgggcgcagttgaagacagtgttcttgacgcgaactctgagcttggtgttattggaactgatatggcctgtcgatttttgaatgcctggaggctacgagctacctactaatatttccctgtaaagctgtatgcggtcaactagataccgaaccaactgcaggcagagatctcagaggacatattatgcgctggtctgttacacttttgtagccaccaatgccttaacagtatcgccaagtcccaccatgcagactgttgcccagcaggcaatcccgatcctaggaacgaccccgcgaaaaagtcctctgagcccagaagtcttgataatgtgcttaaatgtggatacaatggtcggcttctctggccgtgctggatcgctcttcattgactgcatttcaacacgcatcaccttttcaatgttaacgtggtcgcttagacccgatttgtactcaacgcacctcgaatggctgattccagcaactcaacgggctgccaatagtggaggcctgagaaattacggctatatgaggtgatgatagagttctttgttccctgcgcttgtcagtgccagaatacactttgagactctacgtgaggctcactttctgtatatcggtacgatcccacgagccacagcacggcccgcaagcattgggtaacatgatagcacctgctttctcaaacacctgcattattcccgcctcctccaatgtgtttagggtctgcaaactgccaggggacagcagtaactgcgttgttggcttcatgccagcatccaaagcttattgggcgagactcgctgcgcggctgaggtcatgaaaagaagagttcgtgcaggatccaataaggccggcggtcagtgtcgacggccactcattgtctataactgctgacccaaattttgagatgggcgttgacagatcaggcgtgaaggggccatcgatatgcggctccagtgatgagagatcaatatcaataatctggtcgtattcggcgccctcatcggaccggagctcatatgcaattgtctctaccgcagcagccatgtcaggacgccggttggctcgcaagtactctgccatggaggccgtgtagggaaatatggaagtcgtagctccggattcagcccccatattgcacactgtagccatcccagtcgctgaaattgtctgcgctccgagaccaaaatactcaatgatcgatcctgtgcttccctttactgaaattatccctgcaagttcgttgatatgtctttcggcgatgcccagcgcgacaactcgccgtgaagtcgcacacccaatatccttggggcagtctctagcggcaaaccagccatgacatcaacagcatcagctcctccaactccaatggtaatcatgcccattccgccagcattcggtgtatgcgaatctgtctcgaccatcatgccggcggggtaagcgtagttttccaggatgaatgattcctactcctggcctccaaacccccatcttgtacttctggcatgcacttttcatgaagtcgtagacttcccgatgggtctccaaggcccgggagagatctgattcttccccttcccggctgacaattagatggtcgcagtggacggtcgtggcactgcggctgtgtctaggcctgcagacacaaactgaatgagcgccatctgagcagttgcgtcttgacaagcgatgcggactggtttggatcgtagctgcgtctggccacggacgatgtttccatcaaactcatcatcgaggtggttgtacagtaccttttctgcgtacgtcaaaggccgcttcaacctataatatgatcagtcctgggcttctcttaaagggcgaggtacgaaccgtcgcctcagggtgccaatcttgctactaaatttgctgaagtcgacttgtgtgtccgactcgaatctgcccagcgcagccgtagccacatcgcgatgggcccagggcgtgcgtcgccgaatatacctcaaagaatgcgcgaaaagcatattggtgagtatgcggtttttactcgccataaaagctcatcgttccggtcatttttgttttatatcggggaaacgtgcttagctcggatgtatccgacgccgcgcagggctgttcacgatactatatagtcatagttttcgaatatcggcaatagtatcgtcaaattcaaagcttgactatcttgatcgtcaaataatatcgtcgagatcctcaggtgccgatactatatcgttaaatatcattgccgatactattatcgttaaatatcacatgattttacctacttatgataatctttgcctgatagatatgaagttttacagggttatcccgacttatattcttaataagcttagggatgttattctgcttcccttgaaaaattttcctgctcgacagctaaatattttaacattcaagaccactgattctaaggattaagttgcaaattttgcaactatggccttaagtgaaaatgaacgaatgactactcgtcaacgacgacctaattaccttcttcttaataatgggtatgatgatgagagtctgcctgaagatcagatatctgaatcctttcaagcagaacttgatacatttaccaatattaccacttcctctgatattatgccttcggagtcaatatcacagaccatagccagcgcaatgcccactgaaacccgctttcattactctcaaaaacgaccacggtcagcaccagttactggctgggtttgggatcacttccagattactgaagtgaatcgggaatggacagtatagaaaactaggaaaaggatgtcatcagacagagatatctgatatgcttattttgacaataaaactggaacttaatgtctttggagtacatcagactcattaagacagacctctactaccaatatgcaatgatatctggagaaatattcaatctttgtaccttattcccaagccaaagcctctgttagatcagggcagcctagtattatgagcttcattactaagcaagagagtctctcatatcaagaacaccttgaaaaaaacattctttgttggattatttgagataaacaagtatttacaactatcgagtcaccagagttttagtagatatttcaagatattccaggaattatacttctattttcttctcaagcaacacttcgccggcggcttatagataactttgacatacaacgtttgcaattaaaagaagagcttaaaataacatgcaagtctattgctttgtctcttgatgtttgacaagccagaaccaccttccaattcttggtattattggctactggctcacagaggactttatataccaggaaaaggtgctagagtttacagaactctatagagtctatagtggagaaaaccttgctgctgctgttcaactaactctatctgagttagaccttgaagagaagttaatcatgattactggagataatgccagtaacaacgagacaatggcttcagagctatactatactttaaagggaaatataggtgaaagcagtacacttcagtttcaaggacttgatagttatatccgctgcctagctcatatcttgaacttggttgtgaaggacattcttcgagcactgaaatctggcagtagtgaggaggcatatgctgcctgcattagtctctgcaatggacagcctatatctacacagtcagcattggcaaagctctgaattctcagtctttggattgatcgcagccctcaacgaaggcaaaaatggaaggatatttgccgattcatggacctctctgataaatacattgaatatgatgttgaaacttgatggaattctatatatcaaatgcttgataatgggttaaaagcaaaagcccagattaatcattttctggctctccaggctgagatctctccatttacagatgatgaatggttacggcttactcaaatacaccaagttcttgccaaatttaatgaacttatattattcttatctgagaagagactacagatcagtcttgctgtactactttactatgagctatatgatttactacacgaagcatctgaatctcaaggagcctttgcagggttggatcatgatattgcatatgcaataaaggaaggcttaacaaagtacaaaaagtactacacattcatggataattgtgatgtgtactacatagttctgatcctggatcctcaggtcaaagcagacctaattctgagtgagattgaagataaaaaagcaggtaaacttattttaaaggctatccgtgataatctttaccagacatattc

SEQ ID NO: 4245 - DNA, 5794 bp, Emericella nidulans
tgaacaacttttaccatattcccatcttgaccaccaacctgatcacttttccaagccattatgctaccgccattgctggcaacctcttcatcctcaacaacatcagcctcactgacgcccgtcctgccatcgtcgtcagtcaccccatggacgccgcgaatgagcaaagcgccaacctttacgctacaaagctcgctgaggccggcttcgtcactgtctcgcttgacctccccttctggggcggcagcgaaggcgagccacgcaatgtcgtctcgccggaaccctacgccgaagccttcagcgcggcagtcgactatctggctcggatgcccagcagttcgtctctgtcgaccgcgaacgtatcggtgccgtcggcatctgcggcagcgggggattcctcatcagcgccgcgaagatcgacccgcgcatcaaggctgtcgcggcagcaagcatgcacgacatgggtgctgtaaaccgccatggtctgcagcactctcagttcctcgcggcgcggaaacgggtcatggcatccgcagctcaacagcgatgggttgaagtggacggcggagccacccagtacaccagcggcacgcttgaagtccttacggccaattcgacggacatcgagcgcggtacgacttttaccgcaccccgcggggcgagttcacgcccgagggcacaacgcggaatctgacaacgcacccaactctgtcgagtaattccaagttcatgaacttctatccgttcgacgatatcgagtccatctcgccgcgaccactgcttttcatctcggggggccgggcgcattcgcgcgaattcagtgaggatgcgtgtaggcgcgcggcgaagccgaaagagctgtattaatgctggtcacgtcgatctctacgatcgcgtagagcttatcccgtttggcaaactggcgcgtttcttccgggcaaatcttgctaattagaaatgtgtggcgggtggatggtcgatctattttttttatcaaggggggttggataaatgccatgctaatcaacttaccatgatgcgattttagaacaccgtgcaaatagaatctcatttcttaattcatccaggccgtattctgtggccacttatgggctttgttaatttattaaattctcctttcaaggctagacaccgcggcttgacggcaggtattatgcctggtttcgaccaaagctggtagagtagtaggagagtagagtagggcgcgcatagtcacctgaccacaccctaagggcgttactccaaggttcagatagactcctaatgattaaaaggcttatatccttagggctcgcaagttaaaggtcaaacgcttaagttcagcgagcgttgtaaccagttcagcggcctcattaagcgtcataagaacccatcattatcgtatatgaatacatggaggatggcctcccgtagagggctctcagttggcctgtagacagagtctgaaaacgtctactgtgaagttttcatcattgtgtataacaactgttgcatacaccgacgttcctaggcaggaagcaaatcagacaagtactttttagaatacaataatgttctcgatgcaggcggttgcatctcatacgaggcaatcttgctgcaagcggtcgggatcgagctcaagtaccatatttattcatggattcatagaggcttccttcgctttgtcgtgctgcgtcaagcttgggttagtggacgtgcaaggtacatagtgctagataccctctagcatcagtgacgtgactcgcgatgatcggacccactaatggttatctgcttaacatgtactacagtataagaatataagcgcagccaattaacatagaacaatttacacgcagctgaaatccaccccctcttaatgggaaaggtcccagacgatacaatggagactccaagcctaaccatggaatgctccagggcctagactgataagtaacgtgcaatttaaccccacaatagccaaaacttggcggttagctaaatataggagtataaggccttttgcggtcgcgggccggtttgaagatgtgagtagagtgagagttcaggactttcggatttcagccaagtcagacactatggaatactccgttcgcctcgtttccttataaaatgttttcagctgatataatttgggcacaccatgctccgccacaaccggcgggcggccgcaagtcatatctgaccggcatttcatcgccaaggggctccactttgcgtttcatctatggaagcacaatagcatcaaagaaaagcataatctcccgcgtccaacgcagaagttgtcctagttcctgtgccagcatagacaggtccacgcgggcgcaaccccttggtcttttcagagagtatttggagatatgttcgagcagggaagaggattaaagtactgggggccggaatgggggtggaaggaagtgttgcgaacgaatttggaacggaggtgaagacgcccatgagaaagtatcaggccaaagaggttggtggttccattgtagactcgattgatccttaaaggtaggtattttcacatatagcatatgtagtatgcgaatgcagaaatagttacttgccaccgctactacgtttatagtttgaatgtctttaggcgtgtttttgttgacgtgcttatgtagataacagctggcccatttacgcagcatgtccggcttgacgcgtaaggcggaacgaacagcaaggagtcctgatatctccttcgaatgatgattggtgagatactacctgcgccggcttgccgaaaaggaagtcttagagacattcaggactatcctcagcgttgtgaaaatggatacatacgctctcaaaaaatgaatagaggtgatataatgataatcttgacctatcgacattgatgaagcacaattattgctaaccataatattatactagctagaagggagctcgctaatggttcctgacaactttttaatactctaggcttgaagtgcttgccaaagtgcgggataggcagatttccacggcaaccgggctgtacctagcttggttctcgcttcgatgtacaacctagcttcctttaaagcaagtagccattgaaagcaacaacagccttggggcagaacacgacacattagagagacggccgtgctcttacggctgaggccactcatgccttgatgagtgtacctcataagaaggagcggctcgcagaactcctggcgaatctcaatgtcgagttacagcacgatacaagatgactttcccttctttctgtccaggtaatgggtgctccaaggtcgcgaattgccataaatgacacatcaggtgacctttgcggccctattggatcctttagccatctccaaagcgcaatcccataatcagccgatctttccattcgcatcaagcagtcagccacaaataaaccattcgacatcatctcttccgcttcttctttttctacagacattcctgcgataaagagcagaagatgaagcgaagcgtggtaaagcgtggttttttagggcaatccatcgccgagcaggccacgggagtcggctagatttcgcggagatggacggagctgagtatcgataatgaacgggtcttcagtttcgcttcgaaagcaaagtatcatgcatggcgtaattctactgggactggacatcaagaatttatcagtcgtcattgtcggtcatacgggccgtggaaatactagtacactagcgagagaacgctatggaaagttagggttgttttcctgagggcgagtttgctgacaaccacttttcttggtcgcgatcggttatttaaattatgtcctgtcttcgccgggtttactagcctacagataaggctgaaccactgcctctcgctctctttcgtgaaggatcttagtgtcgttcctgccgatagagagcgacaaggctcacccatcgaccgcaatatgtctcggcccagcagcaccgccgcgcgatcagaggcggataaatgcgtaagaggatgctgccaagacgcggtctctgctgactgcttcactgacagttggagaaaggcatgactcgtcggctcgtactctggcgaagggctgacgatgccgatcgagagacgaatcgagagaagttgttgagccgtgatgacgataccgtaaggtaatagctggatgacatacagaggatatttataaccatgacaattttgattcatccccagccttctcatcctcatcctctccgccgtccttgtcctcgtagtttctccactcagcctcagccgcacggccccaaaaagctcggcgcaggcccagcggcgagaccgggtcagcactaagcccgccgttcttcatcttttgcgtagagcaatggggccaactaatctccctgcagctagtcagccaatcagcctctttcgtggcggagttggcgcggaacgtttcgaacggggcttgacagtggtggagttgggtcgggccaacaccgctagggaaggttgagctaccttagccagcaaagagcagcagctcgtgagcccaaaagcaatgagcacagccttgcagactaccaattatcgttagacggcgggcctcagggttcgattatttgattttaattctctgctcggcacaaacagccaacagctgacggtctcggggtcccctattatgaaacgcgagtcccccgacccgctgacttcaaacttctcccatacttctcccatactttgcccaacgttcgcccatacttttccttacctttttttgcatatatgcaattgatctatccgcccatcatatcgacccatacacaatgagctccgacgattccgactgcacctccggctccgaaaactgccacttcagctgcccctctggcggaacgtggtatgtctgcccagaggcgcccttcttcgtcggttgctgcagctctgatccatgcaccaacaccgactccaactcgactaacccatgccctgatgtctatgccgcctcttttgacggatccatctacgactccatccgaccaaacacttgcatcgacgagagtaacgataactggtacacatgcaacttcacgcaaccgcggtttatgggatgctgcagcatcaatccctgtgcgaacgggacgtgtccgcacgagaatgtcttgccggccgcgtggagccagagtcgcggggatcagtatgagttgtttctggacgaggcgagctcaactgatggaggcgatggggggttgtctggaggcgcaattgcggggatcgtgattggagctgtggctgggctcgtcttgctgctggccgcgttctggttctggaggaaaaagagacgtggtacagatgggaagggcgggtatgcgcccggtcacgggacagggccagccacagaaggcgagtatgggtatcagcagccgacctcgccgtaccaaggtatgtttcctctctagttgcagttgacctgggtccccaggtcgaattcggcactggtactgatcgtctgttgtagactcgcacttctccagcccaggccaaaccaccattagcgcaggggttaagtacccctctggctcgacattcagcccgtcgctgtcgccgccaatgccctccgagggcgggcgcccgatctctgagatcagcgggagtgacgagcatttccgacaccagtcgggcccgaaccacgggcttggcgtatttgcgaagcccgacccgatcccggaactcgatagtgcggcgaagccgcccgaggtacatgaattggatggattcagccggtcataagtatcttgtcaggagctggaagagt

SEQ ID NO: 4246 - DNA, 6534 bp, Emericella nidulans
gagggccctgccaattcgggcccgcctaacaggatcaacgagatatgactagttatgttttcggttgaagatttccaaagagcattggagaaggcagcgcggacatggctgaagccgatcacctacccctccagaagtgccgtgcacgaactggataattctttgactgaaatctcgagccagcgcaagttgagcgtccgagttgtccgcaccagcccctaagtggtcattgtagaataggtaggggatatcactgagatgcgctacaccccacattgacacacccatggaatcaaagaccggcgcgtatcgagtttcattgaactcatatagccgcacccgagaggcttctacgcccccggcttcgacgtactgccaagtgaaatcaaggactgggcaagtgaaccagatatcgcggttcagctgtgtgcgcgataatactgcggtgaaatacggccctcattctctggcttaatcatgtgtttgaaatcctccaagggatacagctgaaggagcctctcttttgtgggctctgagagattgtgcagccatagtccgaaactcccaagaacctcatcatctgtcgccgtggtcggcagcgcgtaccaggcgccatcgtttgtgacccaggaagctactaaggatatccccttggcgaatttccctgcgcgcagcaactgcgatggcctatcttgaataaagtcaccatcgatcgttggataaaaatacccttcgccgaaaggtggacgcgctgcgcgagatgcagcaaccgataagttggtcagttgctcaaagggaacatctcgaagacactccaatgtctgcgagtcgtccttacgctggcatcctaattgctgagcgattgctgcagtattgttcgcaaccagacctggcttgctgttgaaattcagccctggaccgccggacatcattctagggccgtgggtcagcactgaatagcttctggtcgcgactcacttacattgcttgttgaaatggaacatcttggtccccgccaaaggccgttagctgcaggccaatatcactagctcccacgctttgtccgatcacagtcactggaagatagtctgtcagcctgaatgcaggaaacgggtggttgaatatacctctgttagggtcaccgccgaatgacttaatgttatcacgaatccctgatcgctcgatatttcagccttctgatggtaaagtgaacaccaaggtacatacactccaaagcgagacgctgatcccgaagccctgcatttgtatcccttttgtcaatcaacgccttgctggttgcgaagccgaatactacatatcatcagtaatcgttccacaacctagggacagagcatcgacggctcctaatgcatgacttactgcccaggcggtagtttatgccaacatatatgagcggcatcccatcagaaacagccaactttaccaagccgtctggctcgtaaaggatatcggaagctgagcctaaagcatgaccacctactgcccatcagcttcgtcagtgttttcatgctcacaaatactgggcctacctccatggatccaaaccgcaactgggatttttgcatctttctgtgttcctgccggccttgcaattctcaggctcagacagttttcgctgatgttggtcactctacttgtgaacggaaggatatctcccgttccctgtggacaccaggcaccagcccgcgtggcgtcaatgacagatccctttgccggtcttgtcggaacaggtgctgcgaatcgtcgctggcccgtaggctcctctgcgtagaaaatgttctggaaatgctcaatgccagcaggggataaactgccaaggtagataatatcccgcatggagtccactaccttcaggctagcacttagagaaagggtatctagaagtcgctggtaaaagatcgcaccgattgccagaagcacagctcccacggtcacactcaagaggttagccataatagctgcaaactttattgccagaagtccagagtcttagtccccagaactaggtataattgggcttcacgccggatgagtgagaggtaaggggaaaactcagcgttgatgaggtgcggttggttcccagctaatgctgacgatgcttacttatgaataagtgcttttatttgtcacagcaacgttgacgcctcatggtttgtttcctttgtcttgagaacccactaagaatattactttcgactatcacagcctactagttaatcaggatagtgcttacatcagtctcaaagcaaaatcaagagtttgggagtcgtcgacgatcaatccggttcatccggggcggcttatgcggcagctgccgttatatctttaccacacaccagcacacgccacaaggatgattacgtgcctaatcactcttaacgaagaccggtgactgtataccagatacggaagtattgtatatcctgggccctcccacccaagcagtttagtgctgaaaactaccatgatattttgccgatcagttagaagctaagcagttgaacgatcttactccagtcttactccacgccagagagtgacaaagacacaagaatattcattgtgtttacggaggctcactgatccgcagcgaacttcatcttgtacaataatgccagtataacctcagtctgcacgtggatcactctcttccgtgcttcagcctggatacctacttcaaacaataatcctccaagctggctctgactagcacagtcagagtctgatccttgccaacgcagggccgtctaggcttgctccgaagctctctgagcttatagaatccgcttgaagcactgaagccgctgaggtgcgtcctgccgtcattcgtcggctgagaatatgtgccagcataagtgcagctcttttaatcatctactgcgacaaatgctaaccagggaagcactggcagcgaggaggcattgtgttaacaatatcactgcagcgtcaaccaggccgttaatcagacgtttaacggatctgttaccttatatatccctctcaagacatccattgtcaatgacatcaagtatgaaggagatatcgactgggtcaagtggattctgattaactttaatgataattatggcagttcgtcacacaacttgactgtgctgtatgcatctctaaggaatgtttcggtgatccacacccgttatagttgtataacagcggatacgtcattgttttcatctattttcgccttaggtagtcttcctacagtgcacctagccagggatgtcgcaagaggtcctcagcagaagcccgctcagtggggttaatcctcatcgccgcgcgcagccaggaggcgaactcgtccctaacttctttatccagaccaggcatgaagctatccgaggacagctgtggcctctgcgttgcaagtccgcccttaactcgtccctcatcgtcaagatctccctcaccagttcctggtccccctttttcaaaaattcatcaggaaagggcccaaacaaattcacaatctccgccaggtgttctttgacctcataatgcccacctggggaaactgcaccgctgaacatgcggactgcgcaatacagttcaagcacgacggcgtagaagttccaaaagtcggcgcttgcgttccaggggcgtggataaggacctcgggcgctcgcagggccacgggttggatgttctcgctgaggtgggggtcagtccagctagagacgccccagtcgcctaaggcaatgtcaatctccgacacgcgtgctttgtcgtcttcattgaagtagtaccgccgaaggggggttgatgggattactgtgtatcgttcctcggagcgattctgctgggggactggggcgtcagctaggtatctggattctatcagtgagtaatcgcgaaacttcacgaagattctgtccggtttaatatctgtcatgggcgttagtatgaccgtcaattcgtggccagtttggaagtgtgggaggtacccgtatggacgacattatgatcatgtgcgaaataaagcaccaacaggagctgtatggtgaatctccgcatcaccaaggttgggatcctgctttcgatgaaccaagccccaaagctcgtcaatatctcgcccataatctcaaagacgagacagacgtgcgtgccgttgggcccggaatgctcaaagtcgtccagcagatggcagacatggtagtaacctagctgctcacggtctcctttccgaagatggcgcaaaatctcacgctcaaagatgggctcttgcgttccatcatagcagtctgcactgagcactttgagggcgtggaactcgtgctcggcgccgggtctgcttgtgttagctcagtgattctttctctccgctgaacctcttacagcgacggcttcaggtctctgaccagccagactgttgaatagacaccgtatccgattttgttaaggactttgtatctgtctttgaattcgtcgcctatttatacggggtgaaagccgtccggtcggtacgccttgaagccttcttctatatcgtctaagtcgtgcatctggccaggttgctaatgatgaaattggttagcaaaggcgaacctggcctgttttctgttgatacagcagggggagcgggcgctcctgggtaccccttaaacggataagcggtgtctgaagttgactgtatcaaattactgcactgtacgaatcctggggctgcggctagctttggccttcattcttcgctggcgaatcgttggagacaatacctgaagcaagattgaaaggtatagacaggtggggtagcggtagtggatcactctaaacgatgttactctctgtcacgaggcgtgcatttgcgggcgtccagggttattaaacacttgttgtagccggtgagcatgccgcgctggagccgcgcgacctgggtaaccaaggggagcttgggtgagctggggggtgagctggtatatgaaaccgcggcggggcgagcgttgcgtgatcctcagccctaattccacgataactgggtagccaaggtgatcagccgaggcaccgtatcagcctttgcgctggactagataggagttcctactgagtgccataaagaatgacttattatttaattattggctgtttcgttgagggatttttatcaagaaaagtaatcagaccttttctgcctttttaatattttgggaacatgctggaagaacgattataaggttcatgttgagagttacaaaatggagttataacatgcgctcttatagccatagttgcagattgtttgccctccaaaagtttaggggagcagaatatgcccaggtcgcgactgtcgagtgctggatttctttaggacgtttatcctattcctgttgtgtatgtctttctgtgaaatacgttcaaatacactatcaaatatcgttttctcaagggagttggcatcatagcataaatgcggaatctggagtcccatagatcacacgcgacggcaggcgcaggccaagttgcagccctgtcataggccgacgtcgttagcaacttatatggccagttacaacactattggtgctattgagggggtcggaaattgtacaagatgactcctgcagcaactaacccagaaatggagatgaatgaatgcggctgagcaactgcagacaagcagacaaattgaggggttggggtaactcatgtctcccccattcgctgaccttaccatcttgaccaaataataagcctcaacccaagtaatcattctatattacaatggtccttgagcttaaggattcctccgacgacaaattgtctgctctctggcaagctgcttgcatcggttatgcgaatgagactggaaaaccacttggagatagtcgtctcgctggggtgcaggcgctcgaggatctttcgcggcactgtggacgctgaaaaggacaatttcgaaggctttcgggcgacagagacgcccgctcttgcatgcgatgcaggctgtgatagcccccttcgaacctgggctagtctcatctccgttacccagttcccgccagcttcaacgatcatgggcgcaatggtatttctcattcaaggaacgaaaaaggtgagaagcattcaacatgataacaggcttgtttcagatggtgccgcttgcctccagaaacggcgcgagacaggctatctgggtgaaggaatggaaggacaaactcgcagagaagtggcggactaaggattttgagtatgaggggggatatgcagcctggtgtatgcgagtcctgccggagccgcagagaacgcggtgggcaggatttccagtcttaacgcggcgtacgtaatctctcttttagtcctacacacagttatagcaagcgacggtagctgtttgggctgttttaggacgacctttctggaggtgaaagttgttgcctactttttttgtctcaatggtcgattgtttagcctcaggaccagctcttttggaagaggtcatcagaggtaaaaatgtgagaggcactgatttcaagatttctcaatgctgaagcagagcgtttttgt

SEQ ID NO: 4247 - DNA, 3788 bp, Emericella nidulans
cactacacaaactgtagatatcaaggcagatttaatataagtacaccttcagatccagccgtggacaagcaacaacggccaaacgacagccaaactgcaaacaagctaacacttctccagtctagcacatcgactcataacatctaaccaaaatggccccagcagcccttcttgcccctaccactacctccaccactgcggcaccagcggtggtcggcccaacaaccaagatagccactcgacccacaaagaagatccctagatccatcattgagaatgccacactcacgcagaggcgttccttcagcccaaccgagcacctggtctacgaacctccggccaagattcacacaatggccgaacttggtcttgaaggcgccggcatatcaccaaacgccatttccgagccattccgtcttttcaccgaggaagcaattaagcagatgagggctgagatttttagtgagtccgtgctacagaactgccagtatgcgagcagcttctgtaccaatatgattcgagggatgggacatgcgtaggttactccgttcttttggcctttatgttacggtaagcgctggaggtcggcatgctaatagacccatccagacgagcccccttcatatataacgtgtggaagtcgcccgaggtgctttctaaagtatccgagattgcgggaatcgatcttgtcccggtattcgactacgagatcgcgaacatcaatattgccgccaaggacgatcctatcgagccgggctctgccatcgccgatggaccggttgttagcaattctagtgacgatgacaatgtcccagcctttgcatggcactacgacagcttccccttcgtctgcgtaaccatgctctcggattgcacggggatggttggcggggaaacggcgatcaacctgccgagtggcgagatcaagaaagtccgagggcctgctatggtaccaaatcctttatctatagataatcagtgatgcattgctgatcggcacaggggtatgcagtcgtcatgcagggtcggtacctgcaccatcaagcgctcaaagcccttggtggccgcgaaaggatctctatggtgacgcccttccggcccaaagatccactcgtgcgcgatgagtcaatcctcgtgggagtccgtggaatcagtaacttggaagagctgttcccacagtacttcgagtacaggcttgatgtgctggaggagcgggtgagggctcagcggaaggaagagaggaacagggacgcggctcataagccgttcgatgtagagaaaaagaggagatggttagaggagcagagagagtttattgattccatgctgagggagatgtatgtgccccagtaggctggaattaccccgagaccatgagcagtaattagtgtttccgctttcctaaggtgcacagaatgagccttggtatttgatctagttcataatataaataaatatcatgcctagttgcctcgaagcttgtttatttgttttaccggatcaagacgctacggtataccatatatgaacacagatcatcgcactgccggccataccttggatatcctcaccggcctttggaggtgtggcgtagactggtcatcaagtccacatatagctagcaacattcctagtcccaattattggccaactacgtgagacagtcagcttcttgctgttgtcctggacccatctagataaaacaggaaatcaactgagagaaaccaaagtctgtggacatcgaatcagacgagcctgacagggagaaggggtatccagcacgactaaaacgcgcaaaggtgtactttaagccttgatgctccgtcagaaatgacagtccaaacatcgttgtaaggctgttcgttatccagactcccgggcgtcgaagatacacaggccgctaagccatgacgatagccagcctacctatcggcaacctcgacaattcttccattcccaccctgcaccttcatttcaggttgcgagtcagaagtaggcgaagactgcacgtcctgcttctgtgccttaggagagaaaaaggcgctgatggtttgattccagcgactccatcttgacgaccttctctgagccaagtctgcagcaaaatcattagggccagttcaagaacttcagtaaatagcacgcgacggtgaactcaccattgaggatatgaagcaactcgaccggtattggtgcccagatcgtcaaagcagcaatctgcccgaatccccattcgtcatcctcgaactggtccctcgcaagactcttcaagtgccggcgttgccgccacatcatcgtcaaaccaaccaccatgcctgcagtcagcaaggcgattagtagcacccagaacagcatgaggattcgaaacatggttttgtgcagcttgtctgcctggaatctttccttcaacgactgcagccagaacgcaactgttcccgcgactgcaaagacagcgacagcccaagatgggtaaggaacggggttaatgacgctgtagtccgacgagctgtgcgcgcagccatccgaggcgaggcgccagttctctttgctgtcggaattaagatggctctcccccagggtgacgatgatgagaacaaagacgacaatgtagaggagcactcgcgcaccccagcgcgacatcggctgcgcgacgaccatacagaagaaagtgactaggacgctgttgacctgcaggaacgccatggcttgaatctcggccacctcgaaggtcgacgggttctgggatagatgggcgagtgaagccagcgcagacgagccaatgaaaaacccattggaggagaagaagttgagctggatgtctttggcgtcacggatgaagacgctggcttgggcgaaggccaggtagaggagtcggtagacggggccgaggagaatcgtgaacgcggtctggatactgtatgcgtacatcatctggagacggcaattaccccatcagcaggtccagtcttttcctgaggcaaacctgatcataatgagaataataggtgacttacgccaattcctgagagatctgggttgccgactccatacgtaagcaggcacagattctggcagttctgcacctccaccgtgatgttcaatccgttctcggtggcatagctgaagaagtcgttgatcgagtcaaaatcacatcttctttcccctgctacggtggaattccccgctgtaggttggggggatgctacacttgtgacttcggatgttgtcgtgccctggggaagtgccgcggctcgttgtaggtaaaacagcgcgtacagcgcatacagcacgagggagtgccatccaagcaacatgattcaatcagaaacttcccgtccttctctggcagttgcgaagcttgataatggtcctattgcgaaaaccttaccataacagcttatccttccagagatccgacgccgggaatgacggcttatatccggggtttttccttccctcagccttggccttactctataaaagagttagcaccaaaataaaccaggctgagtcaaccatgtgttcaagtgagggatgtttagcttactcctggcccattaggataaagccaagccctttcggaccgtcagagtggacgctctccacgcaggagcctctggaaatcactcagagggtgtgtactcgtaatgcatgcccaacgactgcagatgaatcggcagcccatagatgaaggctatctcatgtagagttcagccgtgtcaggcgctaatgcaggacggctcgtaacccatccagccaccatagccatcatgtttagtcctgtcttc

SEQ ID NO: 4248 - DNA, 4460 bp, Emericella nidulans
taagattttttttttatatatcaaaaccaaataaccactagttataataaaaccaataaagttaacggggcgccgagggcttttcctccaaaatttgggtataaggtatggcccccagccttttgctttggaagcgaggattccttccaagtgaaatcatggcgggacctcgtaggtgggcttgcataaatcctgaattttcgaaccgcctctttccggttctaaagtactcttctgacctggcggacggaacgtgtcaccggccccttggaggtcatcgtgttgggatcgatgtgcaccaaattcctctcaaaagaatatgaataatgctcgtaatggtgcctttgctcatagaacagacaatattgcgcaagctcgaagaactagctatgaatgaggcagtagagaaatgaaggagggtcttaagggaaaatgttcgaacggacggaggtgagggaagcaggcgatgttgtttgtttgtgttcctgccacacttacggtctaacactctcggtgaaagatatgcctggccttgcgacaatttactcttctattctctggccgtggccttcatatctccatctactgatatacgatggcgtgagcctgatctcccactacttgtggcatagactcccagaagaacgcctacaaagtcagccaagtcaaggcagtcactagagtacacttaccggtaaatcttccagttcctccgctaacaagaacagtctccacagggtaaataaagtcaaaatcttcgcgtcctggcagcgcagcagacagattatagtgggtgtcatgcgcagcctgaacctgcagccggactcgaatatcctttgaaagtggtatggcctggatggtagttccggggactgacattctgtgttgctggtgtattcaaatcgtccagcaaggtcgactggcagcgcaagtgagggaccatccttcagagactgggagcagaacaattcccgagtccatgtgctgatactgtgttaggaagactgtcatacctacttcctctccttcctccctctccttcctccgccagaacaaacgatacttctacgctataagtgaagtatgtatgactctgtcgacgcattatcagcgtgataggcgttttctcgatcctctccccggcagcactaaggccagtaatattaagacttgatggcagcaaacgcagagagtacggtcgctcgggtggggatacagcaaaggaatctgttctggaaaatcgccagaagagaaagtgtcaggtattgaggatccagggacaaagtcgattcaatctggagcagaaacatatggcccgtcgcctggaatctgacaggaaggtcgcggcagctcccaaccggtcattcgccctcgtacaggctcaaggacaggccactcaccccttttccaagttgcggggaacaaaacagtctctcgccccatagggtatactctccaagccggaccagagcgtgttgccaacactactccccaccaattgccattgccgtcctggaaaaggtctgcatggccgacagtctggaagtactccgtcgtattgaaattcgtcaaaatgggatttccggcatatccttcattcggcccagttacagagtgtgaccgagcaatgacttgccggtgaccaagttcggtacctccttcgccaatgcggagataataccagttgtccttcttatagatatgcggcccctccgggagaccaacacccgttcggttccgtatcctatgccggtccaatttgctccgtctcaagatcaagcgttgtctgagagatgcccgcgtatgagatataggcggttatattctcatcccagaagatatcagggtcaatgtccccgatctcaaacctccgcggctcacttcacgcttcgtccgagtaaatttcctcggtcgagaaaagcagccctttgaacccgaaatcgggatacatcgagacatatgaggtcagaagatagaacttccccttgcgatatctaatgttgaagcccatagaccatcttgttgcgtctgtgaggtactgttcgcaatctccggtacttgggaaactcgggtaacgacatgactggcaagtttccatttcacgagatctctgctcgcggacacagggtacccggcactgtgaggaaagatgaagtcgtgcaaaagaaagtattgtcttctcagctagggtctgagtgccatccgggaagaatagggtttgtgtacgttgagcttttcgcattggataaggacataacgaacgccgcgactgtggacaatgcttgcaagtacattatagtgaacttcaagaaaatagatctacccgaacttcccctcaaatttctgctgaactggcggttctaggcttatataaatataaatgaggtcgcagcgcccctcaaaacgtgctattggtgggcaatctatgatctcttcattctacgatttagccgggaatttaggcggctgaggcaaactcacgaaggtacttatcccagagaaactgtagtatatacttactaccggttttggtagcaagaatggcccaacgtaccttccgaatgatgagaaaatgactgatcttgcgactcccgcgatgtcagcccgccgctcactacatgctgcattgtggttctgcatcaaaacaaacatttgtacccatccattacatgattaaccaagcgcaaattcaccataaacgatgtatgttcccatacattcggtgagaccagaatattaatcagcaacacagcagcataaccaacaacgatggaagaaacttacttagatttgcccatcttccatgcactcttcgattccataaagaatgaccccgagccacagcgcagcgtctccatgaaaggactaggaaccgccctgcttgcgggctacttccccataatcaacggctggatcattacgcaaagccgcatccaagcggccggcagcgtcgtcctcagggtccaacactaccttcgtatgggccgtgacggtcaacgccctgcacgtattgcagaccacctcctggcatgtgttgtacatgacacacaggactggtctaatgctatggaggagctggatgggctttcggctgagcgatggaacgtcgagaatggatactgctgggtggtggtatttcacggcttggatgtctatttcttctgttatcggcagaaccgtccattcggtgagcgatatgctggttgtgggactagattctttgagaatggcgaggagtttattcaaaacaaataccatctacagagggatactgccttgattcatgagattatggcgttcatggctagtcgtacgaatgcggacgctcgcctgagaattaaaagacattcaaacacgaacatttaagtatgctttgcattgttgttttctactgtgcgagtacggtgcgagtacgaagagttagaaatcatggccaccggagggtcaaacagaatgtatttctaataggtgctcgagcaactataaatagggacttatgtgcggatgattacctattccattaatatctgccggtattaccttcaattaggtacctacattctctacgcaaagaattcttttaatacagaaccgtgaatgaagtagcaaaggaggacgagttcccactatcctatccgctatgccaagtagtataggtacataaacaggatgccggatcccattataagcaagaaataggaccacctaacagttcgccgactaaacgggtccattagaggtaagaagaagagacgaataaaagcacaaggaaaagcaaagcaagaggtctatattcgtttccggcatccaggtaagctcttgtgagctaggctcaagagtagcttagtggagggaacgagcgtggaccttgtcggtgaccaaccacttaagggtctccttcagaaggttgaggaactcctctgcgctcagggaggagaagtagtcggagaggctggagctgtcggtggggagctcggtgctgctggagccagatccagagctagagccagaggagccagtcggggcggcggtggcagaggcagtctcggtgacagtggaagtggatgtggcagcctcggtctcagagggctgagcaacctgggtctcgacagcgggctgggtaggctcggaagcgtactcggtcgtggtggaggtaacggtctgaccaggcaaagtctcagtctcaatgtaggtggaggtgtaagtgggctgaggggcctggttgccggcagggaccgaaggggtcacagcaggcgcgctgggggtgggcacgagaggggtagaggaggcaccagagctagcggtggggatgacagggacgttacgctgggagtggtaggggtggaggtggcggcggcgctggaggaggcgctaccactgccgctgtttccgccgctggaagaggcaccgtcccagagagcagggccggggatggtgtaggagtcgagggaggtgtagat

SEQ ID NO: 4249 - DNA, 7976 bp, Emericella nidulans
aggcatatctgtgtacaatatcatgccatctaggactttatcaagcatggagatatcaagccaatctatatccctacctcagaaatggtggcagatggtttaataaaggcaataaaagctgataacttcaagagagcacttcaattgctgcagctgaagtcaaaataaggttctatgatacaacatcaagatcctcagattaataagataaaggtgttcaacacccctttattgtttctgttttacttcctttttcagaagcttgtatagcttcattccattcatttcggggtattgaatgaaggggagtgatacagaaatatgaggccacatgatctctggtagattaaccagacattgcctgtttctagaaggttcctaccctctgtatatatatagtggggaagagaggaatacacacaagggaagaaatgaaggaatctatcgtcaacaagataggtgtcaattgtcatatggcatccgatccttagtaggccacgttggtgtagttgatgcagtttcctcctgccctttctcctctgagcatattccacaacattttccgatggcgcgagctagcctgtcagtgtaacattggcacgtccagtgcatattcattacccagtccggtaataacacaaggtcaaaccatagttctagtcatgctgtcgtaaattggccgtggccctcaagaacagtgtgctgatatagagatggaatgagatgtgcgatgttctatacccttgcgccttgattatttattctttatttacatggtaaattgagtcagacctctcttgtcaggtcagttgatgaccacagcatcatatattgaacgcaagatggatacttatgcaccgttagaagaacagagcagtatatcacaaaccttgcgcttgaggtcatcacagggaggcttttacacctgcgtttagaatttcaaggctccaatctgagacgccggattaaggccatcatacttacgacaaaactgaaatccggcttcgtgaaaacacgctaattgcagaggccgtggacaagaaagctagaggcagttatagagaaagatagagagtcgcatcttctaacacatctgtagcttccgcagcatgagtctgctccggtttcacttgatacatcatcctggcagcctgggcgacttttccacatggtgtcggctcctttaaaaaaaaagggctgggtgtccgcattggtttatatcagctcccttgatatagacgtcaagttctgcagcttgcctcttctatatgcagggaaaaggtccgcgagcaacggattttttcaaattgcagggatcacagcggttggcagtggcctcctggcgagaggaggtattctgtctgctaggtccaagtttcggctcctctttcctaaaagacgcatgctctgggccgctgtatgccttttctacaggtataggcttaagtggctgtgaatacttcatgacttaaagttccgtattccttctactgacataatctaaataaatagtcctgttacttgttgccggcgcgggcgtagcagttggctacatcggagaaccagcaaagacagctaaaagtttcttccaccttcctgagctgtctcgaaattactcgcagagggcgaaatcattatcgcgcatgtaccggacgggtgacctgatgcgcagggatgagcttggtgtccattactacattggacgcagagataaccaagtaaaaattggcgggcgacggattgagcttgagacaatagaatcaatcctccaagagacgcggcttgttagtgccacatcagttattgaaattacgcctcatgaagtcagaaggagtgccctcttggttgcgttctgtgtcctgacattgcctgaagtcactactgcagctataacagatgcctatgctaagcatgaacctttcttgcctgtgccctgtctagagctcacagagatgttgccattgaaggccaatggcaaggctgaccgcgacaagcttgagcgccaatatatagggaggatcaagtcttctcttacgcagatcaatccagctaatgcacaatctggcagcattgaggatgagctaaaatatctatggcttgacgtccttggcctgcctgattgagacttgcacctgacagatgattttattgctataggaggaaatttaataatggtggcgaccctaattgccagaatcaagtatacttttggtatctccctgcgcgcctcaatgctctacaagaagataatactagggagtcttacctgtctattaacaagcctacagcaagaggaaaaagcagatctcctaatacaagcagacaagcagaaggtatggttacatgacccgcagctagaacagcaattacggctattgaagaagcctcagtgctgggctggcgggcagtatctaaaggcagggtctttgttacaggagtcgccagttttgttggggcattcttcctcgcagaactgcttcgagaactgactgtagataaagttgcctgccttgtacactgccatgacaaagcccataggaagctatgtctttagcaggctctcctgaaataccaactgcacctgctatatatagacaaacttatcatgaccccagtctgctttggagaagataagctgggactgagtgactaacagtacgactactatgctgaacaggccagtattattttccacctaggggccaggtaaactacctggcttcttactctgcgcattggaaagacaatgtcctaggaatagtcaatatcctcaaatttgcggctcacaagcgcactaaacagacctactataccttgacaatagcagcctacagcccaacaggctttgtttcagacacaaaattccttcctgaggatacttgcccagtatctcacagcacagctctctcctataacacaggctatgtacaaagccagcttatagccgaggctattgcctggaacactattgacaatggcctccccatcaccatctactgcccggggtttgtcctaggcgacagcagaacgggcgcctgcaaccccgacgattttattagccgggtattcactagctgcatggagctgggctcttacctgcttcttcaaagccagcgcaaggagtttgttcctgtagacttcgttgccaagtccttgctgcatatttctaaagagccgggagaaaatcttggccatgctttcatcctcattcacccagacccaaagagcacgattgatatgtgtgcgagttttgcccttctcaaccatatcagtccttgctctatgcacggcgtgccttatgccaggtgggtacagtctttgtccatgcgctctgcagatccattatacctgcttatgccgatgttgagtgaaacagtcctaggcgagcgaacgcggtgggagctatacgaaggaatggccgagtatggccggggcaatctgcatcgtgctttaacaggagctcctgatatccgcgattgcattgatatagatcagctctttgagcaatgcttgaagatctggttagccctggttgatagaaatagattgtacgacctaccaccagaccatggggcgatgctagagggaaaatagaagaataacgagtcaagatggcatgtttaacatgtatgtcctcagttcaaaccacttaacggaagtctgtgatctaaagcccactcttgttatcttcaataactagaaaggtttatttggagtatgatagtttctatagctttattatctgggacggctgtagtttcagagactagtatgtaacatcaccgtgtatatatgcttcgcgggccgcacccatctctccatccgcccagggagtttgtacggtggcttggcagggatgaatgagctagccgaatttgtcatctataattacctgcactagcctcaaatctgtctagccacatttctgccaacgcacggccccactaccctgatgcaacgtccaatcaccacttgcagtgcgctcgctctgtccagagacctggaagcttaggctaggcaggtatctttcatactatgatgtaatattcatgagtcgaacctgcaaaagaatccaagaacgacatagaaatccaacatcaaacccgctacaagctagatcacatatcggtcggccttatctctaacaggcctgtaagcaaaataagtcaaacaacgcctcaagcgcagtcccattcaagaatccgagcacgccaacccaacaaacgctcctgtaaagctcccgtgcgcctgatgccaaccacactcattcgacagaatcgaagcatcaagaacaggtccagcctcatttattgtgcattccctttccgaagcatagaaggattgcagagttgatccaccgcggatacttaacgctcgtcgttgccctaatagacctcctgaatacttgtctctcgcccaaggacacacattcttttttgtcccaccggcctacccatcaaatgagcaaggtaggttctctcctcaggagtctgaacaagatcaccgtgtcccgcgcgctgtatagcagcaaatggcgcatccttggccgttaagatatgcaactctggatgcgtctcgtagggaccccagatatcccaccctagatatcccttgaccgcgccaatgtacacgcttagtcgtaggctgtgccgtcctcggctgtcaagaggtagtaccatcccttctgttcatataatgtggaccctccatgagatcaagctctgttcccttgaaaatatttttccgcggtccaacgagcttcatagaagcggcgtccaactcctgtaatgcgatcctggcaaatgcgcgtgggcgccgcccgtagccccacagcatatttacgaaccattctcgcaggctgcgggttcgatgactgcatgtttggaatagacattggaggatgttggtacatggatgttatcaatgggtcgccgatgaccaatacgagtttacaattatacaaacgtatgggtcctctgcaagtacgaatatacgagccatcaaacacttgtcttgaccgctgaccccgtaacctcggcagggcctatctagcacacgcgacctgattagccgagaaatggccgttgattacggtctggtgtatcagtggctgtactcaacgtcttctcgccacccaagttctgtccctgcttatgttgccattcggcttgatgtaaattgcactcagcagactctgctgaagcagcattcaaccacgccgacatcaaggccgctgttttctgtaaaagaactaactcaagaggctctgatagtgggtgctcaaagcctcgtctgtagctctttggcgctataggtgattctatatgctctggccgggtcgaagagactcgcaagtcggacgatgctagctgagatggctatgtgttgttgctattgtcccacgcaacgccatttgtgagactgcctaccaacagactgacacaaattgacatgacttacactttctcgcaggcaaactcaggcgtaggcgtaggataggtgggcagtggaaggaccatgttcatcatatccaagacttcgttgttcagagtcagcattgaatataatagtagggcagaaacttagtgcgtatctaggatgggccggcatttggcactattctcaggagctaaggcgtcggttctgcaacaagaatagcttgcttcacattccgctcagagtgccgcctgtcaaatagggcaaaggctttgtcatgctttttgacctctgtcaaccgattatggctgcagatgcaatagagggctgcgacgatgatccttgcctttctaggccgatccccgtcttctcggaagctatcccccattagcctaaagtcgttgattccgtgtcggcgatgtaacctttctttaagaagtaaatctcctgcgtacctgaacataactatctcaacgcagtttgccacggttgcagtaaaatcttcgagtgccggtggagaatgttgggtttgaaacttttgtcattaatggttcagaggtagagcacaacaccttctaatcattgtgatatatgaccgttatctcctagtctgctggacgagatcatacagttacttattagactgccaaagatattgggtcctggttcaaatttggccctcgaatgcaaaaagtcgaacgagctttaaaccgcactcgctcagtgtcagaagccgcttgaggcacgtgggaatgtaacggcctgggaatctctgaaaatgatgaacatcggggccatttacactttataagaaacatccactgcctgcgcctgggttcataccagattcccctcaaaaccatgtctcactgtccagaaagtcagcgctggcgaccgcagcccccatagtgttccagagccagtctggatctagccgcattgtcatatctacgtgagaggtggctctgccattactggtactaatcctccgaaatagtggcggaattgtgcaaggctggaaaagtagtatctagatagtttgaggtggtttgttgctgtttagaccggtcttatgatttgaggagccaggttttttttcgccgcgtatgaattgccaaggcagtggtcagcacggcaattgttaatggacagattttcttactggtgttatgtatcgacctactgtggcgagagtccctccatgtaaagctcgaaagacgtgacgggcgttgaggggtgtgtaatgttaggtgcattctaggtcgcactttagccaccatccagcgattccactgaagaccagtcatcgcttccggaagtaggaaaggtgatgtagggagccaaatagcattacatgagaacaaaaccgtgtagtaccattcttcgctaggagtgtccatagttgccctagggctggtatcgctcaggattgtcattgttagcaattaaccgggacgcttgtgatgcgccagcgtttcaagtgtggacatgaagttatgatttatatgttggctggacgacgaaaatgtagaagtttccgtctggatcataactagggaagaactggttgttattggtttcgatcggtcatcttcagggacttcggagaagaagatttcactattttctctaggcaacaatcactttcaccattcctggtgatcatcaagccaaattcataccaataggtgctgattcttgacgcacgagtccacggaccctggacatctgtttttatgtacgcctacgtgctgccgtcatgcagcccatccagtagtatgcagatgtgctaggtggatatttcgaagtcaaagcacagatgccacctgtgtgagcgcgtatgtggtcactgaggtagctctacgcaagtgcgagttcaggcctagggtggccataaagctgccagttcaccagactatattagcgaataagatagaaataaatattgtcaacaggagactgcttaatgatgtgtaagatatgaaacgtctcatgaatcgagtttgattcgttttcaggctcaattctcaaaaccttgctacatcgattgctgatctattccctttgggccttaccaggaacggcacgggcaggaacccgttcgtttgcggcgtgggtctgaagaacggaaattgatgcatatatgtagcgaagaaagagtttccctagcaccctgaattggaaacgggcctgagatagaacgaaacatcatgtatcaaccgtagtacgtttagggcaaggccccagccatccaacactgctactatattttcgtgtttgccgacagcaagtcggttaaaatatgttctgtcgatctatccttgacctggtaaaattccggcgcgatgtttcgtgcagtagatgcacctccaacggaaaacgcaatcatatcacttttcatcagctgcgtcaaggggccggtggtcggccaagcttgcatatataaagtggcgcctggttcttcctaacgacttgttgaaacaaaaatctggcaaacatctcttgcttttgtttaagaaaaacctaaggaggtggttccc

SEQ ID NO: 4250 - DNA, 1611 bp, Emericella nidulans
aaagatatagggagagaatgaagggaggtaaagaaaaataggtagaaatagagataggaaaagggtaagaggaaaagtgagataaaaagatagggaagaaaaagaggtgagaggaaaagtaggaccatcaatggagaggagaatacccaaaaaccttattgcccaatgaggaccggctaagcgaaagccaagaaattcctgttaaaaggggaaataaaccaccaagaggtcccacgagggcaagtgaccaaggtaaagtcattgaatagaaaaaaggttttaaattttggcagaacattgccgttgtcccaatgaagagatatccttttcccgccaaggttcgtaaattacggaaaaattaaacaacggattgtctcgtgacattcagaagcgtgcagttgaggcaaaaaataagaaaccccctgaacaagaatctgcgggggtaagtgctttctggggctcgaatgtgcatgacagtcgaagcagatgacacagatggcatggagagcctttatcacaggctcttttcgtcgagaagcattgctgacagaactgccttttcctccctggcttgcctgcgggaacaggctgttgattgtgctttattgcgcatgctttgctatgtctccgagcgacctctctatcaagagccgtgagtaattgtttagctccaatgtcaaggacagcttacggcttcagaaaggacttcccgcagaatgggcacgcagtagcggcctggccggtatctacttggtggtcaattggcggacagcagaagggaatccactttgcttacgggtcacctcatgacgttgaagatgagcttttctctgataagacttgtcacactgggagcatcggaacatggtctaggtagacatccttggacttgcaagatagcacctcgttgcataaggatcatgttgttctggtacctccaggagtgtcatgtgatacgattagtcatcttttcacagaaaggtgtagataaataccatttgcgaccaaaaaacatcgtcaaaaaaatactctaaaattactctgcgagacgtaattattcgactatactcggagttgaagccgtacaaccttggaagtaggaccaccgcccgaatgcacataccaatggcacggcttcagctcgagttacccctcccccaccatcagcaaaaggaaccaactcttgggacgattatcattcaccaatctcaatctgatccgcatcggatccaattggacttcagctagcctgggattctaccctgggctgaggctgcatgcgagttcctaattggcgccccgcccatcaaaggtgttagtgcgacaagaaccaggaaccacagctggagaactttgaagcctaaaagctgagcagcgtccagtttattccgcgtcccaatttagtttcgacattgactacctgagccactgcatatttcgatatattcagattgtctgataggcagcgacacgatggtggctgaacacttgaccatccgcaatctcacctctacgcctattacgctgaagcgcatcgaacgcttccgcgcccctgagaagcctcgcgatgttgacattggtgctctagccaagaactttcaccagctcgtg

SEQ ID NO: 4251 - DNA, 6855 bp, Emericella nidulans
cgctaatcgacacggtcccgtcacagccggcgtcctttggatcagaatttcgacgagtggccgggataccgctcgcaaacttcgctcttcccctacctgcagatgcttctgccgagaagcttcacgagatatatctatctctgtacaaggctgctgcagtggcagcaggagttccccggagccaattacagtcaagtacagggccggccatcattagctacaatcttgcaatgaccgattcaacaatgatgatctgtcccagaaagagtgtgagcgctgttgtctcagtagatgatgcagcacgcaaagatattgccgaagcgggcgtcgttgaacttaacgggacacttcttgccggtacaatgatggtgaaggctgaagcggaatggcatgagttgcgtaggagccctgatgctttgatgaaggttctcgcctccattggatatcctcatccggatccaagagagctctctttattatgatcatgagcacgagagttggccctagagtcgcacgcattctgctggcacataccaaaccaggtgcaagtggtagatagcattttcttgttgtatataatttcacgtggttagccttctggccggaacttctctattgtcgttttacctcccagtgaggtgttcaaggtgctatcccatgacgctttccatgtttattgtggcttagggtacgtattgccgaagcttgtattgctgagatacatacagaggtaccacaacaccgagtggacccgtgctccttggttgcattgaaggtatgtcacaatcattgagagttcatattatctaaggcgtattattaggtatctatctataacattgcattcatatccgattcggaatagaggaggctatcaagccagccgttttccttctcttaggggttagagaccctgcacttcgcaccacttcttcttacatgtggaattaccgaaatggtaagagcctccgttattccagatatactgagcgactttcttccagggtattttggttggtggaactgggcgccttgaataagggctgattctaccgtcttcggagtatacattgacagcttcgcacaaaagtctcaccttcatcgagttagcaatatcccattgtggagatactgtcggagacttacatccttttcatgccattgaggtttacgaacgcgctgctcttttgattttgttaaagtccgaaacctgccacgaagagttgactcggcctccttaaaaccagcaattcttttgatgtccttgtatgacagtccctggcgcttgtattctataaggagggcgtttttgacatcgttagtccaagtagccatgtggccaacatgacttggttggtaggaaatagacccagagggaaagaatgagtctgtcgactcgtctggtcgaaggccgttctggaataccaaggtgctgctcgagtaaggtataggactttgctcttgttgtgtgattgtgctgccgttcaagtacaagccaggacaagttgatccgtaagggtccagcagtgacgagggttggacataagtttcggcactgtggcctaggctcggaaagccatggatgttatcggtcgtcacagggaattggtcgaaatgagtttgttgttgctcgacatcggggaaaaatcgcggttcattccacgcaacttcttctttgcagtgagtggcattggccgtctgtgtgtcccaagacagttgggtcttgactgagggccaaggcgatactgaatgatcagtatatgtgccgtcagtggttactggtgtataattatcgggcagggtcgtcaacgagctggcgtctggtgattgtctttcttgaagcagacatgagaaggcaaagtcgtcacttgtccaatttgatcctcgtaccagacacttcttgtcttcagacagcgggctctccgtttttccgaaggttgatgtctctggtatcttctcggaggtaaagtagctggtcacagcgtacgggctatgtctcggaatagggtggactaagtctggagtaggggcaccgccactattggagttaagctcttcgactgtgaacgtatctttggtgctgggtcggtcaatcttttggagcttccagtggaaagagttctgtgatgtaggtcggacgcttttcgccggctcggttgatgagaagttggcatgccaacgtcgatattgttctccgctggtctggaaatctcgtcctgaaaagtcgtcgtttagtacaccagcggacgtggccaaatactgtccgtctgtctctccgtggtcacctatttgaagctgctcgcacctcatggtggattctgagcgttgaccgatggttgatgatgtatcaaaagacatggctggggcggcggcacagctatcaggcagggcggctaaacaggaagaagagagaagattgcgctcagtcatcatatcctttctccaactctcgggaccagcaaggacacggagcattgctttaaagtcaggccagcagcctacgctatcaaccacaccgctcctgccacctataaccggtgctgggaatgaatgaagaaagtgcatcagatcttgatgctggattatgcaccttgtggggtgtatcagggcacctgcagaattaagggtcccggtcagcaccgcaatatctgtatggaggggtcctggatgcagccattgacttaccacgaatcccaccaggcaatccccgcttgatatcagaggactcacgcttctgagagccaggtatcaggtatctccaggggagcggaagatttgtcccgatgcctgaaacagacgcaggagggaccagggtggaagtcaatctgaggcttgggatgactatgcctggttctctcaggtaagacctctgacgcccgtatatcggctaggcggctgcttctcccctggtctgatggaggagtgatgtgcggtagaggctatgtctcagtgctcaccgtgtttagtgagatgattcgagaagcagccaactctatgccggagggaagaggaatattttcttgaaatgtcttagatgacaacaagaaaaagacgcaacaagattgaaaacagattgccaacaaattcgatttgaagagaagatctgggatgacagccacaaactgtctatcgtccatccccgtgaggccttgctttaatagaaatccagggcccataaccccgggaactactaacttcttttatcatggcttccactattggtactaacgggtgcaggagtttcttgatttgtgaagcggcatatagctctctggactaagccttgacctccagtgatgtgccgaaatttgaacatggatactgcctggaagaagatcatcctcgcatcggaagggggctctaggtctaccaccattatccccacgaccttcactttggcaatcaactgacgtctcaattttcgttcagcaagggctttctggtcccatggtgtggctggatcggtggcgcaacccgctataggacgacacctccagctacctaggaagaaccaatactaaacaaaatcgcagatcgtcgattaatggcaccgggagaatcaagagaaaacccgagactggataaattggatggggcgtcagcttttccgttgcacggttgtgcccgcttagcggctggtcacatagggctttgttgtttcgtgcatccgagccaacagcagctcttaacaactcaactggcctgagtgagacgcaccgttgcagatcactccaaccccaacctcccgcgtctcaattggcctcagagacattggacgtttgatcgagaattttcggttctgccatttgccaggagctttctactcacccgttgggtgcaactgtcgctctcccgttccgaggccagaggacaacacgctagccccaacaaccagggcgagccaaccctagccaacacactttgtccggggcgttagaggctcttcgcttgatctccgttccttaaaagctctatatgaaagatcgagccttgaaactcttcgatcacaatgaactcgccttgaccttctgggcagaggcaaagctcgtccaagtttgacttgccggtagaaaaatgctaagtaacccaacccaagcctgggtccccggtccactacaaagctccaacccgcagcaatctatctatgacattcgagaacatgaagaaagcacatactaagcaaggcaacctccgccggttctgtggagtctcaaacaataagcttaatgcaaactccacatccaggaccaaatcatctcctagctctccaccacgtaccggacagttgtcagtcaactgcaggtcatgaaaaaccggcctggcccaagcacagtacttgtaggcggaagaagtcccggtggataaatatctgattgcaatgccatcgtcatcgcctccgactggacaaagggacctcagcccgcatgggctagtcccaaaagaaacgagaagatatggccactgccggtaggtgaatgaggatctttccccgcatcatgttttcctggatggcccgctgcatactactcgcagtgcaagtagtgcaacgtccaacgcaacacactgttctgattttgatcaactacaaatccagatctagatccagactcaagctcagacagaatcacagctgtcggtatgcgtgccaggtcagtgcactaagtgcatgtgcgcggtccaactccagctcagtgtcttttgctgcttccaacccgagcccagtagcacagcgttgtgcgtgtagtctcccgtccgaaccgttctgctctgtcgtccctgtactttgtgttgttctgtatcttgattaaggctttgaccaaaccaacccggcctctccttgcttacacctacttttcgacaactcccgtttagcggggtcttaagcactctactgctgcagccttagatcctatttgatctttccggcctgctcatgctattagccattgttgggcaggctgttttctccgtttggcactttcgccttcgcacggtttgtcatccgttgggacatgtcttagccacccgtgggagaaagtgcacacaccttcctgtctcgattctgaaaacagctgtttcatgttctattattatctactaaacgcgttcgtacatttgtctcacttgttccgctttacttgtttcggtgttcgcgctcgccgctggggatggccaagacttgtacatttccgtcagacgatgcatgcttatgcagattgagttttggtttcaagaacacctcatatgtatctaccgagcttgggcaccaccatgtagtccttcctgcactggtgatcatctcaggctcattggtaactcaaatgtgatacatcgagaaggatcgataaccataaaaagattctcgacgccacccggaaacgatttttgaaaaatgagccaagtgggtgcagaagagccaggaacaagaatcgataacagtaagcattgcatctacctcgctttcctgcgtctggccggattcttgctgctttgctgtcccgcgaaatgatccaaaagtcggtcaattaaaagcactacaatccgatgagaatggtcacccatgtctaaatcaatgagactcacctcccaataaaacaaacgtaaatgcgtatagtatagtcggcgacttcatgaacgaatacgcaagctcaaaatgttttgcaaagatagtaaggcttgccaggaagatgccagagacgatgcgaaccgccaccccgattgccattgccagcggtttgtcatggcgttgagcaaggagcccaaaggcagcaaatagtaacattgcaagtgacgcaacaagaaaatagtacacatagacgaaacccaaaagctcaacatacattctcagtaactgagagctatccattgtactgacgtgcgcactctgtggcggcacgattctcatgctagagaagagagctgaagtcacatttcctaccagatcattgaacatgttcctagtgagtgtgaacccgattgttccgttgacggggcagatttcgtgattaggaagatcattcaagatgtcatgaatagccatctgttcgctgatagctccacggctgtattcaatttccatatcggctattgtatcacagagcagtttgacagctaattcgggatccggtcgcggttcttcgcatgcaaacaagatcgtttctgtcaggtactgcagcttcaatgtaatatccagagtcaatgcgaggatctgtgatccctccagtagaaggacgagggccacgtggaatggaaaatgaagttgggcccaaatttgttgcgcaaatgtacctattgtgcgcgttggagtgaggtcgaaatattcctgccagatgaaatactgcaatgccagtgttagcaagctggtgaacagcacgtttcgcggagagtccataaagccttacaacgttggtcgtgacgcctaagatatggacaaacgaccatctggtccaaccgccaggccgcaccgttttattgacgagtcttgtacagaaatgaccccttcaccaatgataatcaaggaagaaggcccatctgacgttagaggagtgtcttgaacccaatgccggagtaagcaggagtgggaaaccgttccatttggccaaacagacaacaaacgtcaacgtagaagactgggttcgcgaacaatcatttcaatgtagcaatgcacgctttaggcgattgtttctcaagtcagtcgacagaagggtgttaaatagcttgggcaattatctgaataaagttaatgctgcccgcgagtttccccccaaaaagggtaggcgcctttggggcaccggttttctcaaaacccttcttttttttttttggggggaggtctatttttttttttgggggagc

SEQ ID NO: 4252 - DNA, 1487 bp, Emericella nidulans
atcggcaggggtatatatttcgagctgggcatcagccggacatctcgtctttagaggccatcgtgccccttaccggcatcaggtagtcttgtgttggggttacatgggttgtggcaaaggggctcagtcgggtatgcccatctgttgtgcagtctcgcctgtctccaaggcagctatattgatactgcacagattaactcagcaggtgattgccttatttcctgcctcatgaggcagaccgtccatacgaatgatcgacgcgggggtgcgggggaactcccaacgaccctggatctggatccaggcgacggtgtctcaattcggattgggactaagcagccagacttgccgaatctgactcgtacacggccctggagttgactttcggcagatgcagagctcgaatgaccattagtggtcgtccagagagtcccagagtcttaggctatgaccgacttagggctttggcgggaagacccggcgcggtacacgcggtacggtgcacactcgaaatgccctacttatgctacctatcactgcaccatctgtaactaatatggaaacgtcatgtgatgttcattgtgtactccaggtgtatataatgaggccgctggatggctacaccacgtgatatcgtggcttggccacgatctccaacccctgaggacctcaatgtatcttattgtgatagagagataaaagaagagatctatcgtcaacgagatagataaatcaaccgtcatatggcgtccgatccttagtaggctaagttcgcgtagttgatacagcctgcttctgtcctttcccctttgagcagccacaacattagcatatctcttatgtttatctcctatgttactggaagtatatgcagctgcacatggtctgaggaccttggagattacacccgccaatcataaccctgaaaaagatgcttagctaggccacgctgtgccccgcgccaagagacttatgccctcgtttctgttttttcttaatttttttcgagctcaaatctcgagaaataatactgagatacatagacaaggatgagtgccgagcgatgtctgggtctgagaaaaaagtcaacctggtccaggtgatccctgccgagtcagaaacagacgtccatgaggcagcgctctcgtacgagttcaccaaggatgagcataccctcaccttctgggccgctgcccggcggcactggcctgctctggcatggggaatgttcatgaatctggtatagcattagcctacactccgccagcgggaaaatgagtgaatccacggctaacgtgtctaggccacagtcctcaagggcatcgacgggggcgtggtgaaaggcctcgtcgggctagatgtcttcaaggccacgtacggctactacaatgcaagcaagggcgagtacatgttggccgcccagtggctttcggcgttcaactacgccaacctcctcggcgcgatcgtcggcgctcttctgtcggcgg

SEQ ID NO: 4253 - DNA, 8800 bp, Emericella nidulans
gagaacaggtcgggaacatcggcgatttcgtgctcccagcatgctgtaatagcagcaaacagcccttctcagaacgcttagacctctctaatctcagggttcttactcttctctttgagcttttggaattccacaatatgccgcaacaccgtcacgggaacaagcagcaagttcagtggcttcgtaacggggctagatgacccgcggagtaggtattgagcagctggctgggccgagactcacctgaaatcttgagagctgaccattgccgcacgataccctgccagacagatggcagcccctgtatggtctcgttgagccaccctggagatgctttatcggaaagggtttgtcggatatatgaactcggctcggttacctctgggtataccggccgaaagaacacagtcacaggacgtagaggttgcaaagatgggctctgcgacccataggttggagatagagggaactatggtaacgagggacgtagggtgtacgcagcaacggcgaattgttggtactcgtccgaaacggttgaaggaagcagaacgagctgccaaactcgaaagtattcctagttctcacaacgcttcacggaacgcctgtagacgaggcctgctctcactaacaagagcgctcacggctgttcattctgaagtgatttcccttccatgctgattggcctggagctcaatggcataatcactaccttgccacagcatgcattgagtgggcatgtcgtacatatgctcctggaattcgttgcattcttaggaaaggattcccctatctggccttggtcaaccgactccctttgctgccctacgtgagcagcctctcattacttgaggaaaacgtctatataatacggcggcagtataattccagccgttttgtcatatccagaggcatctcaaatgtgcccatcgcgggcgactttgcgtggtggatgttcagttctgatctagtcctggccccttgcctgcagggccagtaagcttgtctcgtgtcacacatgagtcggtctggaatgtgccgacccaagtcaactcttattactactgaatttcgggccgggcctagggtctaagctggcataccccttgacgctaagtcattcgattagcccttgcatgtgtggaaacggagcaataagagccggttgagcgtcgatcgctttaccctgactggtggcctctgaggacccaaccatttggctcaactcgggacttgtagggtactgttggtgcaagaatatgcaagatcaggagttgccctgccttcaataaactccacataagaactatcctcaccgtcgctgtcaccttcactatgatctgcgccgtaaggagtatgccaaagcacccccagccgatacttgcgagacctagtggccctgtcacagagcatgaagacatttttttcaatcgtccggtgccggcagacatgttacccgcacagataacgcaaatatcagcattccaccttacagagcagatccctagcaagatccttagttgtatccacatacccgctttgcttgcaagggaataacaacagtgattgcatcctggctgagagaagcgactcagtgttgatgctcgcacccgcttagacgtatttagtatagtatatgtaacgatcgggcttgctacggggaagtgttggcaaaagaacagatacgaaacatgtcatcgttcttgtggccgctctctagtatgttaagaagctcgcggtaaacacggtacacattgggcagactatcgatgccaggctccggtgtattgagcaacaggacagtcctatagagacaatatattatcaaagatcagattccagctccccttcgtgcagattaacagccaatccttgtatcattccaaagccggccaaatcaaagccagtctttttctcctaactgactaccgcaggtgccattcatattatgcgtcttacagcgacactgttgcaacatactgtacaggtctttgtgacgtgtatggagacgaatcatattcatccatattgcaagctgtctaagttggttcctgaattgtgtttccataacattgatactccgctacaggctactaactcagccgaacatctgacttcccttgctagattcagcgtaccctatagccttcgatctctggacaaacgccatcggcgctgcctgagccacaatcggagtagctattccagtatcagctggatcgaccccagccatatcatacggaaaacccgggtcaaaatctcccacgctttctaaatactcgatctcctcctggctgagccggagtgagagcgcctcgatgttgtcatgcaagtgctggatcttgcgtccgccgataatcggaaagacatatggggcctttgccagcaagtacgccagggcaacagctgtaactgattcaatcccatgctgcgcggcaacaactcccagcgccttgctcattgcctcctccagcgcggtttgctgcccaccatatatagctctgagcccctccccctgatccttgcggcgtgcgagcatatcccgtgattgaaacttaccactaccaagggcgtcatacaccgtcacggccattccaaagtgccgggccatgggtagaatatcacgctcgagctcacgccgcagcggattccaacgaccctggtagacagagaactgggtcttcccctgctgctgggcataagtgtttgctgcactaacaacccaagctggcgtattgcaaattcccaggtagaggacatctccgcgctggacaagatgatgtagtgaatccatgagctccgggatagaggtggtatagtcccacgtgtgcaggtagaggatatcaatccagcttgttcgcaatttctgcagggagtcgcgaacgctcatgtgtaggctgcgcttgtggttccccgaatagttcactgcgagccctttgcccagttcatgggcgcggtagtcggtcccgaatttggtggcaatcaccatcttgtcccgattgccgcggctggccatccattctccaatccacatttccgactgttcattctggtacgcgtttgctgtgtcaatgaagttcccccccgcagcggcgtaggcatctagcaattccatcgccgagtccttatccattgagccaaggtcggtgctccatgcgtctccgatagatagtgcaccgagctggaggggagaaacacgtatgcccgccgtgggtgaaaggattcggtagcggcctaactcggaggggggttctggcgccgggccgaacagctcgaggattcgtgtacctgtcatagcattaagatatagcaatgataagaatacgaggttgtttgaagatcgaacagggacaattagtggctaggaataccctggtggtcaaggcgggtatagtgagtgtcccagagatggaatgtgaaaatgtaagggacgattgtctccttgcagcgctgtgatttgattgactagccataattaaatacactaataagagtcttactaggatatacaggctattagagggccgcaggtgaggcagtggtggtaaagggagcaggagcgtcaacgccaattggcacatggctggcctccagcctgtgacgaaggtcctgtagacgaatggtatcataaaactcccagatttcatccaccgtgttgcaatcctctgccattcgaagaataaacacatattcattgttgtagtcaccgaccgttgtctctgcggcggtttcggcgtgaatcatgacctttctcgcttgctcgtcgaccagaatttggctgtcatccaggacaccaaatttatacttggtaatcgtagctttccactggggaaacgcttcacgggtctgatcattcgtgatgctgtagtttctgaagctggggcagcacatatgatgaagacatgttgaagatcgtatagcgagcattgcatccacgtctaagctctcgagtgtctcgacaaaccgcgacgcggtggcaaggagcctgtggcgcgtggtgttcatggactatttacgatggtcaggattgattggaaaaatagagatatgatcttactttgttgctgtggggggacagtgtaaggtcgacggaagtggaggaattgttggttctgccctatgtatatatatcgtaacagcggtataatcggggtatgattaggcaacatccccttgctttatgggaatggatctagccacacagatattgtagtggaagtgtttgacccttagaagtagtcgttgtcgttactacaccgatagcgccctttggctcctaatatcgcattttcagggcgcctgcctcactccgcagttgatagctacgtagctacatagctctggtctaaagtatagcgactaaggtatcctgaccgcagggccacgtctcgagcaagttctctcaccggtatactacgcatcagctccaacacggagatatcaagtcgagcctcggtggcaaggtaggcgcgcagaaagttgaaatttggagaccttatctgcagcgcgcaccgagctctgcgacagaaagcccgctccgtcaatgaatctgaggctgagagactgttgcgatctatggcacttgatcttcgtttcaagatactgtgcgtattgaacggccaggcgagagataccgcccgtatcacgggagaagcaagaaatcaaaactggcgcttcttcttctctagacttggcctcattgttgcaccttggctcctgacccaaggctccagccattgctgcaccttgcgacccgtgtactcttctagagtcttcataatacagtgcgggtttgtgccgccatacccaaaggggttgatatttgctatgcgctttcaccctctggctaggagtccggttcagccagcacttttaggcgccatctgccaagaggtgcgtctggacatagctgtttaagttatatatttggtggaataataccgttctccagggccagaactgtcttgatatctgggaaacaccaccgcacccgaaggtgcactatgttcgttttgacgcttccaatatagagcaaatcttgcggcagccgcctgtggctaaaggcgcgagccagtgacgaagcgccggtcaaatcgcctttcgtgtacctgattccatgcgcttcccaaaaggcgtctcaacgagatcgagacagacttggtcatagacacttcgaatcaatcgctcttgctcctctgctgaggaaagcggtgatgccggggtccggataacggcgcgtaatgcatttccatcggagagtgctgcatcaaggggcctaagaaggacaaacccagttccttcacccctggcgtatccgtctgtttgctcctcagaggcctttgcagcggccgtccgagctgagaaaaccgagcaaaccctaactggtcatcacctgcggtacaaattcgcatcggcgccaccgactaacacctggagtgttatttttgcatgtaagcagggtaatagaagtaatctcgctgtacacgttgaggaatgcgcaccatatcagcatctcctgtgcggatgctctggcagcccaaacgaagcgcgacgacagacgaagagcacgcagtatcaaccgttaaaatggttggttggaggtcaaagaaccacgagatacggtttgcgagcatccctcctccgaacaccgtaaatttgtatctcggctgcaactcgtcctgccccagaagctccctgaagtcggcggagctggggacgtaacatgccgtccgtgtccctgcaaaatcgtctattatcatactggctagagaaagtagtcagcttctgtggtagcactcgactgaccgttttcaaacgcctagaatgcacatttcagcattacggctctgcagatccattgctcgagcctgctttgaaagcacagaaaaacacggcgcgaaaagtagcagggtgccgcttcatgaaatggccccatttctattcacggtgccggcctgcgagccagaagggtgatagaacgcattgacattaaaccggtccggtggcaccttgcttcctttactctgtttattcacaagtactgaccataggttctggggggaaatcacccggacatcgcaataattgcggatgggttgacctgtcagtcccgccattttgatacctgagcactcgtccaagaaagttgccagaggacagataaaagaaaaattagcagtgctagaggcagctagtattatgaaacctcacacaaccgccgtactacaatcattaagggcttctggagaaccgtgaggaagtgcggggactagcaagggattctaaaccctcctactaggtcaggtgatgtattcaatgctcaaaggcgaatactccggagagcaagcttaaggcgattggaagctcgtgtgcgatcaattcacgccaatgctgatgaagctggcttaaggcatgggggtacttaggcgttgctcttacatgatctagccaacaaggccccccttgagtgacaagaaatgctcggaaactgactcttccggtgaatacgtggttgcgcaggacaacccccgcatcccttacttctcgaacggttcacgcagctacaggatagtagcccatcatgtgggattattgacgggctaggctgcggtcagatgaggaccacgcctcaagttgaccccatgcgttgcttgcaaagtgacgttcaatatatgttatggcagtgataacagtgagaggaacagttgtcgtgatataggattcgtatgttagttgttgtagataaccaggacgaccatctacatgaaatgttgccttgtagccgtctcgctagagcatatatttatagtacgtccggccactgctcgcctccgcgaggcgtgtatctacctggttcatttagctctcaactacgctatactgccctgtcacagtatcatccctgcttctctgtgtccgcatcatgactatcattcccaaacgcagttacaacggtttgcttctgacaccaatctagaaacattgtcaaaagcggtcgacgacgatggtgttgttaattagatgcatccggtctcttgatgtgacctagcgcctccaaaacgaagtcgaaagctccaaccaacctgtttggcttgatgataacccgttctgaaggaaagaaaatttcctcctcgggctcgccaccctaccgggacgacatactgaacaactcggcagtactcacaacatgcaaggccgtcttccgcgacgtgggagactactggctgaccactgggaacttacgaaccacaaaaccacaaagcccagcacaaggctttcaccgggacacattgctctatcccgtccttcagtaccaacctgccacatcaccatccctgatagtgacgctccttgtctccatgacggacgccactgttgccaacggtgcaacgcgggtcattctcagcagccaaaatgggaggctgttgaacaccatcggaggaccaggccgtgcaagcagagctaaacgctggggacatgctggtaatccctcagcggctgctgcacgctggtgggaagcatacgaatcaggcaccgaatacaagacgaatgctactaattttcttcacaagatgttagctagttgctcttgagagcccggttactctggaaccatgcccccgctttcacagaagatggttggctggaggactgttagaccagtagtgctcagtacggttgggttaaatacacatcagtcgggtgcttagaggatggactgaagttgaagacagcaaaaccgctacaaggcaaaagggccactgagtaaataatcgtagctggggcccactgtctattagcataattgtctcgtaatgttatctaacgactttccaccctttagttcgtattatatcaataacagtttgcacatatccaaaaccaataggataacatggaggtaaatcacccgatacagtctgttcggttttttcattagtagcactacagtaaaacctattagaagagtccgttcgcctttatgcgagcttgtcctcaccacccacccgacatatgagagtctcaggatcggaagccgcgctgtattgcagccttccaggtaaggggattctgaggcctatgaatatccctgaccgacttcggccccttgccgacacgcatgccacataagcgccaatccagcagcactatggctaaataaccatatactcgcggctcgtccggctctcaaaaacttactttagatacactacaccatgcttcaggaaactattagtctcaccccgctgggccaacctttgatcgccggtttcgtggtagtctccgctgttttatatttgctctacaacacccagcaatggcgtcccaacaatctccctcttttgaacgatgggggcccattcgactttcttcaggtgacagcagtgaatcgctttcgtcgcgatgcccggcggctcataaaatccggctttgattctgtaagttcgcacgcagaaattgaacaagaatgaaacggcgtcgtatgctcatccagtgacactagtacaaaaatgtcttcgcaatgcgtacggatgtaggggtggaattgtttgcgtctcctgaatatgcggaccagttccgcaatcacccttcgctgaaggtattcccgttcactgcaaaggtaggtagtcaatggaacacccgcctgtgggaagaaatcggatttctgaattcttggtcagatgcatcacggtcatcttccgggctttgagctatgccggtcacagccggttgaagatcgcattttgatagagtctgtgcgaacacagctcgcgcagtcgcttggtaatagcaactaagatac

SEQ ID NO: 4254 - DNA, 1503 bp, Emericella nidulans
agggttcgtagactggattaaacgaacttgctgggggcgcactcgcttcgccgcatcttttagagtaccgataaggtatgtttgaagaatctcgtcggcgtcctatatcgttggaaattagcccttgagtcaggaaactgactatacgtgcacagtgttacctctgaatgtccaacatcctcataggcctcagttgcgtcttttccagcagtatcgatgagaacatcagcccctccaggatgatctctcacgtactcggtgacatcgtacacttattaaaaaggctactgtcagtacctgagtaaccgaaggcagatagttactcacctttgccattaataatcagccacaagtcattcctgctcttgtgagcagcgacctcttgagatgtatattgcggcaagtcgatcatagcgacaccagaaatttttcgtgaaagcaagccggtgttgaatgatacgagaataacaggtgagcctatcccgaggtcttttataactaacgcatctggtttgggcttcagagcgacattctcatagtcgacaatatgtctgacggggcccacccctctgcaacggctgcgagaatacagaactctacaaaccaatcggaagctcgggataaagcattattctccactagccgcggtatgtgtgcaagagctccactgaggtataaactacacggctgcacggcttcttgaatgaggccgaacctcggagtctaggctaattgacttgaatataagtgtatggcgctctattgacagctagctgagctgttcaaaccatcagagccatgttgaaccagcaattctatctccacggcgagacggcttcgtccgccaattctatcacgctcgacgatacagcaaacctcgaccaggtgaagcatatagtcgctgctcattttgcgattgtggagccaaacggtcagattatgcgcatgtctttctctttgacactctgactaacccgtgcagggatcggcttccaaacggaaaatgactgtcttgtggacgtctcctcgatcctcactgccccaggaccgatagccataaccattgatggccgcgctgtccgagaaccggaggggccaaagggccttccttttgtaggcaactacttcgaggtcttcccagaccatctgggaaaccaccagcgcctcttcgacacatacggaccgatcataaaaaccaacaacctaggccgcaccacataccagactaacgacccgcaactttcagccattgtcctcgccgaatctgacttttttaccaagaagatcaacgaagctcacccgctctaccctctcaaaactcctgaggctggtgtatttcttggtgatactgacacaaaggagtggcgtgacgctcataagtttctacctccagccctaggccccaaggccgtccgtcactatgctcctaccatggatagctgcgtgaaagatgcgtttaaggtgttcgacgccctggacgagaccggcgaacatggaatgtgt

SEQ ID NO: 4255 - DNA, 4087 bp, Emericella nidulans
ctgtaccatcactcggaaattaaactgagttagtacggcctagggaagggctgtcaaagttgacagcgttcagcttcaattggctcgatcaatctgcatcctcttctccgtaggctgttctccattgctccttcccttcacatctccattttaggtcagcaccacccattccaacatgctgacttgcattcacacaagaagaacgccggctgcaatatcgccgctctgcacttctatgaaaaagtcccttatcaccgtcagagtgtcccgcgactacgacctcggaatagagctccgccgcgtcgagcaacccatcgtcatactctgaccgcgcagtccttttcaaaacatgcttttccctcccttcaagggcagaagcaagacccgagagggccaaggaacagtcaaggtgtaggaggaagcaatgacaagcgtaatcgcatgtgtgaattgtgttttggcgtcttgcgcggctggttcgtcttcgtcaccctcgtcctctacttcaaatttgtcattgcagcagaattgctctgtgtctttgcccgtgtggtggtttttgtctttggcgcgcccgtcttgatttttctccattgtgtcctcgacctggacttgtgatgaattctggtttgggtgtgagacgcgcaagtgaaagtgaggagggaacagacaacggccgacagcatccatatatggtgaagagtttggctgagataaaggcgcttcttccatcacgtctgtaagatagcaaaggctgtcttgggcggcggatgggtaagtaactgttgcccttcgagctctacagagttgtcagcaaatcaacggacaatatcagtctagtaatgaaaggcaaaaaccgctaggacaaagctctggaactcacgacgcaatatgtaaatcattcaagtctttaaagacaccatttacgcataacccaacgccatatttgaaactcgcattaacttgcaaggctgcaacaaacaaggtgtcctgaccgcgtgcaaagtcaactctatactgcaggtgatgtagctgcgcatcaaaataagctagtattaccaccatacatgtcttacagtatgttttttcttcatttccgttcttcattaaatgcttgattatttaaaaggccgggcccatctatgtttatttctcatgaataagtgaatacagagacaagacttaacacagacctagatggattctgcaggcacactatggcgaacaatacctggtgatgcagtaagtgaaatgatttttgtacctcagagtgccaccacgttgccgacggcttctttggtattacctagcaagccagtagaagcaaacttctttgatttagatgaacaatgaagaacagccattgagaccgttgtatagaaaacgaagagtgcacgaattgcgccacaacttgagcaacgtggatctcggcgagtggcgtcaaaagaccagctcttgatggttgcttttaagatgggaatggtgcttgtaaagtaactgtttacggttgagattgttattgtatgttggacagtaatttcacggaaaattcatatgcttataccgtaacatacacgcagtcgcccaaccatccacggataattgaagttagtaagcgaggaaaatacaaatgcaagatagagttaacaggagagataatagagaacataaggggaaagtgttcatattaagaaagacgaatccgaatgtaggttctcgagcgtgtgcaaccaatagaagaggtgaaatggcgaatcaatcgaccggtctcagacatagggcagtttactagataacaaattagccacaaccctgaacagatggcttagaatactcaccgaaatctcggccatgcctaaatcttcaccggcggcgggctgctgaggggcgctgccagctgcggcgttgacttcggcagaggcgccgttctcattggaagcgttgaagtagtcgaccatctcggcatctaattcttcggctgtcttgggcttaggacggttgccgcgtgccttaccaccacgaccgcgaccgcgacccccacgtccactgcgagcggcgttggcgttcttagcattggttgccggcttgggctgcggcttgctctgactagaagatattagctgcttatcatcatatagagaacggcgaacttacgctacacgatcgctaagcggcttgggtgcaggaactgtaggggcgtgggatgcgtcgacaacaacctcaatctttaacaacgttagcaaacgggaaacaacatagtaatgcgaaataatctaaccttcatgggccgaccatcaacaagaagtccgttaagctccttggcggccttcgcggctgtgtcgggttctctgaagacaattgacgcgataccacggctggtaccgttttggttgtaggtaagcatgacgcgcttgaccggacctgcggactttgagaagtattcctattggaacaagcgaagaaaattagtacgtcggctcaaagagtaacgaaaacgcgtcaacggtgccgcggcggtcccaaataacaaacggctccaagtcgacagcaaagagcatcagcgagcgcacagcgatggttagtcatgaagcaagtgagcgaccgcgcaagaagatcacaagtcagtaaagactcatttgtatcgccccaaactcataatgacgcagggtgtttcactcgaattgtgacacccaaactgatgtagtaaccgctcttgggcccacccaagttttcccaacagatagacacgatatgcgaaaccaatgcaaccatcccgccgactaaacgtcttatgcccatctaccgtagcaagggagaggcttcagcgaaataaatactctcattcccaaaaaggacgaatgtgaagcgcacacgaccccgtacgaccagattagtcatcgatggaccaagaaatgtggcttccaggaaagtgcactgacttcctggttcactgcttgtatgctgatgcactcgctgacgcccaagactcgagacatgaattacgcttgcacgaaagcgggctgtgtggtggtgtatttcaactcgcaccaaggcgcagtctgcagcgaaatccagcagaattttgtagattctgatgcaagatacgcttatgcaagacagaggcaaactcgacttctatcactcgcagtgccataaggacggcgatgcaaagcgatcatccaggaaggagtaactgcctgcgcgaaacgaagcaactcgtctcaatatatgagcgatacagcagggtcgaaaggcgaacgggagccgctgcggcccggaggcttcgaggaaaagacacggcgatagaaacccaaggcgaaggcctctcaatcaacataccttgatattggcctcattcacatcggcaggctggcaaagtgttaatcattgttgtatgagagaccggaaagaaatcttaccaagccgctgaccatgatcttgctctcagttggggcagggtgtccattttgaacggcctttccagcaggcttagcaccctttgtgatcttctgcactcctccaactggagcggcagcgtttgcagccttgcggcgcgcagtacggcggcgattgcgcggctgacggttgacaagaatctcatccaaagacttatcaagcttggtagacatggttgatagaaggtgggttcaaaggaaaacgtgagttgttggatggattgatgatgggtcgctgacgttgggcgcgagctggagtggcgcgtgtagtgttgtcctcggaaaggggcgcgaacagcggaatatgcgggcacgacctaatcaatcgcaggcaagattgttcagtcgtagtaccaaggagggtttataacgagtatgtaggtagacactatgagctgcaggaggatgtcagaaggagggaagggagatgagagatgataaggacagaagcaagtttgaaacgcgccgaaagtggaaggcggagtgaagaatatccgttactgccctgcgctagcactaattgggtgacaattatggcgcccgattgtagtaagtcataaaccaagctattgtatagttcgaattttcagtagtcagtatcaaacggtggcattagcagtagtcagaatgtc

SEQ ID NO: 4256 - DNA, 3721 bp, Emericella nidulans
cctccgtagtgtaaagctagcttcttttcgagtttattaccatcttcagcggtggctagtaatgatgcctgcacattgtcgaagacgccgatgattcgctgctcttgctgatacgcgtcctcttcgtcgtcgtcgaggtagttggaaagcccaggtagagtatcctgacggcttgatgaccacttggcatcgaactcgttcgaccactcctccaacttccccgaggaagcttcagacgctattgcggcacgagcttcttctaaatacttatcatcaagcctctccaacttccgtggcttgccttcgatcttggcaccgggagtagcgaacttgcatgcatcattagcaaccaacagggcggcctctttagcaattagaccggtgattgggtccataacacgcgacgcccgctccatcagagcatcaatatcgagcacaacaggccggggcaacgaacgttgataaacctgcgtctgacgtttatgttcagcctcggcagctcgcttccggatttccttttcccgcgcatctcgcactgcagagtcttcttcagggtactccgtcgccccagctggctctgcagattctgacggcagctgctcgagctcccactcggtttccttgggcttgggaagtgctgcaagcctgccgcgaatgctctgccgcgcgagattttcccgcatctttatctctcgcggtgtacttccaataggaagcccaccgctgatttctttgttcagcgagaagtggtcacgaggagttcgcagcggagttgcaccggggccagcacctcctggaacgggcgttgcgctgactgcgttccttgccgaaagggcgtggccatgggatttggcgtgacgatctgttggcggcgaggagcaatgccatcaaaaccagtagaagatccaccatcatgtagcggcgtattttccccgccaaggagtgaagactgagtctctgtgagggctcttatattccgaatctcattcgcaatgtgatcctcctccgggggagctctgggagtccgaataggtgtccccccaaccatggcggagtagtttccgagtaaacctttggttccttcctcatctcccaccatcttgctggctttatctcctgccatacccattttgatgatgtcttccatttcgctctcgctaacctgaggagtggggagaacaagcgctctccgtttgctgctctgttcggcctctcggatcttctgcatctgtccagctcgagcagcagccgcgaaagctgcggagttgctgttcttatcattctttcgtttctttcgttccgcttcttcgtcttgatctcccttgcgcttgttcgctagctgctgtttccggggatcgaacatctctcgctgtctttcattgcgtgcttcttcctctgtagtatcgtaaaatccaggtgcagctggcttttcgaacggaatatctgcattataatccatctcacccggtttccgggtgacaatcttaatgttaataccagcatttttgagctcacggcgcttttggagcacagcaagccgtcgcgattcctcgagttgccgttccctggccttgcgctttgccttcttaccctgcgtattcgctagacgagctcgagcctcgctcaacatctccttctcatcttcgtcaagatcgatagtatccggccgggcaggttttgattcagggtcaggatcaagttcaccaggtctacagataatcagcaaagtcagagcctaaaccgcgattatagattcctaccgcagccgtctgacgtcgtccgcactcggagcggaggcctctgtacccggaccccctaaaccgagctcatcattctcacgggcctcagcttcatccaaaagtttctggtaccgttctaagcattgggttgccgttcggcccacgatcggtgcaattgtccgccattgcgttggcatcaacttagccagatgcaacagcttctcatcctcctcccgagaccattccactttcctaatgccaggatcaagccactctacccagcgcgctttacattgtttcggagttttcctcgccagaagcgaagatacacgtgcccattgattgaggccatacttcgagacctaaccgtaaggaaaatattagttacgtcgcgtggtcaggaaccaaaatcctagcggagattgcgtaaagtccgacttactgctgcccgaagaacctcgtcctcaatgttcgtcctaggagtgagttaggcgtaaactctagaatgcctgaattgcatcttgacttaccagacacctcctttgacgactggcatgggtgctgaggttcggcgaaaccgttgctaaaccagatcacgataatcaaacataaatttgcgtattattaacgcagaaatttgcaagaaagaggcgcaggctggcctttgacgatgaacacgaggacctatatgatcaatctgaactagaggttccagagttgttctgcgatgagcggcggcagtttagcgcggtagacgcatctagcctccccaattagtcatgtgatcggaccctctccaaaaaaaaagttcatcaagcactaagataaggtgcggtttctcgatttcgtactgtgtctcttctccgggtttcatcaagatgtctaccctagtacaagcacctcagcaatacggccagccttcaaggaaaggtaaaaaggcttggaggaagaatgtggatgtttccgaggttcaagaaggtctccggctgttgaaggatgaagaaatcaaagggtgcgactccgcatactcgctgattgccttacattgcgcaagttctgaccttttcactatagaggtgtcctagcagaaaaaccatccgaggaattattcggtattgacaagaagggctcctcggaaatccgcgatgcgtattttatgtttcacaagaagcctctgaaatcagacgagatcggtgcgcaaagatccgcgatcaagtgcggttgacacgcggaaacgtgccaactccaaagtgacggacggtgtcattgaacccaaaacaaagaagcacaagagcgactgggttagtcgcaaggaatggcagcgcttgaagcaggtggcgaaggacggaaacccgcttgggcgatccagtgagagcggcttcttcgatccctgggcagatgaggcggatccgacaccctatgacgatcctcagttcgattacctggagaagcctaagcagaaagtggccccggttactctcaagcaagctcctatctcgctcgctgccaacggaaaggcagttccttccgtgcgcaagccgaccgctggcacaagttataatcctactttcgaagattgggatgagctgctgcaggaacatggccaaaaggctgtcgaagagagaagaagcgattagaggaagacgcaaagagcgagagcggcagcgtctgatcgccgggctaaagacatgatggtgaggaaatcagttatgaagcccatggaagtcttggagcgggtccaaagccgaatgcttacagaatgtcagaaggaaactaggtcagaaaccagtcagcaccgaggaattaagcatccaatgtgggcccctaaaaaggaggcctttctatataggttttaagccctaacactggttgacttgaaacaaggcctttttttttaaagcagcctattccccgccttgaaaaaatttccttgtttgcttttttctagcctaacaagttttcctcttaattgctttcctgat

SEQ ID NO: 4257 - DNA, 1244 bp, Emericella nidulans
atcaaacttggtctcccatgtacgacatgattaacatctttgaagttttcctcccccagcttttacgctaccccaacccttcggacccgttaaatggggaagccgctgcaatgctgatgagggagccaaagagctacgaagcgaaagtgaaaggtttgctcttaaacgatacacctgccctacaagaagcattctgaccttttgcacagagtacgtggcgaaatatgccagtaaagacgccgttgacgacgccggggaggacacagagtcagaagacgagttgagctctgccggtagctatgagtcggacggagaagagcccgccgggaggttggacgacgtttgaagcgtccagcatttattggcatgcctgattttcgcgacatttccaggtctgttctatatactacttcatcatctcgttacggtcttatagttcttgctgggtttagtctttatggcgttattgacgggggagttttggcaatcagttcgggagccagagtctaatgggtatacgtcacgtcaacactggtgcacttggcgagttgaacctcatgttctatggggctccttcaaccctacatttgttttctatatcatttgctcctgcgatcattgtctttgtggggttcctgatgctttacgtctccaatcataacatcactcgcctatttaatggaatctgctgtttctacctagtctacttggaaggcccatacttaccattaacgccctacatggtagtcgatggctttggattcaacaatattcacgttttcaggccgaatctttccctattagtgacatcagcgttcagagagtaacgcagtggagtcatataagtatattgttgtatacctaattctataattactatgaacacggtcaataaacctcagcaggaaaaccaactttgctcatgaataatgtaaaagacaacagaagttagaaacattgggtattgaaactgaatgacgtccagcaccaggaaaggaatatagaaatgagagtttttggcatgaatttaaaccggtcctgacccgctgtacccaggccatatatgaagaatagaatggaatggaagtgaagatatggtgcgttttcctatgtcagattttgtggtgttcaagtaactggtgttagatagttattatccatctaatttatttatccgactctctaatttgatagtcttttgtatctcttgtttagttccttatcactcctcagcttttttatct

SEQ ID NO: 4258 - DNA, 5025 bp, Emericella nidulans
  unsure (1)..(5025): unsure at all n locations
tattctttcccacttggtcctaccagagcaagctatgttagaaatcatggaccccgcagctgacagctggcttatactcatcatatcggcaaacaagctcgtttctaataggatctctggtgctgtacattggattatagtcagcttacagatcagtagatgatattcccctgcaagttgctctcgcccctcgtcaatagctttcgcaacgagacataaaatagagaaaaaaggaaagaaagagggaaagaatagagggaaagaaagaaagaaagaaagcactgagccctcacccctcgaacatcacaatatggcaaccgctacgcaaggctggcatccgggcgagaccaagctccataacctgctacacttcccatcctctatagccactcgatacaccgccatagaaccccagctgcgcgagcagcaccgcatcttccacacctcaagtctccccttcattccgctgacggtcaccgacaaagacggccgaccctgggcaggcattgctgctgggagatctggcgagaacggatttgtcagcagtccggatttgaagacgctggtgtttggaatcagggtctggaccggagaaccgttggctgggatcttgcagagttggaatgggaaggaagacgggctgggaactttgacggcgggattgggaatcgagtttagcacgcgaagaaggaataagtttgctggggctatcagggatgttcttgccaagggggagggagagtacatggtgagggttgaggttactgaggctcttgggtgagcgttgttctctttcttgctctattttttatttttatgaatgtccccttgtaaagcccatatagagttttacggtctgaaattgagcatgatatgctaacttccccagaaactgccccaaatatatcaacactcgccatctgataccctatccgaaaaccaatcccgcgatagcccaccaggcggccaaaatgccgggcagctcgcgccttcccaccgatgtaaccaatatgatcaagtccgccgatacagtctttatagcgagcatctaccaatccgaccccgccacggccagcagattcccttcgcactccggcatgaacgcccgcagcggcctaccgggcttcatccgcgtccgtcccagcgatggccgtacagtggtgctgccggattattcagggaacaggttcctttcttcgttgggaaatatcgaagcgtctggcttggcggggttcacgatcgtggactttgaaagcggtgacatactttacctcaccgggacggcgaagaatgtagttggcgaggaagcctgcacgattataaagaggcacagtggttgcatcacgctgctggaagtgacgggatataccctggtccgagacgccctcccagtacgacaagcgcccggctcaatggtaggcaggagcccgtatagccccaaagtaaaatatttggttgaagaggcagaagtgcagggatttggcggtacgagtgagaaggcgaggctgcagagtgcacgacagctgtcttctgacctcgccgtgttcagattcaaggttgttcctagcgatactggnggtgtacgcttgagtatacggccgggacaagctgttgtgcttgactttatggactggcttcgtccaccgcagtaccggcacatggcggcaaatgcacccggctcaatcaacgatgaccgggtccggacgtggacggtgtcgagttcgcatgagggcagtcagatgagctggtttgagctgacaatgcgcgagataaatggggggtgcggttactggtgctctcttcgatgtccttcgaaagcatcctcaggaaccgggaaggctggttgagatcgagcaatctgttgcggccgatattgtcggtgtcactggtgactttgttctaagcgataaggagatcaatgcgctctgggttgctggggggattgggattacgccgtatcttgctatgctggaagccctcggatcgcacgaagcggaaggccagggcaagagtactggagacattctctttgtgctgtcaactagggagccagatgtcatgcttgaattacttcaaagcccactcgagaatgttcccacgggaatgaaggtcaagatcgatctgttcactcgcagtactgtcaaggccgacattggagaatttcagactggcaaaatccaagtatcaatacacgaaggccggataggtccacagtactggaaaacagttcccactggaaaagacgtctttatctgtggcccaaacgactttggagacgtggctgtcgagggcttacgggccgttggggtgccaaatgagaggatccatagagaggggttctattaagctactagactacaatgatgagcaataggaactgtcgaagctaatgaaccgtaaatgttgtaaatctggatctctgaatatcgccagagcccgagcatgtgccgtaggtatctagacccatccggcaatatgatatcccacaagccagaacatccaactagacctgattttcggcaagtcagtttaagtctaagcttcagaaattgcgtcaggtgtcaggagttagcctcatatcaacctcactattcttttttagtaaggtgcggcaattggtgatatatctcgctagtactgtcttctaagtcactagcctcaagctagcaagctaatgtctatatacaacatcaacagcactatatgttttggttaattctgtagaatactcacaagtcatgcaaaacccctcagccccatattaaccaaataactgactccaaacgcctgaacaatcctcgcacatctaacggctgtcgcagcacgcagatcccggcagacaacttttcccctatccgcccaaaaaacgttatattgacggttgtacagatccagcccgagcagatacaacggcgttgcgacgagctgggatagaactgggacaacgagctgcgtaaatacggtctttgaatatggatgggatgctagtgagtccgggatactctccgcgaattgctgcgccaacgtaacgagccgtatatggccaccgcatcgcggagaaggagcgttgccgctgcggtggttgggcctgtctgctttataatcggaatgggtgcagcttttcctgtagaaggcgtatgtggctgattggaggctacgaataactgcgcgacgagntatctttccatacgcctagcgggacattgacgaggaatgtgcaggcaaatgttatcgcgtcggataaggacgggtgagtctgccttgtgacagtctccgtcccgtttgcgacggtgtatgctgccgcatacagtgcgaaaacgtggctgtgggcgcgagagaggatgattgggcaggatgggcgagggcgtgatgtgtgctggagcgaaggatttgagagaccggtttgttgtacgaggcgttttcgaccagcgatctaaacagttagtattgactttgaccactctagattgcacacacctttcaattatcgtgaccgtgggcgaaaccagcagcgctgcaactgtggcagccgtgaagtctgccctgagcgagcgccagttagggctgagttggtggtgagtctgctccgtcacatccatcattccttctgctcagtcaactcgagagagacgaagatacttttgttcattaacgtcttttccactgtatctccaccactatcacggcagatctcccgttgtgcgactagaatgatagccagcgatgcgctgtgggggaatatgctcgggggcgctcccgacgctgcagaggataaagcgcccttctctttccaaatcgaattaccaacctcaattctcaaacatatatacgcaatatctaacagactcctcacatctaggctctcctctgcggatctgcgccttccccggcctcaaatccgtaccaaagccacggctccttctagacttcctgatgcacgaaatgagccaaacgtacgtccgcttccaaagacttatcagattagctaacagatgtataatgacaacagcctacttacgtaaaagggtcttctgagcgcctcaagattgagtcggccctctccaagctccgctcacagctgcccgtccagagctccatctactacaatggcaaagtccaggctgcctggagatcatgggatcagccactgcccgccgaacacggtacgacgttcacaaactaccccgtagcctcaaaagattaggtctcagctgcgattgagtcggcactgaaagcgaagaaggactgggagaacaccccctttattgaccgcgctgccatcttccttaaggctgccgagctggtgacgggcaagtacagatacgagctcatcgcggccacgatgctcggccaggggaagaatatctggcaggcagagatcgacgccgcagctgagctggcggatttctttcgtctcaactgtaactttgcggcggagctgcttgagagacagccgactagggggacagttgggatgtggaggtaacttgcccccgttcttccagcttatatgcaataagtgaagatgaaggatgctaatgttagacagccgcatggaatatcgccccctcgaaggcttcgtctacgccgtctcccccttcaatctcacagccctgggtggctcccttctgtccggcccggccctcatgggcaacgtggtgctctggaagccctcgcctcccaacgtctacaccagcacactaatctacaagatccttctcgaagccggtctttcagcagacgtggtccagttcgtccccggcgcgcggaagaaacaccgcatcgtgttgtttaccgcgactcgcagcctgatttcatggctccttgacgttttcgctccatatacattaaatggggagacagcggaagacttcctctatcaaccatggcgcattccgtgccttacacacattcgggggtatgagtccaggcaaatggtggtgactcggcgtacatcactgccggcggcgatatttgttctaagccggcagaacacatgcgccaaaagggtgggttttggcctat

SEQ ID NO: 4259 - DNA, 1514 bp, Emericella nidulans
agaatctccatctgccagcggggacggccaaagagagaactcagataccaaccggccgtccagtccacagcgtgagtcagaaagcaaaccccgccgtgtttccagcagtgacaatctgaaaactcccaagaaaaaagggagcgtcttcagttttcgccggaagtgtgatggtgacaatcaatccggaagcagatttcttcgcacccctcgtcgcacgaaggagaccaaatcggtcagcagccaggagtctcaaagccctcgtttcgcaatatcgacccctacgaagacgcgtgctgcgcctgcccctctcgattcgattacgtccaccacgtcgagtaatgcgacagctaatgccctcgagggtgggcagattcaaaggcaagagagcccaagtatgattcatcctgcgctccggaactcccagcagaggcaggtcatggcagaacgtgagcgccttgcacagctaaaccgccatcctcgagaatccacacagatacaggcacagggacaaagtaatcctcataacacctcccacccccttcagaatctaggcaatcgggactcgccctccacgtccacctctccccctccatcatttgtatcctttgatggtcctaacccctatgcttctgccgtatccgtcgctaccagctcttctgcctctttccacgatgtcagacaataccaatctagcatgcattaccctcagctgccttcgtccctttctcttccctctcagggccacggactaggagttggtcagccgcagttcttcgctccacctccaggtttctcacctactctttctggtgaaaataatggtatcagccatgggcacggccatagcaatgtctctgatcagctcgatggcgtcagcatcgactggtttagaaatatgaatatgccgatggccactaattatccggatagtgacttcttttgacttcgcatgtttttttacccgtcttgaatacccacgactaaatcgataggcctgtgttgtgttcttggttgagctggattgggtcagcgcttgccatcatattggtagtgtttccgtttcttctctggtacctgcgtctatttgattaaatgttgctgcgttctcttgcccttgcgtccttgcatgacgatcgacggactgattatccagggaaggaggtggtcatgggctctcgaaattgaatttctcctcaccttcttctgcggtttagtggtactcgtagaggggtaggatatgggtagtgacatcgatagggtttgcgaagggaagatgtggcatgaggtgagatttctgtatgagtttttgatttgttccgctctcacttccagttgagttcattcagggcatttcttacttctgaccttctctttcaagtcttaaagtcttgacggatgtccctgttcttaagagagaaaagtagttatccgttcaaatgtcagaaaaggacatttaggtgtaattaattattcagaggctataaacagacatacaaagtcgagtctccggtact

SEQ ID NO: 4260 - DNA, 1778 bp, Emericella nidulans
atttttatagttcaggggagggcaggttttggtttaaaagctcctgggtgagctgtcttgtaggctagcttgtagtttaggtactgtttatttattatttagaacttttagctttgttttgctcctattggaagataagctggctagccttgcagatagcaactagagcatcctttgagaggcaggtaataatgttcttctagacatggggtctggctgggtattttagaaagtctgctgtatgtaggctgcagtagttaatatactgtatatagtagttataatcctgttttaaggatctgcaggagatatattagttactagagcagcaggcccttgtattatagaagtagaagcatcacatgtattgcaaaggcctttgcttagggtgggtgggtcttgataggccggacaagccaaagagttgcagggggtgttatagcttttttggaaaggctatgactgctgtaatagagtccctctctactaggtattttaagagcttggtcatgagtagcttaatactagtaatatactctgcttctatgctaatatctataattattatatctatctatctatccagggaccagagttgttttgggatctgggagataataacctaatagtactctgttagaatttcaaagtatctatccctagctaggcttgctgtcttctctgacagtaggaaagcctttccctgttctgttatagtgattatatacctagttaatattacttatacctgtgtgatcatgtccagaaccttcccagcaagggtgacctggatgccatgtggtctaatagcctggaggctggaggaggctgggaggcagaggaagatgtagtagtcagtcttatttgactgcttcagcttttgttgtgtagtttgtttggcttgtatatactatttaggggcaatagtttgccagttcccctggccagctcttggagctgttagggatgcctaggttgtatgctgcgaggtttgcctgcctgggggtcctttggatgcttcaggagtaggaggttgatttggctgttctatctgcctgggtggttgtgggggtgcaactgcaggcatctgaggaatccgctgcggggagtcttgctttgcgagggtgatgaatctggctacaagtccctgtgccaggtctcttggacggccttgtagggaggagacggttaggtctagtgctttagccagagaggtcattgctagtttctagtcattgaggaggattagctggtcatctgctaccatgctgacctgatcacagattaatagggcttgtggtatataaggtatagcagcaggagctgcattgggagtcttctgcagtgaaaataaggcccttctcttcagggagttccagggtaggggagtcggggtggtaggtcctgagggggggtcagagttttcacccaggcgcggagtcgccgggcgggctccgccttggggggagatatccacctccatggggaggaggggatgagcaatgagccaagtgtgagagatcagttattagagcagtagggggtgctgttttcccctcgtcgtgagtgaatgacctacatgtgtcggctttcgaggtggttgctagcgtcgattttgatcatgtgattgatatcggtaatgagcgactgcattgaaggtcttgagggtcctaatcttctaactacaatctgtataggctatttatgccttttcaaaggcgtcacaaagaatgttctcgatatcagtagataattcagttagtatatagatagttgca

SEQ ID NO: 4261 - DNA, 5323 bp, Emericella nidulans
caaacaccaaaggcacgggcattacctacatgtagtacctgccatagaattgggcatagaagaaatgcttgtccaaataaataataattaatataaaggcgttgtggttgattaaaacgtcaaaatatgggaaatctgtatgcaggtgcgcagctcgcttacatgcgcagctcgcttaccaaccacgttatatgttacatatgacatcgctgagtatgctagccaggtaattcattcgcgcgttcgactgcaatacgatttatcagctgaaatcaggaatcacatgcccccgcattcttatgatccccgtccggcaatctacacgagcaagtagcgatacggccatgctcctccttgagtcctctcgagcccatgctcgttctgcgcttggactcgctctgcttgatcccagtacacccccacgccatctggccatcccacgcggagccatgtggttgccataatccgctctttgatccttcagtattcattcggctggaagcctcaagattccgctttcattacctgagaatggacattttgagttcaagacggctgatagagaactcgtttatcgaatcaatcttcccagaacacgaccttatccattagctagtcggaaccgggctattgtcgaccgacatttcatgtattatgaatcctagtctccacttccccagctttgctctccaggttcccgtcatcggccatacgccgaggggtctctctggggttacacgcatcttcctcggaagacgtccgctgatctctctagccgttagttgtggtatcaatatatatgtagaagtctccggttctcgacgtgaaacgtcgtttcttcctccatctaccttatcttcttagattcactttccaagatggttggttggtatgctttaggaatcgcgctttttgctgcgatcggaacctttctttttgtaagatatacagatatcgtggagtatgtcacttattaactggacttcagggcttcgatactgggattgccaccacaagtaagtttcatgcttccaagacagggctcaagtcaacgtttactaatgctcaaacagcaattgcccatgaaagctggatcgagtacatgcagcacccgtcagagggcttgacgggcgcggtacgtttggcgtggcctatatttgaggcatttctaaatgatgcaggttgtcgcggtctatattgccggtgaagctgtcggtgccctgctgcaaaccgccgtcgccgacaaacttggtcgtcttcgctttatggagttgatgtgtataatcgtgacgataggcaccacaatccagacagcatcaatcaatatcgggatgtttctagccgggcgtgcgttagccggtgtagctgttgggtatgtcgagccgagagatggataatgcggcagagacatactgatacaggcattcatagaggcatggtcggtaccgttcccatctatctcagcgagatctcagaccctcggtatcgcggtctgatcggagggatctcaggttgcggtattgcctttggcacaatggcctcaaattgggtcgggtatgcttgcagctgggccccatatggcgccgtacaatggcgcttcctctcgccatccagataccgtggggtgtcatcatgttctgcggtttagtaaccttcatgccgaactcgccgcgtcatctggttcgagcgggcaaggtggaggcagcacgcaacgaattcagccgaatccgccgggacctcaattcgcttgagctgcggcaggagtttgcgcagatgctggctcagatcgaatatgagaaggagagagagatcacctcgtacaaagagatcttcaagctattcagacatcgtgcgatggtgtgggtaccctccttcactacctgaatcgtaatatcagttgacaaaaaattagatcaattgctgtgcaaccatgaccagtctcactggtgtcaacgtgattcaggtatgctcctaacttcaggtgaccgaagtacagtgctaaccaagcattagtgctaccaaagtaggtaaaccttgcttatacccgtgatcgatactaagcctagaagcaattctatacaagtcacttggcattgaccgtcacaccatcctcgctctggcagcagtttacggcactgtggcattccttaccaatgtcctcaccacgaggttcctgactgatcaatggggtcgtcgaaagtaagcagccccgtccaccaatgtctataatatctaatgaaacaggatgatactcgccggtcttagcggcatcatcgtcgtcgagatttatgctgccgtcatgcaacgcgagttccaaaacacagataaccggattggcaagggatttgctattctcgggatttacctcttcgtggtgatctattgtatgtcaatcatccgatacactgacagtgtttgcgtcaactagctaatatgaccccctaccagacggtatgctgaacagcacgacttggctctacggcgctgaggtcctgcccatagccctccgcagcaaaatcatggggctagcagcagcgtcccactttattgtcaatgtcgccagtacgtcatccccgagcaactccagtatacccaggtgttcgccgatattaatgtatatgtgaaaaacagtcacggaagccggccctagtgcattcgcaaatattcacgagaactattactacgtctttgtcggctgcacgctgttcttcctcgtcgtggcttatttctatttcccgtatgtgactctacccgctccccctctaggagatacatctatagaaacagctgaagctcactatttctttctctggctacagtgaaacaaagatgaagactctcgaagagattgctgcctctttcggcgatagggttattggtgtagaggatgtggatcctgatgcgaacgctgggtcaggggttgttcatgaagaggagagcgggactcgttaacttgctggttacttaccgtagtcttgagctggaagtctgaagtttgttacggtagggaatttatggacagctcattgaatttgttgaagtcataaccaataaaggggaattgaaaagtcaacaactatccaagctatatatatcggtgttagaactctatacgataacttccaagttggggggatatctgcaggtggaaacttcaaactggcctttactgggtttcatcattatcttttggggagttcgattgtacgttaaacaggatagtcccagcggctcagatccttgaactcggcccgcccatgtcatcaaaatttagaaccaaccctcctttctgcaccacaatagacatccgagtaccaatccggtggcgtataacaggttttcataaagatattggcgagtgaggtggctacgggaggtcgttgaaaccttgatatccatgagggttagatgtatgacggcaaacaggagccagtaggtaaggtaatgactctatccattgacaagccgtctaaagttatcataatcctgataggacttcaaacagcgctacgtgagtaagtgcctatttataagacgcgcaacaagatatcatatcatagacaaaaaacaagccttcccaacgccgtgtgatttttagacaccataatcataacgagtatgtaggatgaggactgtgagctggactgtactacgggtgtaaaagtattagaagaaaaagtggagcatagcatcggtatcgtagcggcaagcaagataggacgaaaggcacagacacagacagggtttaacgacgttgtgtcttgcccagcccacgtttgccggcgacctagttatagagttagtggggcccaaatctgatttgaatagggtatcgaggaaacgtaccaggtgcttcgtaagggaaacggtctggtggcgatcggcttctccctgtctggccatgcggttcatcttcttctggccgagcttggcgaggcgttcggccttggatctggcagtctcgtcggtaacaccatcctgcagacggttcgtagcagcctggctgcgagcgcggcccttggcccgagcgatcgcctggcggggatcggaggggtcgatgtccattgcgtcgccgtcctcgacctcgctgcgtgtcgtcgtacggccacgaacctggctctgggaacggacacgggagacagcagcctccgggtcgtagccggctgcgtccaagccctgctccatctgggagagcttcttggctttggcgctgcgggggattgccgcgcggttcttgagcgacttgcggagcttggcctcgttacgcatcagggtgcgcttctcacggatgagatcagccttcatgcggacgtcggcgtcctcggcgtcttcgacgctctcgtctgagtcatagtagccatcggcctccagtttctcctcctcttcctccagagcggcgagcttagcctcgatatcaggatccacgtaatcgtaaatgttcttgccgttccacacttctggaatcttatcatgtttccattcatcgtcggcgagagtgtaactcttcttgagatcgacattgtagacaccagcaccgccgttttcctcctcaatatcccgctccagtctcttccggttgggatcgttcttgtcgtatttcttgaggttcttgacggcatcggggatgaatgtctccagctgagccccacccataggctgggcaacgtggatacgcgcaagaacatcgccgagtctgccaccaggagtaccggtgctgttcgttccagacttgagcttctgtgccactctctccgctaggagcttgtcgcaggcagcgtttttcacgttagtgacaccttcagtagtggtgcacgaaagctgcaaaagctcaacatctcctgtcttcagcatgctttgcatctgttcttggagctcaggctcgagatcttccggtcgtcggacgtcgatcttgttcaccactacaaaaacgatcttgttggcaaacagaggtcggatagagtggaaaagcttgatctggtcggcaacagagtagccacactgctcggaaagatccataaagtacatcacagcagaccgcaagtgcgcaatggcagtaatagactgcatttcaatggtgttcatctcttccagaggatggtcaaggataccgggggtatcgatggcttgaaatcggaggtacttgtagtcgaaatgaccgacaaacaaactcttggttgtgaaggcataaggctgaacgtcgacgtcggcgcgggtaatgctgcgcaaaaagctagactttccgacgttggggtatccacagatcagaagagttctggtgttgggatcaatcgacggcagacggcctaaatgttgtcggacttgc

SEQ ID NO: 4262 - DNA, 3373 bp, Emericella nidulans
gctatgaggtctctcgtagtggctggggggcccgatgcctgttttctttccacaggcatcccattatattgttcacaaggagtaaataacgtcctttgctttgtgcttctttgaacgcagcctcatgcagtaagtgcagaacatggggcaggaactgcctccatagccgccggttaatatggtcaggatcaggaaatatttcttcaaaccggtcagccgcccacaggacataggcagaaagcttgtttctcatattcagccagttcctcatcgctaaagagactaaccggtgcattgaaattgacccatttccctgcaaggtaacaaacgaataagctttgagaagtccgagggtctcaataagtgccgtcttggactttggttgaggtaggaaggactgtggaatatctcgtgagtggacacaagccaggagtgaaaggtagtcggctgccattgcgtccatctccaatatctgcttgaatgatatatgccacgttagcgcgactgggttttggacatcttggtagcgtccttcatcaccgaactctttgctcagaagctcggtaacggccgcctcctgctcagataggagctccaggtaatcggataatccgatgctattttcatttatgaaggctgtggcttgcgtgatggctaatgggagaaagcaaagctgctccagcagagtaatgcagacttctgggtcgtcaagcagcttcttatcgattaatgaccgtctcagcatctccaagccgtcattctcgctgggctcagctacatgcgtcacataatttgaagcggaggccatcttcacggcagccttccggttgcgagtagtgaaaagaatatggccttggttactctggggaagaaattcttgcaacgccggcagggtctctgacccgtctgtccacatatctatatcgtctgcattgtcgaatatcagaagccactgctccttggtctcggtaaagtatcgctgcaggtgctttttccccgagttccggtcggcattaattcccgatcgtgtctgcgatggccaaatacgcttgctcaactgcttctcgggtgatgcatggtatccaaaatattgaacatctaggctctcggtctcgcattcgatatgccagctcaagagccacctgcgtctttcccaccccgcctaatccggtaattgcaagctttctcggtccgtccggtgtcgcaatccattcttcaagctcttgcagttcatgatgacgcccaacaaagcgtgggtttctcatgaatgggagcataaagtaccctgcggtagccgcatctgagactctttcgtcagcatcggcaaagcttcgcttttttcagaagtcactgaccgtccgactgcaacggcttccagtattccagaaagactttggtcgcagaagctgcggttgccgcggcatatgcttgccatagtttgttcttatggctatccgagtagtcgcatacacctttaatgatgacgcatggtaagttgttccatacgcctgccccttccatttcaaacgcagccacgttttccgtgcgaactattgcatcgcggtattggccagactttagaaccgtgtctgccgaggcaaccttgcgtacatagactgacggaactgattctcctgcagctcgccgacggacaatgtgggtatcctcgcaaccgagctcgtcgcaatctttctgcagcgcaatctcgcagatgttatcagacgtacattcttctgcgcaattgcacttgatagagccatcatttgtgtagtgtctgtggaggtaggcagcctcataaagaacatcagcgatacctggacggccccatcgtggctcagattgctgtagtgtattaaggcactctgacactcgacgtccaaactcggccatggtgcgagttgccttaaggccagagaggaaagtccccaggcgacgatcgagtcctccaagcgtatcttcgacgttggtcttccgctgaaagccccctggatactgcctgccataatcatactcgaccactgaatcgctaatcaccacgtctcccaaatatatctgatcttcccctatggagggcgccccgccacagattccaacaacgagagcaagtcgaatattccggtagctgacctggaggcttgaggcaacgctcgcagcgcttccttttccttttcgcggtaggtaacataatactacgttgtgacccccgattctcccattgacgtatgtatttgcatctcctggttcctttccgtagtctcttcctaggcgatcgtaagtcacatcaaagacggcttcaacagcatcggcttcaagggtcagcgcgcagatgatcgcgatcgcaaattcattccgacttcgaggacgcatattgaaataatactctgctcagtcgaggacattggcgaaggataagttaaaatttgttggcgataagatggccgcgagaagtgggggaaatgtgaggctgagcgcagcccagccttggtgaatccaaatggcacagcctcacgtataccatgtagattatccactctagaagcataaaatacatctactctgagtagatgcccaagacatggcataacgatctagtctcacctgggaagccaaattgtgaatcgtccaattgctatactgggcggtcttctatcaataacagtgcaaaaatatatatatctgcattctgacgacggaactcaatggcccaagttgtagctggtcatgaaagaaccatcacgactcataatattgcaacgattttttcttattgaatactattcctgtactaagatatagaaataaatcgagatcgtgctggctgacatccgtgccttcagatatcgcgtcagcataaaaatgtgaatgactaaagaagataatgcgctagctactcttggagtagcgcatctacctgcccaataagaagcaggaaatcgagcatgcgaccgtttatgcagggatatgacaggggcacatgattatgcacgatgacctcgaggttgaggacccgactccacccttaaacttgaacaattctcactctttagtaaggattgatgcgtccgaattttttgcagtaactgctgtttggattattcacatttcttcgttagcccatcaaaagggtgatagctacgatgaattggctgcggggtgcttcagaccctccacggcccgcctcccccgcagactcggaggagccactgcttaacgatgatgatcgcagtcatcgctccagccaggatgaagaggccacccagaacgacgtcaaaagaagccctcgctcgagaactcgagttgttactctctttattctcctcacgagcagcatcacgacggtcgcagtggtcatttaccttctagtcgcccacag

SEQ ID NO: 4263 - DNA, 1816 bp, Emericella nidulans
gaagattaatctgctaagtaagcgatgtatgtacaagtaagccgggcttgctgagcaaaaatattatacctagatatcttaaagctatccctcactactaaaatatatatatttgaataatttctatataatttaatataggatatcttattctaacattagtcttaaatttaatatcctaagcaggctagcagagtataccttaatatattagaatatagaggtatagaaaacctgataggtatctttcttaataagctaagtcttattattcttctatattataggtccctagcttcttatataaataggcctttattagaggctatttaatatttagattattagttatttcttattttttttttttttatatttacagcctataattttttacttaagtttaataaagctggtaggctgatatttgaattattaaaaaattcctaaatagtaaataactatattctagctgctataaagctactttgtatatattttagatttgaaaatttgatagtaagcgttatatatctttaaacacaatcatatttattaatataattatagtcaagtcttgtctagcccttaataaggctctatataccttctttaagagtctaagtagctaatattaggtaattataaaaagttattaacgtattcggtaagcgagtcggccacgtaagcgagtcggccacctgccgcgttttggctgcagtcaaaaagctcacctaattcaaccacccaccatgcctccaaaagcgcgtcaaaactcaagaaatttaattaagaaagaaggaagaatattacttgcattatctcctttagaaaaagaagaaattttaactatttacaaagcagctaaatattttaatatgccttgcttaaccctgcaagaccaactatatagaaaactatattataataaaatatatataaatagctataaattaactcttaataaagaagaattaattttatagtagattctttctagagattaatatagagcagcccctaggctattatatatttaataaatagctaatcttcttctagcagagtatggtttaaccctagtatagactataggtaagaaataggtctataactttatccagcactatccagagatcaaaatagcttagtcctaataatataattataaatatactaactttaaggatctagtagctgcaaaggcatagtttaatcagctatagattattataatatagtatagtattatacctaaaaatatctacaactttaataagactagatatataataggccttactactactataaaagtagtaataagagcagaatttatagtaaatatcaagtaatctagcctagaaattataaataagtaactttaattaagtatattaactttacaagataagtactactattatatattattttcaaaggcaggatctatatagagggctggtattaagatcctaatcttctaagcaactagaggattaaagttaataagaatagatagataatagacaagattagactttgctagctttaaaatctttttattcctataataaatagttatacagctagaagatattacctgcttattttagatagctataaaagctatttaatatctaagtttaattaaatatatagtaaaaataatattatttctatctgcatgcctccttattttttaaattatctttaacctcttgatattagttacttttaacgattaacaaaggcatagagatacttggtcaagacaaagatataaaatagctttaactatattaataagcttaac

SEQ ID NO: 4264 - DNA, 2242 bp, Emericella nidulans
aacgaccgcgcaagccagcccctcatatctatgtactctctctttttgactcgtcgtcaaacaatagcctctaccgcgaaaggatgatcatttataccggctacatgcagtatgactgaaccacctagaccgctcacccacggcgactacactgtcggctggatatgtgcatcaccggagaccgaactggtggctgctatggccatgttggacgaaaaacatccagtacttccagcggccgatcctcatgactcgaactcgtatgtgcttggcagaatcggcgatcacaatgttgcgattgcatgtttgccggcagaaatcacaggcaaggcgtctgctgcgactgttgctagagacatgatccgcagtttcccagcgatgagatttgggttgatggttggagtcggcggtggagcaccatattatggtgtgcgaggaaataatgggtttctggccacgaaagaggagggaaaccccgacgattctgaagactctgaagatggttcagaagatatacgtgacatccggcttggtgacgttgtgataagccttcactcgaagtcttctgaagctgttgtgcagtatgattttgggaagtcactgcaggaaaaggagtttctacgaagcggcggcgccctgaataaacctccaagcattgttttgagcgccatcggtgtcctcaaagcccagcatcagttggaagggcataagatctgtcaaacattggcagagatggtgtcacgctatccagcactcgcaaaaaagtttcaatatcctggatctcagaaggactatctctttaagtcagatttcgttcacaaagcagggagaaggacatgtaagacttgtcgcagctcggatagcaaccttgtgaagaggccaaatcgccctgacaactctccacgattacactacgggaccatcgggtcagcagatcaagtgataaatgacgccatactaagagataaatgggcacgcgaggagaaagttatttgctttgaaatggaggctgccggttagtactactactacctggagaaaaggaattaagtaccttacgtctgactaggactggaatttttcccttgccttgtcatccgaggtatctgcaattatgcagattcccataagaacagggtttggcagccatatgctgcggcgacagcagcatgctatgcaaaagaacttcttggcgtcatctcagggcagggggccatgaatagatccgactaagcatagtatatgaattctagctatatagtctatttcaatattaccccataggaagctccattaactgggtttaagtcgagacatcttctagagaagtgcatcctattgtcaaagacacaagtgccgcaatccgggactgcagcattagaacgaggcagcaaaaagtctttatgctgccttatacagaagagtcaattcttggtgcatctgatgctgagcattaagcaagatgtcatccacacaaaggctgattacgccatcatattcttaagtgggcagagacctggttaaatatgtatattctggctgaatgggatgggggaactgggaagtcaattatatctcggacaatagcccagtgcttaaaggataaccaccttggcgccacgtttttcttcaaacgcaaggagagcccttctgaaaacggaggaaagctcgttcagtgccaatcaagaaaagacacataggataatagcattacattgtctccatttcatgaacgatcgcctgaaacgcatatcttggatttactgagctacaagtcacagcgcgacgatatcgactgccacattagtcagaagcatctcacagcggatctggcgttctcttgtcaatactgggtacaccaggttgagcagagcaatgtcctatctccaggctcccgttccttgactttttgaggcacatttcctagagacactgagccttatgcgtctcctatatattggcgtaggaatgatagatatgctgcagacgttggtcatggtaagttcatccgcccttctagataataatagatgataacaatttcagcagcatacgaatacattcatctcagatgtcctatatgacgcaaagaaatatatccttaggaacgttaacatgggttagtgtcactccactgcaacttaataacgactgtatagctaacactaacgagcaggaaagtcggcctactggacatacttaccaaactttatcctgcagcaggttaagcaaagactgtcgt

SEQ ID NO: 4265 - DNA, 2438 bp, Emericella nidulans
tgagctcatcaccatccttaaataatggggaaatccaaagggttgttagcaatccatgccacagacggcttacgaatagcgaaagagatgttccgtctccaggtgatactcgttgtcacaaggaccttttttttgcaatgtcagcaaagcctccaagtagctgtgtgaaatggaataaaccagcatggtgaagcctaaaggcgatagcaccagaggaaaaagtctggaagccagaaactccctggtgcatgggtggaagttaaacgtcgagtaaatggcacccagcaacatcacgaatgccataagcaaaactattgtccaaaactaatgcccgagaatattgtcataatcctcttttcctgagagcgaggaagttgataccctcctgaacggcatgaatgagaggttgcaggagaaagaagcaactgacacttcaagtgaacagaaagtttagatttcaagagaatacgttaggaggctgctgtaaagcagcaattgaaaccataataagtgctgctacaccgggagcgaggtcactgagtgattgttatagcttcatattgaatctcccgcaatctgctgaacatcaagttggtttgaatgacgcctgtactgattcccttggaagtaccggctctcttgagatcacaaggcagggtgtgagcttcagtcgctgtgtctgagtaacgcgctcagtaatcacgtcgagcataagaagatgagcagctgagagtgtttcaagctaatctgggttaagtacggacagatgttctcctggcatttttatattgatcaagattacactcctaatacaaatcttcctcctttcagcgttccatctgttaccgtcatgtattaacagcagcttgccaggtatgttattgcgctcccattttcgataagtacctataaatgctcgccactgctactggacgcttaggtttcgtgccttttaggcacgctttatctttgcctcctctctttccagcaggatggattagaggcaagctcatatagtggtctcacttgcccattcttcttgtagatccttggcgtaatctgtcaccgctggtgatactttatcggtctcaattggtcaaattatgtatgtggccgagtacattattccttttcgaatgaatggaatcccgaattcgcagttgtgttgtaagcagagaatcatcacaggcttatccacccaaatatgcatgtcggagaatatattcacctgaagaccgaagggagtactatgggacactgttcccgtgtcattccaactgttgatcagcaatcctagctgcagggtgggttccatgtgagagcaaccattgctgacttgagtctggatgcgatgatttgaggatattgagctcgagcagttactcagactgctcttcgcggctgggatggagtatattgaaatggataattcaccaactggaggatcgactgctaatggaacctgcagtgtgtagtaaggaactccatattccggaaaaataataatccagggcttcccgtcgctggtataggcaaggctctcccgaggtctcccacatgcttctatcagaatcgcaacatccaagcatccaagcatccaagcaagctaattgaacccgagtaggggcctagcaagattgcaccctttgtctacgcccgtgttggggtcttccaacaccgactgtttggtggtatttcatcacctccggtcacattcctttcgttctctggcgctgccctttggacactctcagcacagtgccaaggccactacttaggccaggggcagaagagaactttacacgtccgggcgataaaagactggttccagagacttagaataagctcccgtttgaataacgtctcagtattgtctccaattgctcttcggggttcgctttcatccgcacgtggccttaaacccacacccacagttgcacattcatctgttcctggttctgtattcgaagcaaggtctgactctagatctctacacaaatcttggcccaaacatcagggaatgaggattgcgactctacaaatcgcccccaagctaggtgatatcgaggggaatatcaaacgggctgatgagttgttgagcaaggggataggcgtccctgatgggtctggagtggaggcggcgagggttcgagttgaggatgcgaagctggatttgctggttttgcccgagttggctttgacgggttggtctactctatctatttcttgttccgagattgagttgggagagcgatgctgacagtagtaggctataacttcccttcgttggaagctataaagccataccttgagccagccgggaagggacgctcagccacatgggcccgccagacagccaaacggctaggctgtaaagtctgcgtcgggtatccgaggtcgaggttgagacgaataggaacggagaccatgaagagaaa

SEQ ID NO: 4266 - DNA, 1476 bp, Emericella nidulans
cgatgggatcactaagtccgacgaaatgtccagacgccttcacacgctttctgacctagcacaagctactattcggcgatttgcagacgtctactcccagcagcgaaggttcggcggaggcgctggcggtgtcaacctacttcagacataccccggcaaagtgggggttcccagctccattttcgccccaatgggcagtcaccgagaggcacaagaagtcgccgacacgacgttcctcccagaagacgctgaggacaggcttgatcgcattgtgcgagcgacaatgaggacgaagaatgggtcgagccaggctggcgcaaagaagaggaagaccgacagcacgcaggagcccagtcgcgacgctaatgcggctaagaaggcgaggaagaacagtgaaagttcctccagacgaaaatcgggctcttctgccgtgggttttaagatgcccaagcgcaagagtaccaagaagaccggagacgactggtcctcggatggcgaagcggcaggtaatgtcgccagtagttccgccactcgaaggcgcagcaatagaggcagcgcttcacggcgaatcagctacgcagaccccgacagtgatgaagacgacatggagatggatgaattgaatcaggctcgagatgatgaagatgaaggcgaagatcaagccaaggacatcgaaaatggatctgacctcagcgaactgagtgaagcggatagcaatatgctagaggagcccgaggatgacgacggtccctcagaaaaagaagaccagcccgatgacaagcaaaacggcgacgacgatgcacagcctgcatccccggttccagtagcctcgaaggcgaaagtacctggtaaagcaatgaagaaggccacccttccaacgcgacgatcagctcgtcgttgatatctactccctttccgtttttccccctatctgccatcatatgtgtatgtacgtttacgcaaggtccagtacgactcggttatatgcgtgctatccgtctatttatttctgtcttatcctatcttgtctgtgtgaatagcaatttctgcccgagctgtctatatttatatgatactctattgacgctatcggcttgtcctccttgatggaatggatttactttcttttgttctctcgccttgcaaggccaatccctcctagctctctgtttattgataaggtcctgctacggtctcctctggctcgtttctaagttccgccttcaaaatgctagtcgtccatatcacaaattgattgtatgtcatcttatttaagcccggtttgtaccatgtaacaatattgtcacactcctgtctagctctctactataaaacttactagttagcggctttactggcctctcttaatgtgccggcgcggttggtagtaggctagtatcatattcgagcttcaggtcatgttcgatatcaatcgggccatatagtaattcatgcctcgatgaacagaaagtacag

SEQ ID NO: 4267 - DNA, 1495 bp, Emericella nidulans
aaatgaattgcgccaagccggttgagcctcgtaagctgaacggctgcatttttatcgcattaaatcgcatggtggacacagcttggttggaattgatagggtcctactgcacgtaagcctgtgcatttccccactctgataaacagtggttaaccgttgctctcagccctacggagtgccaactaggagctggcatgttacgtaaagatagtggttggccgggctcagacccatgggtctcttattcaccctctttcggggggccttggggcgatatttgtgcaaggcgataatcattgcctgatcaagatctcttggtggacgccttacactttgcggggtgtactgttgtgtgttgttgtgccctaggccatatatccttttgccgtgtcactgtgcggctatagtgagagtactggagtcggtcaaggaaatgtcatgaagaagttcagagcccgccaggctacacttttactgggctacatgttcaagccatcttgctacatgattggaaggtaaggcgcgccctcagaattatggcaacgtatttccgaagctagaatccaccaagccaccttcgtccttagtggaaagtggtcactcgcaaccaaactttgatccgtgtatatcaacattagctgggccaagacagcaacgctgtaagccctagtcacgtatggcgagaaaaagccccagctaggtcatgatagtggtctacacagccctcttaggcaggaaacgacatcagacctggagaataggggagaagacgacagtatggagcttcagccttccggtctaaggcctggggaaaggtatataaggaggcatctacctcattgaacaccctcattcttctcatcatcaactcagattcgaacacaacaaaacctcagctctcttcaatccaattcagattttatatctatcttttcaactcaactcgcaagccgccaaaatgatgtccaccaccttcttcgtttccatgctcgccctcgccggcaatgccttcgcttctcctgccctccaggcccgcgacggcgtccagtgcggtggtgtcaactacgctcccatcggcgacgtcaagaactgcatcaactacctcaagagcaagggcactgatagctgcaaagtcggcgatggcaacggtggtttctgccgggacggagctgcggtgatcctcggcagcggaaccactgaaaccccttggtaagctgctcttctctagccgtggtgatttatctaattcatactctttagccaaaacgttgccgctgctgctgaggcaatccttggaagctgcaccaatgccgaccaatacgttggaggtaagtacttcatttattccaccacaccactttatgtgatgcaagggttaatattatattattcaggttcctccaccatcggtggtaacagccacgttgttgtcactgttaggcacgacaactaaagtgctataatgcaataacttagggatcccttaccggtcttc

SEQ ID NO: 4268 - DNA, 1716 bp, Emericella nidulans
tactcgcatgtggactatgaagatcatatcagtaagggcaaggtcgacagcgtcatggtcgatcgaggtgcgctgatcaagccatggctctttgagagattcaagcaggccagtacctcgacaaatcagcttctgagcggctagcgtacgtcgaaaactttgctaggtacggcatggagacttggggatcagacgaatatggtattggcattacccggcgtttcctgcttgaatggctgagctttgcgtgccgctacgtgcccatcggactgcttgagtatcttccccccaagataaacgaccgacctccgtactggcgaggtaggaatgatatggagaccttgatgggcagccatgactatagggattggattaagatcaggttagtcatctcgttaacttactgactttacggatgctgatcattttacgtacagtgagatgttccttggcccagctcacaaggacttcaagttcgagcccaagcacaagtccaattcctacgatacggagggttaagagccaaagtaggattacatttgtctccgtctcagcgtgcggagtacaggatttagcatatagatattttgaacacagccctaatttagtagcaagccaaccacgatcggctaagtaatatatccgaacgtaattatcgggaaatctttaacccgccttccgtgcgtagctgcgaaggccagctacaggtttatgacgtcttcccttctaaccttgaaaagagaccacctagctcatctccgtcgtccagccgaacgatttctacttcaaatatcgccgcttgctgttagccactcgacaagtgatcctactactctataatcttcaaagagccgaagccgacattcgccggttacgctttgtttaccctcctgaaggcccctcatctttctgcctaacaacaaaaccactcagcacacacaaaactcgccatataatccgagtttcaaccaagcaaaatgacactctactacagtctggtacgtattttctgacagggcacctcgctctgcttgtccagcaaacacactgagctttgtcccatttctgcaattgagaccctgggtttcctggaagctaacgtactttcgaccctaggtcttttgtcttctcgtacttgagatgggagtgtttatgggactgattgtgccccttccgttcactgtcaagcgcaaactttttactttcatctccgaaagtccggtaatagctaagttacaatatggattgagggtatggatttccaggataattctaccttcttgccgctaacatggtcctagataacttttatcttcattctcattctattcattgacagtgtcaaccgggtttaccgggtgcagctcgaggtgtctgctttttctaaggaaggaggtaacgtagggtatgtacttagtcaacgggcaaatgccccttgccagtgaattcactaattgtttcgctagcagaggggccgctctcggtaccgatcgcatggaagttcaagctcgcaagttctactcgcagcgcaacatgtacctttgcggattcactctcttcctgtctctcattcttaaccgcacctacaccatgatccttgaaactctccggcttgagaccgtgcaagcttctcgagggcaacaagcaggccggcgtaaggactcggttgttttgcggcggttgcgacatggccagattgacgtcttagaggagctt

SEQ ID NO: 4269 - DNA, 4678 bp, Emericella nidulans
atggaacgcctcggattcggtatcagagccgcctttatattgaccgagctatccggattcgcggcagcggcgatatctggtggaaccgacgctgcatcccatatcattatgtgcttcgcgggatgcaggtgcagagatgttgcggcaccagacacgaaattggcttccaaagccgctacatgcaccgtcttgtaatattgtgagggcgaccactcttatacgcagcaaacgttccctcttttggtggtccatccgtcaaaactgtctggatcatcgcacccttagaatcgaggtcactcgcatctgcaggcgaagtagtgtgtttttgtgacctgcgcttcggcgggctccatggaatagctccagacattagaccctccaacaccttcaactgggagtcaggtaagggagggagcagagcgtcaaggaccattttataccacctccgacgataatgcgctccgcgctttaatggcatccttctgccccaagcatttttcatgtcaccaggcggtttgtcgcccttgatagggatagtacgatcacttatttgcgaaacatacgggttatcgatttgcgatctcagcagatctgtagcgactcgtggggccacccatttcttctcgaactggtctgcggcggcgataagggcgttgacatcgtccgaattcacggcgccgtgatcttgaagtagtttgttcagcaactcagccctccgtctcccactgcgtccataggcgaattttagcactttttctagtggtttcgtgaaaccctcgtttgcccgtcgaaggactgagagagactttttggcttccttgtagtttctcatcatcctctcaatgaaaatctcgcggcttttcgcatcggcttgccaccgaccgacttccctgcgggccgtctttaatctctcgatgtcttcatcatgtttttttggatcgacatggtaccggcggaatcgtaatatgacctgctcgtggcaggctgatcgcgcgatggggtcggggaggtaggaacattcgcgcagaaggctacggaggaggttccgccattcttctcgtgagtgtagaaccaagattcggggtgccatgggtggctattatgaagaatgcgtgctgtcttcaaagtgcttcgcttgaatcgtcgtggagtaggcttggcgaagcaacggtcccggctgatagctgcgagcccgtaacggaaaattcgcccggaacgcgaaattggcgccaaaacgcgatttcaccgttgctgcacgtctgcgatccttaagcttcgtctcccctctcgtgtggatttctgcataattctcgggcggagtcgacgtcagttctcggaggcgtacatggtttgtcgttcttggtcataagccctgtcttctggtctgaatggttttgtctgtcatcctctttcctcggtcgatagatacgcgccactgtcgcgaattaattccagcatcctgccactgggcgggctcatcaaggtgcaatttccccacgcatgtcatttgctctcttgtcggtctattttctctatgtcgccgttcaccgtactatacatcataccatattctatgtatgctaaacaggctatgctatcggttttcgggtgatatcgtcaagcccgctaatcctcaggcagcgtcccaacctccataggagcctgctagagtcaggttggggcattcaacgatgactaccagcaatcaccatcaacaacgtccaagtctctctatgtcctattcacaaggtagcattgggtcggcaaatggcatgtccttctcgcaatcccaaatgagctcactcaacgcttcacagtctgtggcttctacgccgcgcgctacaccacccccaaagagctctcaacagtcggccatgtccttcaattactccaacggtcttccgaacggcgcgagggctagtttcagtgggtttgaggatatgaacggctatggaacaatgatttaccacgaggaattcaagcctcagatctacagggttggtctttccctatcgctgatgggtttttctctgttttgctgtgcagactctaatgttgtatggctcataggccgtttattccaatgtttcagtgtatgagatggaggtgaatggagtcgcagttatgaagcgacgctctgatggttggctgaatgctacccagattttaaaagttgctggtgtggtcaaggcgcggaggacaaagactttagagaaggaaatcgcggctggtgagcatgagaaggttcagggcggctatggtaaataccagggaacgtgggtgaattaccaaaggggtgtggagctatgtcgcgaataccacgttgaagagttgctacggcccttattggaatatgacatgaaccctaatggcacggcagcttctggtcaggacagtttggatactccaacaaaggagcaggcaatggcggcacaaaggaaacggctttatagtggaatggaaaaccggagcatgtctcaacctcagcaggggacgttctttcaaaacatatcccgcaccgcagcgaccgccgtcaatgccatgagcaaggctcgtttcgagtctcctgcggcaagaggcggcgacagcagacggctgagtgtcatacggaaaccgtcacaacagatgggcagtcaagatgctcagcccccctttgggagccaacaaagcttttatagtgccgcttctgacagtggattcgcgagcaatattccaacaaatggccgatatgcaccgcaagatgccatgagcttcgaacaggaagaacctatggagccgccccgcaagcgcattcgttcatcgcaggctttcagtcttcccattgacggcacatcgatgtcgatgagtgaacccacacctacggagccaaatgattcattttaccaagacatggagcccttgcatcatattgatgaaggcagacatggtctcgatcctcttccaccagccaccactcctgaaagatttcagaaaatgaagctaatcatgaccttgtttttggataaaacaactaaagatttctcaacacacccggcattaattcagctgtcaggcgaggacttggaagttccacttgacgagtatcgaaataatgctttacattgggcggctatgcttgctcgtatgccacttgtgtatgcgcttgtcaaaaaaggcgtaaacattgcccggctaaatggggcgggtgaaactgcattacagaaagctgtcggcacacggaacaatcttgactacaggagcttcccgcgattgctacaagtcttggctccgactattgacatggttgaccgaagtgggcgaacaatattgcatcatattgcagttatggcggctactggacatggtggtcatgtgtctgcaaaacactaccttgaggcgctgctcgaattcatagttcgccatggcggtacctcattgaaccaacagtcaaatggcactgcaagccaaccgggaatgccgctttctaatgaggtcattaccttaggtcggttcatctcagaaattgtcaatctccgagatgatcaaggagatacagcacttaatctagcgggacgtgcacgctctgttctggtcccacaactgttgaaggtgggtgcggatcctcacattcctaatcactccggtcttcgaccagcggactatggtgttggcgtggacatggtagatggtagctctcaaccagctgggggtcggagcaacacctttctcgctcagttggcaaagacaaggaaagaaatcctggaaggtatgcgcaacgtcattccactcaaatccacctactgacttcgtcccagcaacaacggctcaagtcacggctattgttcaggagacattaggaacattcgataaagagctggccgctagcttgacgagcaagcaagagaagtttgatcactggcatgccaagatcccagagtcggcgaaggcacgacaaatcgagcagaagcaattggatgagctaaaaggcaggtctatcggccggacggaaacaagcaggcggatgaaaaacttgaagaagtcatcaacgggccttctggaggaccataaagaaaatctcacaaatcttggtgatacatcgaaacctgtatcacgaggtgatactgatcaagtaatccggattcgagatcgctgagttcgaggccctctttccagagacgttcgatcccgcgtctggattttctgaagcgcagattgcctaccttcgcaagctaccgtccgctgagatcctggaacaaagagttagttgctatcgggcgtttaataaggagactctagatgagatcgatgctcttaggtccaagaatgtggtactcggccagaattaccgccggatggtaatggcctgcacaggctggtcggccgaacaggtggatgaagctgctgaaggcttaacgcaatgtgttaaggagcttaacgataacccagtcccagaagatgaggccatcgaaatcttgatgagagaccgtggccaggactggtgatatttctgtactttcagtgagacgtaataggactaactcacattaggtctgcataggcagactgctacgaccacctgtgagagttctgtttgaatcgcgtgtctggtttagctgaccgtttttgcattatgttcatgtatataagttggtatttactggataccctacggcacttacgaatcctaatagtgatgtct

SEQ ID NO: 4270 - DNA, 7658 bp, Emericella nidulans
agcggctgagtcgcgcatctgcggtcgttgtcagcagagccgcaagagcaatcacagagagatgcctacagggcaatgtagaacgcccctccataccagccaacatccccaattgagttgaactgagatgtgatgaccggcacagcagtggcaatcaaattgaaatcctagacgaaagcgaggtgagcatagcagcgctataggcactagttaagcatgtcttaccaagccaactaaaagtgtgcagagacagagaccggtatgaactaagagtagtcgagggccagttatttcgttttctggatcaatgccgccgtcatcgtccaaaagtttcggctcctgaattggccctgcttgctcgctggctttgtagtcatttgcatgagcatccatcttcaaccaatcaaacctcgggtccaatattgctaaagtgggtagattcttagagtcggagtggagtgtgtcaagattggtagtcaggtatcaaaagatcctagagaatgacatcaggaggtcacgattaccaaagaagagcgtaactgctcagcagtgcgctcgacgatgctgatccattcctctgtatataatggtctccaggcctggtggctgacatgagagtgcatccctgtatttaggcaatcaatactatgggagactgaaagggaacacagccttgctgtacgtgacttctaaccagcattacaacaattccacgaggctagtctgagataatgttcatcaacgcagattgtttataggctgactggatcctctgctggtattgaaggtggggctaacattttgaactacgaaaggcctattaaagagagtaatttccttgtgcttctggatatatttaggaggggcaggaactcactaggcggctactagtgctataactgaatatacttattctcgctgtaggctaggatggcatacgctagcctccttccaagatatttgtttgctgttacacggcaggaaaagcatccctacacggccccagaatacccccttaataccagcgattaaggtactttagaatcgcaaaatagccctggagaaaggaaaagaacggcaagtattggtgggcatatcaagctcatatgatgtgaactccatgtactttcaccgtccaacagatccaatgcaggtcaataaaaccgcatatccttatgcatcctactatagaccaggttgtcgcagaaagacaccataatctaacaatcggctcgctaatctaagagccaaatgacaggtgcaatagagacttgcgtaccccctctaatacccttacatgtcattcctacacagcaagtactcgacctgctaagcttttcaatatggaagatccaagcagtttaccatcgttgtatccgggactctttgttctatttcttctttactttgcaggagatctcatcgcaacgaggcgtgccgcacagagacaaaaagaccaccctctcgtgggtagcccgtcgtggtggacgcctcgcttcggtctaaaccttgtgttcgcagctagggcggttgagatattacagacaggttaccacaaggtaagagcaactccgttattgaaaacctcaacaatgagttgtgcaacggggatctgacaaccattgttggtctgtttagttcaaaaaccgcactttccagctcatcagaggtgacggtagtgtggtgattctgccgctgcatttgatcgatgagctatcctcactaccacaatcagtggctagtagccatggagcacttgaacgagacctcctagggcgctacaccggtctcgatattatcctcactagtcgtatgcatcacaccatcgtccagcgaaagtcacaccccgtcttgcagcgccttacaccctccctgcaagacgaagtgtcgttagctgtgcaagaagggtttctcattctactgaatggacgattgtcaaaccttatcaaattctagcacaggttgcagcgaaaatagctgcgcgggcaatggtgggaccatcattttgtcgcgaccctagatggctagatatctcagtcaactatactgaaagctgtgagagacctcaaaactccttggaagaataagcagaggtgctctggctaatccaacgcagtattcaggacgatcgttatcctgcgactgttccctgggtggacacatccagtattgagccgctgtctgccttcttactgggcgggcaagcgatatctccaacgcgcaaagggtatccttgggccgaagatcgacgaattgatccgtaggaatgataccggagagtggtctcccgagcggactgaaagcgactttaatgtcctttgctggctggttgaggcagccaagggtcgagatagaaacgccgaaacactcgcccatattgaggttctccttgccttggctgcggttcatacaatcctattacggttggtcaatgtgctatatgatcttgtagcgcaccccgcgctattcgaggagctaaaggaggagattcaagatatcggttttaatgaagactggaattttggctcatacaataaattgcgcaagcttgacagtgtgctgcgcgagtcacagcgcctatctccccccacaatcttggggctgaaacgcctctttctccagccctataagtttacctcgggcattactgtgccggctggaacgtatgttgccctcccggtgatggcaatcgaaaacgaccccttgcacacggacaacccggaggaattcgacggcctacgcagctatcggcgcatcgaacagaagacggcaagcatgagacccaatcccaaagatggcccacagttctcgacaattgaaaagacagtactgggatttggctacggcaagtcagcatgtccaggtcgctactttgcaagtctcgtattgaaaatggtctttgtcaaactgctaactgaatatgatttccaattcttaccgggtagaagccgaccgaagaactatctggtgcatgaatttcttttcccatggccatgggacaagatcctggtgagaagaagagagaacggggtctgtccattctgacccagcggttggtgtttgcttcatgtgctcatactctcatgcgcgtttcttactatctcctaatttatccacttacaaattcggctcaattataacaaaatgtatatttactccaataccgtatcctacggtacatgcacgttcatgtgccatccaagactcaagaggagccgtattgaacgacagccaggttgtgttgcgcggtaaatgactccagaggacaagagcaagggccagcgtcatgattccgcccctcgtagacgagaggtgccttccaggtgatctcccctctcagcgtgcagggatgcgaaatactctggactatactatgtgtatatttgtctgtggatcataccataccgattccagacgtacacgcatacacgtagcctgggttgggaggggcttgctgggtgctaggcagggccagccagaggcaaacataagctgcggtctatgcatgtaagtgaggcagtccgctgcagtacgcccgggacccagacagccgtagcctgtttctgtacgttcgtcggctgttgatatgcctgtcttacgacactcgatagggctagttgaggacccaatatcaaacccgatgattatccgagtcaggctcgaagaatgactgcttgcgtcatgttatatgtcacgtacggcaaggatcaagaaaccaacatcggtctctgacagccactgttggatttttggctttctaagtctaattgggtagcaagctgtcaatttcttgcctgtagcgatccacctttactccggtagacagtgttagcaaccttaccaccgcgttattgaatacacgctggattaccaggaaggctcgcctacacttaaattgacagtaacatgatttccttctctgttcttgtgctattctctgtactggttcttgtacactgtactgttgaagagtatttggcctgcggactagctgcgtcacgcccaactccagattgctttatcttggttattatattgcctcaatcagtatcagcatgacaagtctatctggcaacaagattgatatcgagaactgcttgtctccgcaggatctagtgacatatctttcggaattgtcacagagcccagataaactgaagcgcttttgtaccttcagcgccagtatatacgactgtgcttggctatcgatgatcaatcgccgcgaaaatgagcagattttgtggctgtttccgcaatgtttcgactacgtgttatctcaacaactcaaagatggtgcttggccatctcctgcgtctactgtagacggcattcttaatacttcggccgcgctgctttgtctccttgatcgtcgccggttgactcaggatagtcgtctctctagcagaatcaatgctgccgcgagcagcctgcagcgactcctagaagcctgggatctggacgggactgatcaggtagggtttgaggtgattgttcccggtctacttcgccagatttcccactttggcatcacctttaaattcagttgtcagtgtcgactcgaagcattacgcgctgcaaaactggagaaactgcggcctgatatgctttattctgggtaccaggcaacaatactccattcagcagaggctctcatcgaaaccattgacatggatcggataacccagcactgcactgaagacacaggaattctaggatcaccggctgcaacttcagcatacctcaaacatgcttcgggatgggatggccgtgccgagtcatatcttcgaaaactacttgcgtctgccgaccgtgaacaaggtggaattcccagtgggtttccgaccgctatatacgagctgtcgtgggtgagactaactggctagctctctttacgatcaataaagtccaaactaactatttggccaggctctctcaactgtatttctggcagtcgggccgacaacaccttgcgacattgtactcctttcaccggtcaaggaatacttgcatgagactttggcgaagaacggggtggctggattcgctccgggtatcttggccggtgccgacgacacagcgagagtgttattgaccctggagctgctgggtactgaggtctgactatctacccccttatgaagcattgtaggaagggcatattttgcacaacctacgagcatgagcggaatccaagcttcagtgcgaactgcaacgtattacttgcactggatgaatccagtcacgcactgcagcatattgataccatcgaagaggtagctgcgtacctgatagagtgctggaaagcaggaagcatcaaagacagatggaactcgtcccctcgttactctaatatgctacttgtactagcgcttactcggctctttctccggtatgacaagggagacttccacgggccattgcaagtctcgttgtcgagggatatcatcatatgcctgtctcagatcctctcacgaacgttgattgaacagcacccggacgggtcctgggactcgtctttagaggtgactgcctactctgtgcttacaatctctcggatgatgcttttgccctacgtcgataagctgaaaattgaccacattgccccagcgctgcggcgaggctgcggatatctgatagatcatcagcacgatcccgtccaaccacgacgcgaagattatgtgtggattgagaaagtatcgtatgtgtcttccttcctccgcaaggtgtacaccgttgcagccatccatgcatctcgcaagcaatctccctgctcggaaagactcgtctcattattccaacccttgcctacaacgcacgaacttaaggtccttctgctggccactcctctctgtaaagagtccccagtgccttttatggaccttgcactgttggaagcgcattattggtctcagctgttgcgcgaaaaaagttccatgatctttaagagcccaatatcatctgatggtcaaaaactattccacctgattcctctcatcttcacgtcctgtaatcagcgcgccgggcttgttctttccacaaacacgctctggaacatgatccatttctcgctgctcgtttaccaggtggatgcattgatggaatctactgccatacgtatgtccgacgcggaacttgatgaggtcctattacgtttggatcgcagttgcagtctcgcacgcaccgctttccagctaccccagcgagtctcgaatggctcaagcgcccaaacagcaggtgtgcaaccggacgatctcaagactatacctttgaacaaaagccgagtcgagaatctcatgcatctgctacttccattcatcaaccacgtccttggccacccgcaagtcctgcaagctcccgttgaaattcagagagagctcgccgacgagctgtaccgctttctcttagctcatgtcgaacatattcgggcaaacctaacgcgaacaaggataaatacactgtccgccagcagtggccaccagctccgccaacttacatattaccgctgggttcattccatcgggtcagcggacaccagctgtcccctcgcagcagttttcttcttgtgcctaatcagcaagcacgggagcttttgcttccagcacccgaaggcacagtaccttagtcgaaccgtggctcaccatttatctgtgatctgtagacagtataacgactacggctcggctgttcgcgatcacgaagaagggaatctcaacagtcttgattttctcgattttcaacaagaggcacaggcaaatggtgcagtatctgagctcaggacgtcaaacagtgtttgcccttccgtctcagatacgcagctgttcccacgagctgcatgcacgtcgcagagtgcaaaagatagccttatggaagtcgctgagtttgagcggagctgtatggagctagccctgcagcgactggaagatgccgcatgtacacttgacgcgctcaagcaatttagggtgtttgtcgatgtcacagatctgtttgggcatgtttatatcttgaaggacttgacaggtaaagttcatccggccgcgtaacgcagacagcgcgctcccctcgtgcaacctttccgctcagtcagtgtttattgaattatttatagtatcgttgcgtcctttgacgtctttccttcccgcgtagcccttaatgtctggacctgatctggagaaacgtagctgttctggtactagcaaggctaatatcctcatattccaagggattgcgggatatcatttagcgtaggtaatgcatagcttagttacgtctgctataaattggctgagcgaatgctattgctgaggatctttttcccagccgaaatgccagcgagcaatctacccaaatagacattcatctggaacacgccaaattagccctcgtcttcaggtcagtaccccctcaccccaaaaagtccatattcctgctactccagacctcaaccactagcaccgtcgccgtaagaacatatcatacctggcttcttcatctatccaacgataaacctgactctcgtcaggttaaatctaaaatttcccatggctattcactctgtctctctcagagctttgcaacaactttccttattaggttggagtcaggtaggttgttgagtggttgtagaccaatggcgaacccgttacaaccaaggccaggac

SEQ ID NO: 4271 - DNA, 2256 bp, Emericella nidulans
gagcctacttctatataatacctgataacctgggctatgacctgatcttaggactcccctggctggagcaatataatagaaggttagaggctaagaggggcaggctgtacctctgtactactggagtctgtctatagagtactacaaagaggcccttaccaaagctggacatagcacagatatcagctacaaccatgggaggatttatataaaggaaaaagtaccatggccaagatatcaagatatttatagtcttattagcagatatacagaaggcactggccccaaagagatatattaacccccatacaaagctactaaggtaatactggaaatacctaaggctcttcaaataagacaaagctgaagaactaccaccacaccagggagaggggattgattacaaaattaagcttgtataggaggagaataggaaagatcctgaagtcccctggggccccctttataatataacccaggaagaactaatagtcctctggaaaatactctctgaactactatagaaaggctttatctatataagctattccccagctgcagtcctagtattctttatataaaaactaggaggaggactgcagttctgtattaactactatactctaaatactattactaagaaggactactatctattgcccctgatctatgagatactaaactaaattagacaagctagatagtttactaagctggatatatctgctgccttctataagatctgtatagccaaaggccaggaatagatgactaccttccatacaagatacaggctctttgaatagctagtcaccccttttgggttggccaatatactaagtaccttccaaaaatatattaactggaccctctaggaatatctagataaattctgctcagcctatattaataatgtgcttgtctatactaatagggacctctgccagcactagaagtatgtataaatagtcttgaagaaactggaagaagcaggcctatatttagatattaagaagtacaaatttgagtacaaggagacaaagtacttggactttataatacaggcagggaagggaattaaaatagacctagagaaggtaaaagcaataaaggaataggaaacccctactattataaaaggtgtccaaggattcctgggctttgctaacttctactaaaggtttatccctaacttctcagggatcatatgcctactaaacaacttgacaaagaaaggaatacccttcttatagactaaggagtgccaggatagctttgatctgcttaaggaaaagtttattactagacctgtcctagcaaccttcaacctttcctactatatagtagtagagactgactcctcaggttataatacaggaggagttcttgcttaatataataaaaaagggaaattgcacctatatacctacttctctaaaaggaattctccagctgaatataactactgttatgggtcctttgcctatacaaggaccttagaccttagtgactcggccaaggcctgcgctgtcctgaaggcggtgagccacctacaagacttcctcacaacaacaatccttctttctcctttcttctttagcgattccttcctgtacgtacggcacgtctagataggaagatccatctaaatacgtcccttaacattaggaatcgctcactaatctcaataatagtatgaggagaccttttactatgacaatggaagaagaaagtgtcacattgttgctacagcagctccaggagctccgtacggagatgcggactcagaaacaacagctccaagaagagaataacagcttacgggcggaactacaggccgtacggaactcgcagctgagaaaccatccaccagttactactacagttacatctgcaacgcccaccccctacaaataaagctatccccgtcctcgtcacccggatgtcgaaccctttactggagaagaccctaaggactaccctcctttccagatgaaccttcatacaaagtttgcaatcgacgccgcctgctaccctacagaggaggaacaagtttactatgcctacagccgcctgagaggaaaagccagccagcgtgtgctaccatggctcttggctcgccagaaatctgagactcctgtgctatgggcagaattctccgcggtactagacaaggccttcagtgaccctgaccgacagagaaaggctcttgtacaagtgaatacaataaagcaagggagatgtgaccttgaagag

SEQ ID NO: 4272 - DNA, 1595 bp, Emericella nidulans
ttgccttcaaccgctcgttctccaggtttcaagctgatgtggtcgaagagcagcggagagcggacggtgatgatgagcttggcctcgccgggttcgaactatcgatcgaacgtattcagtgccagatcgatgtctcccaggttatagtggcagatatcttccctaatgctcaacgcccggagcttgaatatgccttggatacggatgagggtgttctcgccaacgcagagctgcctcctgatgttgaagcagagattcgtgaacagctggagaagcagtcaacggagatcaactatgcagtcgaatctacgttccgcatcatggatgatgacgccggagtcgtgactgttaccaatacttccgagggagatgacgctgacctgcaatacctcgtctacgcgccctttctcagtcactggcgcaacgtccctcattcatctatacctctcctcaaagctaccgctcgcctttttcatcgtcactcctcttccacctcccttcccacaaaaccatcaacctaaaattcttcatcccagattcgacatcatggtcctccatcagacctgctcacagccacctcattcagaccctcatagcgcctttccctgtcggtgcccgtcacaccatcaccgttgcaggttcctcgagcgagattcaccgcatctacccccagtacctgactgacaccgtgggcgccgctgagcgcatgctcacaaacccgtgccggattcttgcagttgtgttagatcggcctaactttgtggaggaggcaggtgtctacttctatatgtcggagtatacgtcctcagttgatatcccgcctgaaatggagcctcaaccagatgacacggaggtttggcgtgtcgtggggatgaaggaggttagcgggttattgggaatggtaggggttggcaagggaagggctgagtgaattgatgtctctacaataacatatgattcgaaactgctccactgactaattgtaacaatctcatatcctaggtcaactatgctgccatctgcctgaaactccgtctatgattcactgaggtctagcattaggctaaccagcatataacgggggcatcctgagttccttcctctctgctgccactgaagctggagcataaccccgtttcaattccgtacccttggtaaatacctgaaatcggttgctcaggttcacttaagcattgaagggccatgaatccgcagaaatgccagtgtccttgcactttaggaaacttgccagagtcgcagagaccatcccctggaacaaactaacctcgttgtcgatatatgcttgctctcacggcttctgtgcccccgcactgtacttcttagccagtcctggccgtcctgccttaaccttactcggaataaccactgattgcagcaacggccactattgtgacaccgtagttctcccggggatgcgaatcctgtcgcatgaaattctatgcaaatgggattctgtgcaaaccccttgaaaagtacaatgaggacctaccgagtatggtaactatagtgcttgattatcccgctaacctctttcattgcaacccaacctatagtcttttccaaggccacattca

SEQ ID NO: 4273 - DNA, 6167 bp, Emericella nidulans
ttatcgacacaacaacgggggaaaagtatgttacttgcacttttgacctcagtactatccgggaagccaatcgtcaaccaaaatggaaaagcgtctgtttgcctttcttccccttccctttcttaccttctgcagcagaaagatctgggaagtcctctgtagaggaaccaggtcttgagtcagcagacgaagtccaagcatttaccggtggcggacggcgatcatcccagcgaacagtgcctcgggttaggcccgccatgaggacgttgggcttgggtgcagcgggaagggaagggaaggcctctgtgtcgcgagtgttgacgcggcctgaggatgtggagggggcgttatttgtgcgggatgagggatttgcgtaggttcgagatatgggagggggtggtggcgcagcgattgcggagcctccccatgcggcagatgttgcaacggcacggggagttggacgtgatgaagagaggggagggaaggggttgcttaacgacgaggagccagcggcagcccgggaggactgagctgttgaggatttcagacgcaggactcgtctgccgccggtggcgccggtgccgctggcggtaccaggggacatgcctgggatgttaccgcctggccctggaagtgcaggtaatcctcattgatgcacgccaatcattccaggccttgagcagggcattctttttaccggcgtcctcgtagatttcggcaagctcttttatgagcttaccgagttcggaacttgatgtgtcaaaaagggagaaaaaggcatcgatgagctcggtggcagacatgccgccggtacgatagttggagactcgggtgcggaattcactaagcttagtttgatcattcccaaggagatttgaagctctctcaataactgctgcgtgccgaagccgacgcgcctgatcctctggtgtggctgatgtgatgttaaggttctcaaactcgttgacaggtgacgtcggcgcgggtggtgttcgagtgggagcaggtgctgtggaacgcgctggggcacgcacagtctgtgtttcgtcacgagatagttgtccaccgaagctccgtgtcgaaacggattgtgcgctctggatagccatctggcgttggtaggcgatctcgtccctccgtagtggttgcacggttgataaaggagcggtttctgcgttgggatctcgcccacgaccagcaccccgacgttgtcgctgctgaggctggtacggcgttctgaaatcaaaagcggtcatgtctacgcgggcgtctcgccctgaaagcccgtttggatgacactctagttgatgagctttgaggtccatttgagactcaaagaccacgaacttcttttcaaggcattctttgtccaggcaaagaaagtggtctgtctggaaatggctttcaagggcattgtagtcgatataatactggtgttggcgggttgtagagcgtcgatcgcaaatgtggcatcgttcgtggcggtcacggcagtgagcgtatagctcatcatccccatagaatctctgacgacaaaatccgcactcagggtggcccttaaaaccgctctgctcaagcgctccagggacatggtcgccatgtctttcgtgcttgcgcagctcggcatgtgtaaagagcgcatgctcatgtgtgaaaacctttttgtttctagtacagagatcgctatgagacggttacagtaagcctttgaactgtcgactgattgagaggactgttacataccacatcactttaccatgcttactcttaacatgacggtgcaggtccggccaccccaggcaagccacatcacagttccggtctggacagttgtagcggagtaacagaactgtgtcttcgaagatctcatccttttcgtatttaataccaaggttatcatctttttgagaatagtcgctgtcctggaactcttcgtagcgcttcgtggggtcgtctgtgaaaatgacataactagcttcagtctagaaaacgagtggattagcagtgcattcagacagagcaactattacagagcatacccgacaatgagcacaagccttgttcttgtacaaagcgcgcaatctcaacgcgcatatatggcatgtgcggtgattacacggagacactgagttatgctcgaccttcgaggcacagataaagcagatctctccatcatcagcgtcatccgccgtctcctgacgcgcctttcccttatctgcggttgtggtggtttccaccgaagacgagccatcgacgtcaccctcagtctccggcttgctgatgtcgcgattttgtccgccacgcccccctcgacctccgccgcggcgtggtccgttgcctcttgacctcggtcctctggaaacgccatctggagcgtccgagtgctcgccctgacgagctcctccgcgcccgcgccgacggccaccacgggtctggctctgtggggcgggggcctggggaggctgagactcggtcatcgggcgagtgcgattgcgcgagcgttatgaacggctggactaggcgaccggatgcaaaaaaagtctggaaaacgtgaactgtaacgctccttgcgatgttggcggccaggaggcggaacgaggagagcgtcttggagcagtggggggattggagggtgggcgggcagaaaaaaagttggcctgtccgagataaaacgcatcgcagcgtgcttagtgagcaccctactaatgtgccaactgccaactctgtagctttgaccaagaactactctatgtgggactcccttcgaacataattcgttcttaaataatcctcccctttctggttacctggtcgatggctcataattactcactgctaagacaagtctcagcgttgactttttattgaggcggtgaccatgactcagtgcgccatggtagcattgcaggctgaaaagtttagaaactcgctttggggattgtagtaaccaagcccaatggtagaagtgtctagtggtaaatcaatcacgcctgtctgcaagccaacaccaactcccgctggagaggatttagggtaataaacatagggaagatcagaaaacaagtataagagattgtccgcccatcaacgagcagaaaggcacaatgcattggactggacgaatgctttgaaacgaaacaataagaagattaaacaaagaaaaaagcagaccgagaaattgacgcctgatcgccaaatgcgtgcacaaaaaggttcgtatatgactgcagcaaatatgcagtgtcacaagctgatttgctatcaagaacgtgtcattgcaagtagtctcttccgggacggaaaagctattcgtcagggctgtacagattttgactgagaattttagtcatggtgaacatgtgtatgcggtcctgtttgaacacagcgcgcataggatcatcacagcggatttgacgtctatcgcttgggtcctgaagatcatgctcgtgaatgtactcccagagctttttgactgtttgtggccgtgaaagcttccaacgagattagctttaagcatgaaatttgcagggcagaataagttggtcacgtaccgtcgccgcgccccccagcaatgctgagagcgccggtgagaggttaagcggtttctagattattttagcatcagccagctaccgccatcagctaattccgcttacgtggaatcctccagaacggttcactttcttccctgactctgagcccgacccgatatctgaatcgtcctctgcctttactttcttcgccgttttcgctgtagacttcttcttcttgaccggcgccgcttttcgcgtgcttgcgcctcgtgtaggacgagctcgcatattctcctcggcctgtagctttgcagcatagagtgcatccgcatctatatcatggttcgccttctgtttcttgggcgggggcgtcttgcttgagcgatcatccgagtcagcactatctgcctgacgtttctgcgctgtcgaggactgggagggtgaggaaggttccacaggcgttgccgtattatgctgttgttcgtggccgttttggccgtttggtgtaggcggagcacctatgccttttttctcagcaaagatgtcgaacctctccataatgagctgcttcaccgcagcctacagaggaaccccgtcagcatgttgacttgacatagagaaagtataggaacaatatgcagcaagagcgcataccttttgcggggtaagatcatagccaatttcatcttggagacctttgcgaatgcgcttctctgagatcgtatttaggtcgctcgcagataaaattgaatcgatgattgggatatattgatcgcgggcgcctggggaaactatgcaaaggaaaggagaaaatgatgtcagttgtcaggcacctcggcgcggttagtccgagatctggagaggctgaacgtacgcgacattctgtccaaagcgtggctacaccctaatttcaagggattaaataagcgtatagccgcaattgtgaccagtgatggtgtagaaatttgatgcgatgctgcagcactgctgttggtcacacggtcaacactcagagatgaagaggttacaaaggtgctgggagaggattggcgcttgggaccggcggggcttgagatgacgatagatgttcagatgcggctttagtaagatgttcggcggaagaagaacgagagtagagagtggaaagatagttcgcagagcaaccaggagccccaaagtaaagacagaatgacggtgtggagttgttgttgacttccccaggcggatgcaggcaagatcgcaagtccagcgtagtatgagcggaggaaacttggagatcgatgccttacggctcaggcttaaagatgtgctgaaatcggactttcattcccattaactatatactctatgctacggcttctgatggcgcatattgctttctaaatccttctatcttgatacacttgctagactaaactaaaatctctgcctaggctcagttgtccatggatataaactttgattgtttcagctacattatactcagcatgaacgagtactggagcaaattactacttgcacggcgagtattctcataataaaacagtagtaattgtattcatgtacccttatcccaggtatgaactataaatgtatgtatgaattaatatatcacaagatgctgtataagaggtagtctgaaagttggttctgtactgtgatcacgtgactagccgttgcgatatgtcggcacagaggtcgggccgcacacacaaagatttcgatccctccaccaagaaccggctgcccccttcacatcgccatcagcgctaacaaccatggcacctagcttcgagaacctgtcggagcaagatctccacgaagaagaggaggaggagattgacttctccggtatgttaccgaccgatatgaacttagcgagctctacgaaaatgtcgctaatccatcctattttccttctagacctcaaggcgcagtacgaagtgaaacttgaggagggcttggacacattcgtcgtcatcgatggactcccagtcgtaccagaagagaacagacagaaactcatcaaattcttgctgaggaaactcaacacagtcggccacacctccgaagatgccgtcttcatgcccctcaacgagaagaatatgtccgaagggtatgtacctggaagccgagcgctcgattatgttggtaggatgagaaatggaggttaacatgcggtcgcagatttgcctttgtcgagtacgaaaccgcagagcaagccgttgccgccgtaaagcagctgcacggaacgccccttgataagaagcatactctcctcgttaacaaattgatggatatcgaacgttatggccgggaaggacgtatcgacgaggaatataagcctccgaatatcgaaccattcacagagaaggagcacctgcgctcgtggctcggggaccccaatgcccgtgaccagttcgccctttaccgcggcgacaaggttggggttttctggaacaacaagagcaacccgccggagaatgttgtcgaccgtgcccattggacacagcttttcgtccagtggtccccaagggtacatatctcgcctctgttcaccacagggggtgcaactgtggggtggtcgactttctcaagcaaaagcaattcctcatcctttgtttactcatcgag

SEQ ID NO: 4274 - DNA, 587 bp, Emericella nidulans
gcgcgacagcaatctctcggtccgcaggatgcgttaggaagcctaggtcgaacacaggggggtcatccatgtcagagctggagatagtgacatttcctcgagagagtggtgcaaccagagccaccgcaatagtaccccattgttgcccgttgcccgttgcctggtctgcagcactatgccatccgttaaggtaaccgtcgatactgagatactcaatggtgggccaatcagaggggaaggtagccagtgcttcgttcgtgctgtcggaaagggtgctgttgggaagtttctcccatcccaaaacgccaaagccagccgaagtgagcggtccttgttgggacttgtattggttcagtgcctgaagcagcgcttgctggttgattgccaactcagttgcggtgacaaggttgacctggtgagtgataccgaagaatggatgctcccacattttctggccaacaccggcaagttccttcacaacgggaatcccatggcgttccagggtctcgcggggtccaattccagaaaccataagtaactgtggcgactggagggctcccgcagatacaatgatccctttagtgtta

SEQ ID NO: 4275 - DNA, 4381 bp, Emericella nidulans
  unsure (1)..(4381): unsure at all n locations
aacccttggaatgctctgtaactagctcgctgaggagaacgaggagtgggattatttctacatgtttacgagactagattgtggtctttatgtgggatggaccgtcatcagcatctacggcctgctgcaatagctcaatttattggcgcttgctgcttttccgttatgggataaaatagtcaagataggtctcaggagtggccgtgactgcggttgcttgccgcaagcagctgatctatatgtatagtacagcgtagtctatttactctactatcagccccccttcctccgccttccaacaccaccaagcgaccgcaataccccccttgagcaccacagccgtccacagcgcccccattaacccaacttcactcttcgcccatagtccgcctagcgagatccccagcatcagtccacccacggccccgagccgcctcaactcatccgccatcttcccgcgccccgctccccccaagtacgaaaacagatcacagtacacactggtcagcaccacgctcgtcaacccgctaaacccaacaacccgactcgtaactgcctgacccgcactctgaaacgcaaccagggccagcggcacactattccaccagcctagtctatctgtcttagcatgtggttgtgttttgaaactaacaatccctgctgcaacagcaacacagcccatttgaagtacgaaactaagcatcaaagcacccctttcccttgaactgcggaatatccgcgccaaggccgcgaaaaatagactgccaatgcagaaactggatatcgaaatgagtgctttcagccaccgttggcttttcccgctgtcgtctagtccggacagtcccagacccaggtacacggtgttgccggtttgcatgctcacaaaggagccccagataaaaaccgcggagctgtcaaggagaccagttatcaggtagcacacgaggaggacgaggtctgtgccgtggggggtgatttcggtggcgagatggcgcttaagacgttgaagatatgaagattttctagggttgaaactgcccctggcttcaggattggggttgaggaggggagacgtttcttctgcagggaacatatgcggcattgtgttcttaaagtacacgaatatatagataattgcaatgaagaaaatattgaagttggttgaaatgtggagacgggttatagtatctatgacgtaatgttgtgtagggctgaggctgctcgctccttgcctgtacgcgaaatcgctagtctacgagtattagtgctagaaatagatggtaagtcgacactgctcaggttgtaggggttttggttccaaagtatgttgcatagcgcttgcataagctcggtctgtcctacggaagtacgtactaacagctctagagagctgtgccaatccttgctgatctggtaccgccgcgtcagcctcagcttattttcaagcacttatctatttaggcctccaggtgccggatgtgtgagcaccttcagtagctgccttacaggtcttgggcacatagtcctggtaactactgttcaaccacgaaatatgcatcctcctagcctcttcaccatgaccgccatctcaggatccttctttcccagttctcgtaacaagactaatatctcaggcgagattatagtctggatatgaatatggcgcacatgtgcttacggcctctaaaaacctatgtagacaggaacctgctgggccacctttgaagaggactcaaaagcgagaactcaaaaggcctctgccaatttgataagatcgctcgaactgacccttaacccccgcgcatttatagccatgattatgaaaaggcgaaaatacactaaatagaactttgctacggagccttcgcgcgtagtcggccttatttctttatgactacacacagcgagtcagtcatggaatctctgaaacccaagatcaagtgcactcaaatatgaaagctcagaagagaacttataggagatcatcaatgtccctgaacacagtggataccattaagatatagtccaaaaggatgttttatatgaccgccagaattagccgcggtatgggcgacattacaactatcaacagcaatcactatggcaagactatggacccagcgagtgtttgtggtctgtatactgaaaacaatctttggctcatttcaaggacctcacagtctacttttagcacgtgtgatcaaagagctgcgcacgctcgagccctaactgggactgtttacctgacacatccccgtgacttgggatgcaatctcctgtttatgagagagatatcgatttactctatcatcactacagcactatagcgcagggatttaggcgagaaattcactgcagatctcgtaaccggctctctgcatcgtctcaatccgcaatgcggatccccatcctctttggcttcgtgtataacgacctatgcttgcgtcccaccacggtccctggggcaagtatgcccgatcaatgagagtacttgtttctcatgtttatcgattcgatattcagtcgccgcaatccggctggcagtcttagtaatcctagatttaattcgcgcgctcctgaactgtaatcccaatacagatcgctgtacagatatacctcagtcggttctttcttgaggataacccttagctccacaagcttcctgttctgactaggtgccctagcagtacatcgtccccctgacctcacatttcctgtttgaagtgaagcttgacggcctcgcgacgggccgtgatgctccacttttccaatgcgcgatatcggaccaagggacctctaggttgaagaactgcaagatcgcagtaagtagtaggagccattcagacctccaaaacattagtctaggcctttctgatgcctgacctccaaaagtgtggtgctcagggacttcttatgatagaccacggtgtggtagagacatgaatcgtgatcggcacggaaagcgggagacgacgttgcatttgataatcgaaggattcgagtcttggattagcgtggcactggaaggccttcttgaagaggcagctccaagtcgaaaattcggttaggatgtgtttaagagatgtatttctaccgtatctggcttgggatatggtattagcgatcatgtgacnccggttcacatcttcccagatatcaaaacataaatcctgcctagctcacttgagtctttttatctgagcatgaatctccactctctcactcagcctcggagctaagaagaaccaataaatagtatggctagacacagcccgattattcctcccctcacccatcttccttttttgctacggtcaccatgttgggactttccacgggactcgccctcctaaccagctttatttccctttttcccatcaatggcgactgctcctgtcgctgcatgccaggcgacgcctgctggcctgatcgcgccacatggtcgcgcttcaaccagtctattgacggtcgattgattgcaaccgtgccgttggggactccctgccacggctctacctacaacgaggccgtatgtgatgcgctccgcgcagaatggacactcccagagctccagtaagacgtccagacacattgaattgtttcaagtagaatctaatatgctcagttatggaacctcttcctcgatcatggctccgttcttcgccaacagttcctgcgatccctttcatcccgttgataagccttgcacactagacaactatatcgtttacgcagtcaatgtcagcaagcccgaacatatctccaaggcgattcagttcacaacgaagtacaacattcgcactgtaattcgaaacactggccatgactacaatggcaagtcgaccggtgccggggccctaggaatctggacgcaccacctgaaagatatcgaggtcaaggactggaaagactcgaattacaaaggaaaggcgatcaagctaggtgcgggcgtacaaggtcttgaagcatatgaagcaaccgatgctcagggcctcgaggttgtgggtggtgagtgtccaacggttggtattgccggcggatatacacaaggaggaggacattcggcgttggcttctgtgcatggcctggccgccgaccaggtgctccaatgggaggtgattgatggaaagggcagatttatcactgccacaagagataacgagtactccgatcttttctgggcgctgagtggaggaggcggtggcacgtatggcgtagtctggtcaatgacgtctaaggcacatccaggcacacctgtttctggactgaacttgacattcaccaatgcaggcatctcacaggatacattctacgatgccgttggtctctatcatgccacacttccatctctagtcgatgcagggaccatgagtatctggta

SEQ ID NO: 4276 - DNA, 2911 bp, Emericella nidulans
  unsure (1)..(2911): unsure at all n locations
cactattgacatttaatcaaacagagacaacagatcaaggcttctgtgtcttcacttcgcctctgccataataaccgcgctgtactggatcactcgtgttgacggtcatccgtggttcgcttcttgcgaaccaaacattcactccgttttcctcgtttatttacgtttcttccgggtgctattctcttcataatccatttcccagtatcgccatgtcgttgaaggacgtgtatcagaagttccttgcttcccctaactcggcttccctggcgtccgatgtttccctgatctatatcacctccaccaccgagatcaatggcgccgatagagtgatcaagcatctctccaggcagcaagaactcaaaatcaattcccagactgtccttgacactgtacaaggctccaacgcattgtgcctggacattgagacttctctgcagttccttacaggaggtggagcctatcttcctaacctggatgagacgttcctgtttgatcgcgtcgcaaaattccccacggtgggcgctctcccattaccaaattctccgactctaggctacgtgctaatacagctgatcgttcctgcagatccatatcgtccgattcaacgccaataatgagatccaaagcatcagaatctactgggaccaggcctccctgctaaaacaggtcgaggtcattgggaaccgctctcgtaactggcccgttcgtgacgcggataagcagactcgcctgatcagattcgcttccgaatcagcaccagcagacaatggacctcccccagcagctcgacctgagccttcatccactgtgaaagacgaggcccacgaggccccgaggcccgtgaaggctctcccggtaaaaaacacatcaaggacccatacgccgctgagtcgctattcgagctcctctctccctgcaaagatcgcggcgagcccgtacaccgtcctcgtgcccctgcttctgcgcagctccacctcgtgactataaagagttgtttgtaggtgatgagggaaatgacgacgcgcccgaaacgccctcaagagcgcgtgccatcgcaccaaaggtcggcgcaggcaagcacttcgccccgtcgcgcattttcgagcctgaagaggttgagccttctccagtcgtacccaagctcggtgccggtacgtgntcgctccctctcgcatcttcggcgacgataacgagaccgcctctcgagaaaagccagagcagatcgcttaccgcgcgcaccccaagcgatttgaacatttcgagctaggtggtgataaagcagccgcgagattaagccaactacctcgcggcctggttcccgtcacgtcaagaactgggactttgaagatttttcaactcccccaaaggccaaacgcggaccccgtggtgaagaagtccgccatttcggctggagcgactgacgaacctgagcaggacacacccccagctaggcctcgcgtcgtacaaccccggcgtgacgccgagactcatttccaaatcgcggatggtgaagagcaaggcaacaagcgcattatccggtcatacggcaacaagggcctaggcctttacaagcacactctgtacgctgaggcagaagacctcgaggccgatggaagcgccaagcagcaagccagcaaggagcgtcccctctcagttgtccaaaacggaccgaaccgcaagaaggattttgagagccactgggatgacccggaggccactgtaagccacgagaacaagaagcccacaggcgatagagtcaaggctgctaaggcattggagtcttcgtggcactttgataagtcccctgagccaagcaaggaatcgcgtcctcctcagcgtcgggtattgaagaatgtcaaccagcggagctggggattcgaggacgaggagtagaaccagctcgacgcgatgggaaaaaaaaaaaaccatgacgtaccggtacagtgaaccttgaatgatactaacggctacttacttggtcaatgcctgcatggatctatgattatcagtgatttcattttgttccttctcttctacttcttagttggtggcggtctacctatgtttccggcggcttgtgtttctttctcctgtactattctgttctatttcccaggttctatttcaagtctttacgcaagactacctttttcacttcttttattctttgtactttgttcttcttgtcctgttgtcgcgtttagttgaacatcataccctgtaattaacgtcaattgctcggattagaaccctccactgtacttgagtagtgaaactgtagtgaaagatcttgcacgatgattctctaaagataacattaaaattgatttctgggaatatacgggcaagttgaatttcttttctctttcacgactcatcgtagtagtattatgcggaacaggcaaactacacttagggctcggcgcttgaaatatatgtcgacgccacaaacgaaatttactccagccgctgtttgttctagcagagttgacgtaacaatggactttctatctacctatttttgacagtactcaagccgcaaattttggcggctaacgtttccaagcacacatacaagcattaggagggcttgagaaaagcatacacggaccaagtcccctgcacggcaacttaccaacataaccgaaatagagctaatgaaatgagtgaacaagctcaggaaaacctagatgtagaacatcgtgtcccggacattaggatggataaggacatcgtcattagcgacttttactgttgaatcttcagcaccaataacactaccggagggtgtagagggttcaaaagcactgcttaaatagcaacgggcacgcgtgcaaaccaggtcagcgtagtaggctggcggacagatgctgacagctttggttgccctaccgaagagatagcacat

SEQ ID NO: 4277 - DNA, 3294 bp, Emericella nidulans
tcaatactagcactcacgggtggaggttgagcttcgactgcttgatatctcactaaagctactactactgttagtagtaccggcagcggccctgaggcttgacacaaacgtcgacgccggggcgttagaacagggcgaagtgtcagtataagagccagaaccaaactggacgctggcgatctctacagcgtactttgttcgaatgaagactccatccttttgcgggatgattttcggaccgggcccatggtttgagaggtagatcacgatttttctaccagcagtgtcctttgtcggcagtggcatgctagtatacgcagttgaaggggcttgagcttggggcttgtgttcgcgctgcggcccggatgcggcttgtgggctcgggcttgggcttcgggctgaaggtgaggatgcggatgaggtggcgctggcttatcttcgaggatgtccgcaaactatagaggtcgtcactaacatcgccctcttgaggatgaggagattttcgcgggtggaacaacggtttggacctcgctagagcctccgagcattcctgaacacgtgtagaggcagctgtagatttaaacacccgattataaagacgagggtctatcgattcggcgactgctgattgggctaatggtgatctattcctttcaggagaattccgtgggcttctcgcttgtcctgaagatgcagtcgacgacgcaccgagtctgctcgtcgaactctgagactgagagcgaacaccagagggcaaatttggacccgagtacaaatttggaacctgtctcgtcctaaacgcacctgtcatcagggaatctataggttgccgggtctgtttatgcactcggcatcgacttcgaggtcgacttctaccaaaggaagaaagagaagaagaagacgaaggcgaagggggatcaggattcgcaacagcaagccttttcacgcccgcgccttctgtataagccctatcttcacttgaaccgaaagccgaccctgagcccgacgaggctttagcctggttcaggtgctggatttgcacctccgcgcccactttaagagacgacggcatctcgcaccttttacaaatcccattatatttagattttcttgcctgacccccaccgaacgcagagtggtggaggggtgatctgtaccacgtctcttttgtcttctgcagcggccagagcacgaaagtagggattcgggtgcttcgtgatggaggagggttcggaatgaaccggaattgctacgcacgaatggcagaacatgccgcaattaaccagtatttgctagcgatgagggagaatcttgagactggaggcgagcttaggtcgcgttgggggttcacgatcgagcattgcgtagcatggctgaccatggggccgggaatgagtatttatattaataaatccgtggcagacaccggagaaacagcttgaagtcagctcgaagggcattgttggcctctttggggatagagctgggtcaaaaaaatgagatggatggcttgaaaaagttctttatgcttcacaaagagactagtatctaagtgagcattgaccgcgggtttctcggggagcaagagcaggtcaaagagctgtgaatcagaccttcacgtagaatggtgcatgtcattacctaggttgggccctgatagtatgctgataagtccccgtacactgatcaaaagttctcggtataatcctcgatgtcctggaatgaagagcagagaggctgggctcggtacagaggtaatgctcacttctttatgcaatgttactcaaatagatgatgagatccaagactcccttatattcacaggcggcccctgtgcctagccacacgcatactagaaaggttattgagattggattgtccactaatggctccagcaacgaatttttatccggtagacttcacagaagagcagtgagacttctaactccatctagttatcgattaccatgaggtaatggtagtttatattcacaattactcaggtaggttattccagaatcgagtctattcagtaccaactcactgggtgaaagtgtcattgcaaatagtcatatttctgcggccagactatcttatttctccaaaacacattacaagcacacttcaagtacctagtagctgacaacctaggctgttgcggtcagccggtgctgagggccatgcatccggttttgggcagtgacggcacaggctgaatcgatcaagagcaccaacgcctaatcctgaaaatcgcttgggtgagttatccccaatttaaattgacgtggcatacggagcacaagaggacactcgtgttacgatggtgttcgtcgtgcctgatacctctacttccaaactaccgcatcaaagcccgtgccctaatacaaacacagttacactggaatgacatgcgcttcacgaaacaaacgttcacgttcgcgtggggatttatcacggatcaccggcaggcccaggccagtcgtgctctggtggcgttcgacctgacactatcatgacttcatcggaccggcattctatatagaggcactgcaccctcgacatctcaaatccactaaaatatcttacttctctactgccatatcaatctaattcatatccatatcttatcacaaattagcacaatgtcctctctccaaggaaaaggtatgtcctcttcggacaaccagccaaccacctccacccgcggcggtgcaagcgcccatcctacgcccgcaaacaactctggtggcggtgccggatggggtgattccggccttctaaagggtggtcttgaaggagtcgtatgcatacaacacctatcctttaccaagatgaagcactaatgtgtgataatccgcagagcaaccgcctctccagtacctccggcgagtcccacagcggcaagatctccagcttgaatggtgaactgtcttcccttaaggaacagaagatggccggggagcagcggtatcggcaagatattgaggagtccggcgggacggtgcccaaatcgtcggatcatagtgatgcaagcttcatgactgggaagcccggtggcgctgggactttgcctgggtgggagactgcgaagggagcgcttaataggtatgatttattctcaaactactgggttatgaaatgaatgctgacttgtgtagcatgatgggcaatgaatagactactaatgtatcccgtgtaatgggtgtctttgggttggcgtaaaaaagtatggcaaatatatgttcgtgtacattatattccaagcccacgcgagtatggcgcttacactggttg

SEQ ID NO: 4278 - DNA, 3956 bp, Emericella nidulans
gagggagtaagatctcaaagttttcgggagctaaaccagtcagtacagagtagggagccatgacggtcgatcaagcttctctccatttcttccgctaccacactacctatttctcacatttcctaagctcatcttggatcacacatacaaagtaatcttactaattttctatcgattcgatattccattgattctcctgcttacacgcgactttttgcaacggctcaagtacttcctaagtcttcctattagtcggcgcaatgtcaggcgcaaggcattggtatgtcgaactattccctgtgctatagccctcgagctgacacctaaaaagggagcaggacaaagaggctaccgtatacattggaaaccttgatgaacgggtctccgatagcctggtatgggagctcatgctacaggcagggcgcatcgttaacgttcacctgccgaaagatcgcgtcacacagtcacaccaaggatatggattcgtcgagtttaatagcgaggaggatgcggaatacgcatccaggataatgaatggaatacgtctatatgggaagccgatccgcgtcaataaggcttctgctgataaacaaaagtcggtggaaattggggcagagctttttgttggcaaccttgatcccatggttcggagcaagttctatatgatacattcagccggtttaggaacctagtcaatctgccaaaggtacttgccactctttactcctaagtggtcctcagatattaatattgctcccaggtcgcgagagatgacagcaatctatcaaaaggatatggctttgtgtcatttgccgacttcgagtcttcagatgctgccatacgccacatgaacggccagtatctcatgaacaaacaggtttctgtacagtatgcctataaaaaggacggaaagggtgagaggcatggtgaccaagcagaacggatgttagctgcgcaggctcgtaaacacaacgtgcaagtgccgactcaagctcttccaccgcaattcacagctccagccgctcctgctatgcccgccgatatgtcacggccaatgagcacaggtccagccgatcaagggatgggaagagttccaatgctgccaccgcaacttgttggcttctcaccgaatgtagctactcagcagtcactagcgagacctggccttccttccgttacagcagccaccccccctccgggtctcccagcacggcctccaccttcgcaagccgggtacggagggcctcaagtgttcctacccccaggcctcaacaactctggccagcagccacaatataccccccaggccgcgccgcctccaggatttgcgcccccaggatttggaacaccttcaggaagctatggtccgccaccacccatgcctcctgtggttcagcagtcagggtatggtaggggtcgttaaccctttttaccttccggacacaaatattgcacaccagagatgaccaatccaggaaagcaatagagagcagttcttggttcattgctgagaatgtggtgttctgagtctgtcgagcaacgctgactcactcgcggactccgtcgcactgcaaattttctcgtaccattcacggacactttcgcatcggttcattactgcaatgggtgagacgtaattgtgatgtatagctgatcttatatcttgcccaatccacaccttggtgagatcagttttatatatgcagtcaaaatactaccacacttctgaggcaaaatagcctcttatctgcaatatgactatatggaggtactgcattagcatgcgctattattgaccggctagaagtggagatacatacaatcactgagtgggcagtattaggatcctgaagactgcgcaaaaatagcttgaacgcgagagagatggaaacgaaaaagaataggtaacagagcttctcacgaaaatgatacgaatttcggatctctgggccggccgtcagggccaatattgttcttggcaaaccgctgctctgtataaatccgtcgagcttcattaaaatcaaccttttggcgtctcatgatattcagaacttcgcgcttgccgaaggcatccaatccggcccgttgatccccatgctcaatattcgttgagaggtcaaattcagacgacgtgagtcccgccgctatgtcgtcggtgaaactggctggtagacgatcgtatatatagtcagggacgggaagaagtggtagccatcgcgaacgagtgagataaagagctgtaaccattagatttgtgatgagcgtgtctcaggttacgtaccagtgccgcaaataacaacgaggaatgcaaggaagtagaagagataagccatctcgatgctttacttgaagaacagaaccgattattcagtgacaggtattagtgatgtaggtcaagtacgattgaccgcaccgttcagaggctagggagccgtatatcagaactaatggccgtcgaaagggcaaatatgaccgtttcgacaagagttgcagcagtcagcgtatctagacagaaagaactacgcaaatgctctggtacctagtagtaatcggtgggctggagcctgggagtctgcggaagaagcaggtgggtcgtggctgggttagccttgtcggccctactcctcaggctttaaaataaggcatcaagcactatacccgaatcggcccgcttagcgagactgcggtatcaactcttggcattggcgcacaatcatccacggaattccagtggctctaagctaggaaatcggacttgcgaattcgatctgtgtcaataaccttcaactccagacagacattcacaatggccgccgaaagatcgaacgtttccagcgacctcgtttggcagctcacccgtaagtagacgaaactcgctctcgaccttgatttcaagttgaagcgatccggtttagccatgaacagcaggttaactcgagaaatctgtacaggtaaccaaaacgcttatttggtcaagcgtaacacccacggtggtgttcaattctcgcgcgaccctctgaatgtgctgaacaaacactctctcaaggtaagagacgcctagttcaagattataaccaggataaggaaaaacatccactgacggtaactgctatgctagtacgctggttactccaacaccaaggtaaatctcgcaagcctctttcgatgatcaaactctcgcaagaatgggttttgactagcaatcaggccattggcgtccaggccactgagaacggtggtgttgttaccatcaccaagaagcccggcacctaccagcagcctgctaagagcctggctgttgtgacctacggccctggagctttcaaccgtaagtacgcaacaccatcactgatgattgagccgaaactcgaatttgctgactggtggtttctccgctacatacagaatctacaagggtgtcgctgacgggactgctaagaatgtctaccgtgctgacctccgtcaagaggctgtttcccgtgtgagcgctatccgccgctcccagaaggccaagaaggagacccctgccaggaagcctcgcggtgctcaagccaggaaggctaccgagcaggagtccgcgtgaatcagtgcggctgggttgagggattgagaatatgactttgcgagtccgacacactggcgcaatgccgtctagcgggaagtgacgtccatgtattttagcaagaattgctattgattcactccgcgacgattggccccgtagttgggaccggggaaaggtaggggaaaaataaataacagaaaacccctttcgaaagcagtaagtatcagaaatgctgttatagtgcttgagggcggtacaagaataagccctcgttggtgtagacgtagtcctctcgctttgaaatactgatcatggcatttgtatgctatgcagccgttcgtcggcaaaaagcaagtggcatgattggacttcaagtgtggtgtccccattc

SEQ ID NO: 4279 - DNA, 2976 bp, Emericella nidulans
aaagaggtcgggcgttacattgttgttagcgaaatctcttctggttagctccttggcagaaaaggggccaaattggttgttgagtttgacggagtttatccggtatttacagacattgttccctgaaatgcaagcacaagacaaaaacggttttattattttgtatattgggtcattcagtcctggtctcgttatcgttgctcatgatgtaaagaaacttaacgctgcagattctaatcttcaatcaatctagcccgtcatgctaaccccgcatttgccttagcactccattgcacgacatcgtctaacctgccttcaagtgatcgagggtgaggattttgatggcgatggggctggaaagcagacgaagtcgtctcgaacccagacgcagggatccgtggaaacagccccatggtcagattcacctgtcccggtaatagagcggtcatcgacatgatgggactgtctgaatcagcagagctctcacagtaagtgaaatcaattaacgttagattgagtaggcatgaagcacaaggaaagacagggccaaaccacataccaaccgcaactcgaacagaaaaatttctcgatctgccgtccgctcattgtatccaaatcaaaatacattttcagggtcttctgtcgatcttgaatcgctgttttctcagcgtcaatggtgaggttggggttgctgtccctttgcccgtgtttgccttccaatgagcgatcggtgactgtgacagatattgagccgcaggggcatgtccccgtgagcgttgcaacggtgtttgcgcatgcgatggaaccattggagttggcggtttgcggggctgaggctgaggctgagggtgtgggtgcggcactagtagacatgaccatgttggcggttctagactggattcggatttattgattggtgaggtgcgaggtgcgactaatacttttagaagttttatagtttgattgctgggtggattctgaaaagaggctacggcgggatgggggacgaacgtctagcgataagggacaagcacgaagtcagggacgaggtcagactatattgtgctatacagcccggtatgggggaacggatagccgccgggtgctcggctatagtatgaggcgatctacgtcatcccgatctatcccgtcgcgtggcatcatacttttaccttttttaccttcccaggggcgatagccatctttatgtttgtaagaagtccgtctggaatactccagtttttgtttgttgtatttttatcgctagtatgcaaggtctgaatgttgaatggtcgccgatcgatagggctgtcccttgcaggacaaactatggagtacatagggaagtagccaagaagacactccatgactccatacggggcaaatgtccaagagtgtacccacgtcgaacctgactgttccagaccatgagccacggcttcgccagtcagaggaaggaatatatctccggccggaattcctacggagaagtctcgactttcgtggagaaactgacgtatctacatatctggggtactatacggagtacggagaaccactcgcatgaactcataccaagctgctgctccagattcccctactggaactcccagccatcgtcacctaagaattaggctgtacaagcagcagagtcgtgcgaggccagctaaaagccatgccgagctcgaccgcatcctgatatagagggtaattctattgaacacacctgataggctgggcacttgattctcgcgacccaagtcatgaagggttagtattacatataatagatagtcgctccacttgcatgatactggtaccgccctcagcggaaaccggagcatgaggataccgtccgaataatcgcccgggtggccccgacacagtccgagggcatattttccctccatagtaaaatcaaaccagtatacagaatatggctatacgaaccgcaaataatacactggacaatcaagccgctctgcccggtatggaaaatccgcctgcgtgatctcatgaccgcgtctttacgatatatcccagtgcctcgtcgacgacgactcaatacgtatgcacgtaatacgaataaccagcgctttggaagcactggactactcaaaagtacatactataacctcgtgatccgcatcaagtacgtaataaactcccataaaatagcaaacctgaccgaaaacagtttgattggcaggtagagcaatatccatgtttatatcattactcgtactcgtgcttaacgtatttcacaggcgagcggcgcacacaagcgagtggcgcacctccgtattccatataaactgttgtctttccatactctcatatctcaacaagttggttaagagatgtatcagtatatgtatagtctatttaggtaagctttatataggtattagagaatttatcctgctataataagttttcttttggtaatataaattacagctatatttctggtatttaagaatatttttctattctgagagaaaagcctaaggttatagacttaagaaataagataagtattattatagaaggacatattatacctcagttccataggattacttacaacctacttgctgttgagatatcagaatatagaaaggtgccattttatatggaatacggaggtgcgccgctcgcttttgaaatacgtgatctaaaatgcgccatgacatgctcatcgacctacgcgagcagcgagcggctacggagcacctgtattggggtattgggtgtacattacatattactttactgtgcccgcagtgcccggtctgccgatctccaagattacattacctacttgaatagactagttcttcctcgcagtgacggccctggcccggcagatcccaaccagtcagtcctacaagaccagaaagtcgaaagttgagtgctggcagtttgcagccttgcgggatatgagcctgagctccgcatctacccagcatcatc

SEQ ID NO: 4280 - DNA, 1101 bp, Emericella nidulans
tctgtataccgtcggaaatctcctgctatcagtgctcaagatcgccaatggatcatcaagcaactgaagggtatcagtgagcgcgcaaacattgcaatggcattcgagctcgcgaaggatcttgttaaaataggacgaactgagcattgagagccgttgcctataggcaggcccctccagagatcaattccaagaaatccaagcgattttacccatccccaaacacccaaacccatccagagaatcgatcaggttgtatttggtctatccacggagttctaaatagacaacgcatctcagcccagcagatacgcaagccactgaacaaatttttccctttagcctgcccccgtgccctgcgactttttaacttatcacaatccgaaaagtataaatcaataaaattgtctagattaatatctgattgagtagtacgcttcttccttttatactatttagatctagtacagtaaatcggcagaagttctcgtgcaacggcccgaaccaccacgtagaaacaaggacagacaagcagatagaagtcggcaaaattgtatggtcttcactctctaaatctcagtggacgaatttctcgtcctgggtgaagcagttgctccaagtcggtcacgtttctgccatccacgccctcaaatttcttcctagactcctgaaaactctctgagttgtgcgtatgtttttcgaagaactccagcatctttgtaatttctgttgggcttaattgcttgtaatctaccacctcgccactcgagctaaaactgcggtacactccgtcgctagcaagatgggtgaagcctttcagcgatggcgagtgtttgagggttgggaagatcttcgatgtgtcttcgtctttctacagcaatgtcagcactgtacagatgcgagctgtcaggaatattcttactatgcaagacatgatataagcgatcggttcgggtgatatgacgaatcccttgattgtactgtataataggaagggcgtagttgaatggaggtaaagattcctctgagagatgtggtgaggggtagctgatacttaaaggaaattctgacgtgatgaccagtggtcacctgccctgacaa

SEQ ID NO: 4281 - DNA, 2564 bp, Emericella nidulans
tcccagggtcctagctccatgaagacagcgccgagctgcatctgctgcgcttttaatggactaactcgcagattcctgggcgacgtgccctctgctgcaggggatggatgatatcctagatctcgacaaagcagtgctgcgatgcctcctcgacatacgacctggtcagctgaacacgctcaaaccgtgatcgctcacactccgaaacatgaatgctcaaccaccctttcgtgagaatctctgccatagccctcgccacaccggccgagtgcgttacccagacggcctccgccacaaagaagccgtcgagattgggcgcctggccgactaggggcccaccgtctggcgtaaaggaaaagaccccattgaacccgtcgtcaacctgtgcgtttcgcagcgcagggagaagcttctttgtctcctcccatgctggcgcaaagtcctcacttgtgaactcgagtctcgatggcatatttttttcgtcaacatgcttgggtgtcgcaccgagagccctcgcgtcgacaggcatgggcttgtgtccgtagtagccgatcccaactcggtcgccgtgctcgcggtaatacaggtcctggtcttggtgtctcaggataggcagagtcgcattgagcccgttcatccggctgttcgcatcacggttgctcagttcaccgataggactagtctttgcgtactgatgtgccagcggcagcagggggatcccaaccccagccatcctcccaatctcgacgccccagaagcccgcgcacgaaacgacattgtcggcgtacaagtcctccccactgctcgtcctcacccccttgactttgccgttctcctgaaggatccccgtgacggcagtgtgctcccgatacttcacaccagcccccctggtcctctcaatcagaatccccgtcgcgcgcgccgcaagcgccagcccgtcagtcttgatatgcagacccccgagcacaacatcactttccttgttaagaagcgggtaaagccttcgacactcgtctccatcaacaagacgggcatcgactccccacgagacagcatacccagtgtttcgcttcacgtccgccactcgttctggcgtcgtcgcgacctctaaaccacctagctgattgaagcaattctgcccatctttctcgatccgctgtaacttctggaccgtgtactgtgcgaaccgcgtcattgctatgtacgggctcgtctggaagacgagccctggggcgtgcgaagtcgagccgcccggcaaggagagcgggccttgctcgagcactgtgatgttagctgcaagccatccttgagccaggagctcgtcggcgaggttcggccgacgatgccggcgccgattattatgatgcgttgttggggagtgggaaatgtcattgtcatttgcatatggattcggtcttctctctgatgcagcagcagcagcagtaccatagctatacctatcctgccctgataggaactgtttgcttcacttcggttccacgaccgtgtgtctccaacggctacatacggacaccgtttccgagccgactacagtgctgcagctcctgtagggctccagctggctaagctggttggatcgataaggcgcggaaccggaaccgaaccgattcccccgcaccgtgccatggcatcgcaggttctagactgtatcatatctacactgtcctggaagtcggttccagttttccatatagggaattttttcttttttttaaatttattttctctattttgggggggggggggggtctttctttttctttattcttccatcttttccttatgtattctgacttattactaaatattttctaattttgatacattcttcatgttactcttattatataaagctttctattccttacttttttatctacttcatacatttattatattctatatttctcatatattttattattactctttcacctatccaattattttatttctcttatcctaccctttactttatttcttcaatctttttcatactcttccattatctatcacatatatcatcttttattcccttacctacttacgttcttatcaatatatacatatatactttttcagctttcttctggaatttttcataatcttttctctatacttaatttacttcttttatctcattttacctctctttctcccatttatagtgtcttttagatttaatgcaattgcatattctatcgaagcctttatttaatgttttcttccttcataatctatctttattaatctttattacatttattatttatgactcattttatactacccaatatcttccactcgcttctctacgatattctcgttcctgctatgtcaatacttatctatctatatcactttttccatttaacatctacttgattcttatatcgtaatttcatttaaatatccgtatatctatatctctatacccgctatgtaattactgttcttctttacatcaatatatcttaatattatccgccgttattttatctttccctataatatattaataacttccttaacattctttctta

SEQ ID NO: 4282 - DNA, 3243 bp, Emericella nidulans
ctgataacaagcagcagatgcgaaaccagctattgctcaggtaggatatcaccctacccgcacagaaacgtgcctttcttatttgtaagctcgagtttctctgttttctgtgtgtcttcactgcaggagtagacatcactgtaccgaggcatacaattcgacaacccgaaaagatagggcaactattgcggaccagagctgaagcggacatggaagggttctaattaatgacctagggcttatcatttatcctttctggaaatggaaataaacaggccaaacaaagcaacgctcatcccctctaataagcagggtaggggtatccggtcttaggcgtgtctaacgaagccctactcttcagcctgaggatagccctttcaactccactttgtatgcaagaacccatgtgcgaagacggcatacatgcaatgaaagcacacctaaaagggaagaatggttactcaccgggtttaccctatgccatactttcgattaggctggcattgctgtggattgttgaattagcgtaatggtatgtatatggaccgtctacatctggtagggcagatagtaacgctggttgactgggtccagacaggtatagatgtggatgccacaacagaatcaagacaagtaatcctcaacatctacacgcaaaacatttacaatacattcacaatacccaagatcaagtggcgcgggacggaagtgggcgctatgcgatgcaaacgacagacgacggatcctttgccttttgaacagcctcatatacacattcacaacacacaccctccttaacaacgtaagcagcaccaccctgcgcaatagtaatcgccgttgctgcaagttgtgcctgccaattcaaacttgctaccactatcgatggcagctccggtcttgctagatactcggcccagttctggagcgcgaccagtagatttgggccggatgagctctcacgctccttccggtcgtggctatgtttacagaagtgcttctcacctggcgaaggctgctcatggctgtcgggtattcgaaaaagaagagagctttgtaatgcctcaaggatgtctaggtctgccacccattcaccccgttcgtgcacacttacaacagactccagcatgtatatttcccagtcttgcgccccgcgcgccccgacatcaagagggacgttgtagccggtataggagagatgtaatgaagtattgtcgaagtagtcaacgtactctccatcccaagagtcatgattacacaaattccatgagtcgacagtgctttctcgaatccgaggtgcggccggtgggattagcagtgccattccaccacgtccgatgtttccggtgacatggtggatctcatgcgtagggggcttctcggcagggctacacaacataggcgcggcgatgaatagagaaccattgctagagattgccataacggaagtcagcttgcctggcgaaatgtcgtattgtcccgactcgaagagaattatacatgcgaatgcctactcacgcgtcgtggtgaaaggaattaaaaaagacccaacttgaagcccgatatgcctcatatcaaggacgtgtatgtcggcttcatctggagcctcagctaaatcgtcgtccatgtcaccggaagtatgggcgagatcagtcatgctcagctgggcctcaaattcaccctcctgctcagagatcttgaccttgtcggcgcctgcaaacgggtcatgtcgtgaccgggcaaatgatctgtaacttgcgttcgtcggtttcaacatgctcatcagcggatgatccaaggtctgagaactcgccagggtcgctgatgcttgcagcaggcatacggtcctgcgagcgatattcaatcgagaattgcacccaatgggtagacgataattggttttcaacacttttatatccacggtcgctcccggaaggattttgtagagatcaaccatggttgccacagccctaagagaggtgaggtatggcttccccatttgctgcagtcctttatcaagagcaattagcaggctaggcggctggggcttcgccgtcttgaagagctgaaccagctgagataactgaaaaggtgccaactcagggggcgatatagtgtcctgtgcataaaacagggctgcttcattttcgtctccaagccagaatgtgaagttattcgatctgccagcacagccagctgagtcccattgaaatgctgtttcccctgccaatttgaagttcctaataatctcgcagtcaagtggctggacttcttcctgtggaaacatccggctgcctgccttatttgggttatagtaatatcgaccatcaatattctcaataaactgcctttgcaaaaagcgctgagaggccattctcacccagcgtgtatggctcatggagtgaacgctttggtcgtggaagtgctgttgcgtactcgaaactggcagatgtggcagatgagtctggccgatatcgaatcactatgtccgcggattcaaaagcggtgttttgagcaatagtcctgagatagtgtatcctcccctcaacgtccgggggcaaccgcacaaagattccgggttcgctgagagcaaagaaggtccggtccggttttcctatgagtgcggtcttccttcgacccagattgagcagcctcgagtacacccggcgatccaggtcgtccgcgtagagatgctcgtgcgctgcctcggcaagaatagacagccaagacctgtgaaggtcaatagcagaaattgtcgggaatgctccagaatggctgccttgacctcttcatccaactcaataatccacttcaaagcagaggttgtttgtcgaggatcgactccccagccgcccagaacgcagccaaggataacttggcggaattgagcaagcgtcagtctggaaccctcaacgcgcgccagccgagttcgctggacagggtccccgtagtatcgaaggcgcgcaaatgggggagatcattgaatgcctgcgtcgtcattggcgttggtcctcgagaacccgacggtcagaataccgggaaccaggtcatcgtcttgccggaccatgggttacttcagcgtgaggacgtccatgtcggggtagagatgccacgcagatagccctaggaggacgttgacgctccgcaactcctgcgacgagccgctgaccagcagttcaatccctgccagagtgtccttccaaacctcaatgacactgtcgtatgtgctggagcgatttatcattc

SEQ ID NO: 4283 - DNA, 2517 bp, Emericella nidulans
attatacggatagtgaatggccggagggagttccagggcgccccagcttcaggtgggaaggcgaagccctcgaccgcagtgggttttgtcttgatgatgtcgagttggtaatgtacgactgggcagagataccttccatataaaactattatgattggccagccgagcagtagctgcacgtactcaatttcttcctctctggcagggtcataattattacagtgcagcatggtgtcgtaagaaaccatattatagtcccttagtctcagtcattgtagcaagtatataacagcacatgccaccagcagaaatccatatccgttactatttcgcttttttcatagatagtttaagcttgtcgcagccagccacctaccttggtcagcacaatttcgtacagcgtattgagggaaaagtgagttaaatcatgagttccttgtctcaggtagctgtgggcgaaacgtgcagaatatctcacttaggagtttgagtattccaaagggggtgcattcagcagatgagaagactagggccagaaggctggcaacaagggatccctcgtctggatgctttaacgaaaggacacattgagacactagattatagcctacctcccaagatactaaagctaatagacatgattgacactagggagcccaaaggactattctgagttcatgcatcgctcatgtatcgcggcagcggcaaaaatatagggtcgcggctcaacttcgacattggccttggtattatacttgagctatcccccagctcttttctcgaaggctcactaagagatgatttagtctaacttttatcaatgctactatgactatgggacatcctcaccgatacccagggacataggagcacaaatcattgtatacagagtatatgctgaaaggacttgggctatgacgaaaactgcattgtgaaaacaaacataattcatgctaaccactgcagctgaaactctacattatccgaccaggcaaagaccagcgtcaacatacctaaatttctttgaatgtcgactgcaggtccctaccgcgaccagattgcttctatcagcgctcacccatgttctggccgtttactcaaagccagcagacctagttctttccctacagcaaagtggaccgcaattagatcctctctcctgtacccatcagctgtgctcttttacaatttgtccatcttcagtaattttttgtgacactcgtctctatgaaagccgcggtcacttcaaagcgcgcgtttagcgtaccgcggcttggcctgccactcgccattcttgtcctttacaagatcattaacgtcggagcactctcggctcctcgataagatcgtcaaaggctgaggcatctgtagagccctggagaatctgcattgtgctcttcagatatttgtcttgcaacctttcttagaccaaccttgatgttttagggcgtgaatattactgcgtggtagaccttttactccaaaatcaccatacaacatgatggctagttatcaagatataaacgcacttatctataaagtaattataaatagcttttattttctctggtgtaaggcacaatggacaaccatgccttaataaggggcctgggtatgatacaagggagctgcaagcggtagccttgtgccaagagccgggcatcgaaaagggaaaaatgaaatcttacgtcacatgacacgtgatcggtctcatttcgacaaacagtcgcgtaacctcgtgttcgttcatttcttgagtcacatcctctgaccttgttcattatcttcgactatgcgcgcatacccttcatgctgcgagaaacaatagcccataatgtcgtcccggacgcgccccggccgccttgcatcgcgcggaactccccgtagtcgccgatcgaaacaagccgaagacgaaataccagaggtctaccgggagatgctagcggaggctgaagcgcaggaaataagccagtcagagaatgaacgaccggctaaaagattcaagccggcaggatacagggctcggactgcccaagctttcaaggcgcaagtcctacaacaggatacaaaccccatggatgccgaagaggatgcggtcaagcaaccgcagattgtatataattcaccatcagagtcagatgaatcagatatggagtgggaggaagtcgatatacaacagcctactatttcaggtccaacctcgtccgtgacggatgaagcaccgcttcaaattacccttgagcaggaccacaatcggaagcgaagggttgtccggcgcaaaccagtaactgcggcagagaagaaactccgacttgatgtccataagatgcatctgctctgtctaatgtgccatgttcaacgtcgtaatttatggtgcaatgacgaggaagtacaggtgcgttgcatcctatcctcatctgaaccttctaagtgtattgtagggatctcttagaaaaatactatcgaagcatataaggtcgcagttgaatccacaagaggaaaagccgcagcatacta

SEQ ID NO: 4284 - DNA, 2316 bp, Emericella nidulans
tccgcattgagagttccaggtcccccagtacggctgactccggcaaacatgtgactagacatcaagctggaactttctgccacttttctcaatcgcgcagtggtatgcaattgctgaagcattcaggttcccgggcatgcatgtatcctggaaagttgagcccggcgtcacatagtcgagcttgatcatgtcgacgcctcaggatacccagagagtgatcagctcgcggtacagctgtgtgtttgggttctcatagtcgaaatagcagttagtattcttgtcgacatggtcgatgaacgccgaccccacggtgacgttggtaccgtggacgagctttgcacggcgtgcctggctggctgtacaatcccatacggagccctttgccatggagatacctactcaaagcggatatatcgaagaggctcgcgttgtatgtgatacaaccaaacttgtctgttatagagctgtatcacccgccatccaggctgcacaagtcataccctgcgtcctgagtggcgggatcagtgagcatggtgcattgcgaaataatgaacttctggtttaataccctacccagctcttcctttgggtagctgggtattgtgtttggcgttgcctggatgccccaggagttccagccacgagcagaatgaaggaagctatggagagacttggatgttggaagactgttaggggcccgctggtggtgtttgtggcatacggcgagcaagctccatcggtcagttgggcggcggcagcgccaataccaatgatggtagtgagaaaacaggatgagcaatataatgattatattttgccggcttgtaagaggcactgggatgtgttctgaatggctatctctccagggtttgaacttttcaagctccattgccaacctggggatgaaacaggaacctagggtattgatggatcgacgggctgcggagaatcaagcgtgcaattggtggcattccgctcatgcaaatttgcaagtttgctgaaattttgcaaaaatacaagacagtatgtaagttacggagccctaagactcttccccgtcgaaccaaatccctctggcattgtcaaggcgcctgacaagcctcgaatcggctttggttctcttttgacgattgtcggcttgaattaaagtcttgtcaagtgtacatcatcagagcagcattacccaactgcagaataagctatggttaaccgtcagtgaggtactttctggcgcagatgtcgccttgactgtgaccagctgtactctaagcgaaccctaccaactttgctggaatgctttgaagggctacaacgtcttgcgaatcaagaacccaaagctccgccgtggctgtggcgggcggctaaatcgcaggggatcggttgggagaatctgatgctcggcgtagctgtacaggatctttacaaggcattctgattcccaaatccatgctaacaggccatttctctctattgaaatgtacatacccatgtcagagcttctggtcctggattgtctgggcttgtttagtctattgaggcagtaagagcagtaatatccagacggagaaaacggagacggcggatacggtttgggcctcgattcaagttaatgtgatataagatgtaatctaagtaactggatatagacctgaagtgcaggttctatcactacttacaaagatgttttcaagttgctagaatgcggtcgagtgaatgggcgacctcagtaagatcattatccactgcaaacaaacagcatatccagaacaaatttggcaaaatgacactccgctggattaggttccaaaggttaataaagatgtggctcagaagtcacggcaaggctacgtgaatgtcgagttccgcatttctcttcctcaatctggatttgttgtcatgagctctaggcgtgcgggttcggacactggagataacgcattgtacaatttctcaaccttttctcgcacactgatctagggttatggttgtcgtggtagctaaagttctataattaatgtgtggattgtggtaaacatccagtattgaaggcagatttctctccagggagcaggattcatgagaccaatgtcgtgagagaagcatgcttattcactatttattcaactattcaatctgtttggtgaagagagcgagatttctgtgtacgatgatggaggataggtctagcaagggctgacgaggtctatgaaattaggcgtcaaagcggactcaaggctgattcgaccttcgataccacatgtatagcacctacgcctagcatgccatctgaactacaagggcttattgaggaggtcc

SEQ ID NO: 4285 - DNA, 3467 bp, Emericella nidulans
aacaagccctgtgctttctgaacaaattctccaattccgaatctgaagtgcacaagcgttactaccccacccaggcgggggatgctagattgagcatcgtccgagcgtagttagtgaactcgtgtctgagactaggcaggggcatttcaagaccgtgggagcgcgactgaacctgagacaaggttacattccgatgctgacaggcccgatcccccgtctgcccttgccagctcaggcccttgcttggaatacggtacggtaagaaatattaatacgaatgcccgctcagcaacgtcccctcctcacggatcatccgatccatcatcttccgtcacacaatcatccccagaccaaaaaagaatgcgctggggaactctgcggtccctcgctgggtccgctttggcggtcctgcttctcgggcagctagtcgttgcggatattcccatcgaggtctcctccactggtataccccatcccaactcctacctagctcctacccagctctacccagctctacccagctctacccagctccacccagctcttacccagctcttacccagctcctactatcgcgttgcgtccacagtgttgcctcccgatcttgttagttgcgcattcaatgagctcgattaaacggaatacattgggaagactattctgactggaaactagagtctctgaaacaggccggcaaggagatcgccgctccgatgatgacgttctatgcccagaaccagacagaggggatcccagggaagctcaccgatacgtggtacgtggcgggtgctatgttcatgacgttgatccagtactggcaagcgtcgggcgacgaccagtataattccatcgtatcgcatgacctgatgttccaggccggccggaactacgacttcttcgattcgaactacagccggtggctcgtgcgtgactctttcttctaaaagcatggattttttcttttatatcttgcatggttgagtcgagcaccgtacttactgtgtgacaggggaacgacgaccagatgttctggggtctagcagccattaccgcttcggagaccgggttccctgagatcgagaacaagccgacttggacgacgctggctcgcgcggtctttaacatgcaggcgaaccgctgggatatgagcgcctgtaatggaggtattaactggcagatccatgcatggcagaaagggaacaagctgcgcaactccatctccaacggcggtctcttccagctcgcagcccggctgggccggtttaccgagaactcgacctattttgagtttgctgagaagatctgggactggtcggtggattcgccgttgatcacaccggaccaggactggttcgtggccgattcgacaaccggccagagcaattgcacggaaagcggaaatatgcagtggagctataactacggctcgtatctcgcgggctgcgctttcatgtacaatgccgtaagtattctctttctcccgtgaccactcccatcgactccgccgccgctgtcaatccactggattccagctaacaaggctcggcagaccggcgacgaaaagtggctcagagcaccaccggtcttcttgcacgcctcgaaacgaccttcttccccgccgagtacgaccacagtgtcatgtccgaagtgtcctgcgagaaactccatacctgcgatcgcaacatgctctgcttcaagggctggaccgctatgtggatggcacttacagcaaatctcgtcccacagacacgggcgaccatcgttccaaagctccagggatcggccgcagccatcggccgccaatgcgacggagaaagcgagaacctgtgcgggagccgctggtatcaggacacctgggacgggatcaaggggctggaggtgcagatggctgctctcggcggcatcacgtccaacttgatgctcatgactgaagccacagcgaagacaatcaataccaaccccgatgccaaagagcagcaccttgagacacacgatgatgatccggctatcttgcgcactattaccacgggcgaccgcgtgggctcgtggatcctgaccgctgcctggagtatagggatattatccgcggcgtggtggttggttaggcaggattgactcttctctcgatgaagctcagcgctcacacgcgggcgcgcacacactagctcgacttttgtcacgggagcgatgatggtcctgctacatctgtttcttttatctgagggtctgatggcagtcgacgtagccgcgggttacttgccggctctgatagatggtgtgacgggaagaatggccgatcccatgttgtatcaaaatgagcgaatgtagtgaatctaccgcttgactgcgactgggcgatggacgcaagtcggatccgcgaagaagacgatggtccaaatatagccagacaagggcagagaaaatgaatgggcaactgcgagtgctgggagttccgatgcagtggacgtgttgggaggatatcatgaagtgtgcaaatggtcgaggcaagaagcaagttggtgggtatgtggataagtgaggagctgtccgccaagtatcgccagctgtggctgaagagtcagctggaaaggcgtcgtcgagttagttggaacgaagggcatggtgaaaaggtgaagactggtatggtcccagatgtaccggcttgggcatgtgtgctgctatcacgtgtgaccaaggtggctcacaccctttctgagaacggtggcactacaggccagtgaagcaatggaagcagtttatgtatcatgggagaccgtatacagcgaagcgaatccgaagattcaggctgtggaaggcaatgtcaggcacgagttgccagcccaaagtgcgaaatataaggcgtggtaagatgctctgtccccaagaaaaggttcagacgcctcgttcaggccggcgaggtatggtggctcagagccacgaccggcctccagtattgcattgaaccggtgagagctatcacagtaatgactccacctgcggtgctggatacattacggactaatacggattcagctgcaaaaggcttactgaaaatgcaccaataagtcgctgacttgaccgctgcggcactgtattcttggagatgctgttaatgagaaagttattcatatgccaatcctgccatgtccccccagtcgaatgcacccaggaaaggatcaaaatcaccaggcgcctagcgctgttagtaatggtaacagtagcagcaaatgatctcgggagagctcactaataggccaaaatcccccgtcattggcacactgatctcagaagcaaattgctgcggtacatcttgaatgctgttcaggcttgggacctaagaggaacgaaacaatgtcagccctctgcctgtgcctggtgaaatggaaatatacacacctgattggttttgaaactccccattcccaattctcccagatgggcgcaattggcgtgccgtgtaaagagag

SEQ ID NO: 4286 - DNA, 3577 bp, Emericella nidulans
ggggtcagaggggtcttttataactttccatggccacaatccagacactatggaaatgagctggtctataaccaaatgctgacgttaattccttgcggtccgatttcccatgggcatccgccctagaacccttatcagttgccgcatcgggatcaccacgctaaccgtatcgggtaatatgtgacggcgccgctgtcaaaattgttcacaggccactgattcatgagccgtgtggcccatgagaactggactagttagcggatctctctttttggttgtagtctgctttcactttcacgaatgcaactcaacttgatacggcttctccatgctaattgggggtatatcatgcatctgacacgcatcggtgcgcccacaatggcaagagctcaggttgtagatgtagttgtatcacgtatcacagcttcccactctgattcagtcaggtcagccttgtccgcgtcacccgggtggactctatcattatgaacagcagcccaaagtggaaggtgaacgccaagaaaggtagaagaatttctagtctggtcgattttgtaggtggaccgcccgaactttccgctgccaggactcgtcctctactcggaagatctcgccaaaacaagtagtatgccgccaatagacgaccccgatatggaaatatatgaaggtgtgaggtcacgacctctccctgaggtctgagtatgcaaagtccttccgtggttcgtatcaactgaaacagggaattctgaaatgtttctggccgctatcgtaggaaaattctgcaggatacctggttctgtccatgggtctaatgcagaaatatatatctcgcttggtcgttgcatgacggcccaggcactggcggggtaataccgatttggcgtaaatattctcctatactatatataagcaccaatagtagccttggctctaatgtggtacgattgaatgcccctcccactcatgacccatccacagacggctggagtccctgttgaggctaggacttaaactacagagtgctataatgctctgagttgatgcctgatgcaggccggtgtcggagccaggcattctgatgtttatcacgtggcgataagataagccgcaagcggactagcgcggggcagatcgacgatcttcagaagaaatggtgtgaattttgcagcagcagacgacgagcagcttagctcattctcctttgctgaatcctcagtcggagctcgctcctcgaggagtctcacttgtcggttctaccagaggtcttaattggtcctcgtattgattcctctcgataaccctgacgactcgctccagaccgagtcgccctccgttcgcctctgttgagtcacgcacgaccggtctcacgatggcttctcccttcgactcggcagacttcgccctcccgggctcgattgcatactcgcgttctcgcggcagggctatcgctgcctctattggggcgcaggatgtccgtggccagtgggttcattatgtccacactgctgaacgtctacccgaattccagcaggacgtcctccaacagcttctcagctacggcgatatcaccgatattccaccctcgtttaccgcggaagatggcgaattcgatgtcttttatgtcttccctcgaaccgggactatctccccgtggagctcgcaagccaccggtatcgctcatgtctgcggcttgaggaaatacgtgaaacgcattgagcgcggtatcaagatctcttgtctgcggcccgcgtctggagaatacaagcctggtttcaaggacgtccttcacgaccgtatgacgcagttgatcagcgagactgagcccgacctgcacctgatgttctccgagcacagtcccttgcctctcgagactatcccgcttagcggtagtgataagtcgcctaaggaggttttgcaggaggcgaacaagcggatgggactggcgttggaggaatccgagattgaataccttgccgccgcctacgggcctgacggcccgctcgctcgtgatccgactgacgttgagctattcatgtttgcccaggttaactcggaacactgccgtcacaaacagttcaacgcctcctggacgattgacgggatggagatgccaaacagtctcttctccatgatccgaaacactcacaggaagaaccctgaattcaccgtgagcgcatacagcgacaacgccgccgtcctgcaagggttcgactcctccttttgggcccccgattctgttactggggagtggaaccacaccaaggagattgtccacttcctcgccaaggtggagactcacaaccaccccaccgcggtctcgccctaccctggcgctgccactggttctggaggtgagatccgtgacgaaggcgctgtcggacgcggttccaaacccaaggccggtcttgctggctactgtgtgtctgacctcctcatcccgggcttgaaacagccctgggaattggatatcggcaagcccaaccacatcgccagcgcgttggacattatgctggaggcacgattggaagtgcggctttcacaacgagttcggtcggccttgtattacgggttacttccgtactctgttgacggagattgatattggggacggagagaaggaggtccgtggataccataagcctatcatgattgccggtggtgttggcacagtccggcctcagcatgcgatcaagaagccagatgccgtcaagcccggctcgtatcttgttgttcttggtggccctgctatgctcattggtctgggtggcggtgcggcttctagtatcacctctggtgaaggctctgttgacctcgactttgccagcgtgcaaagaggcaatgccgaagtgcaacgcagagcacaggaagtaatcaacgcatgcacagcaatgggcgacaacaaccccatcaagttcattcacgacgtcggtgctggtggtctctccaacgccctgcccgaattgatccacgactccggattgggcgctaagttcgagctccgtgaaatcgacagcgccgaccgaagcatgagccccatgcagatctggtgctgtgaggcacaggaacgatatgtcatggctgttggcgaggagggtatgaacaagttcacggctatttgccatcgtgagcgttgcggtttctctgtcgttggtcgtggagagggtggttcagaggaggagaagagattgatccttctcgaccgagagtcgaaggagcacccaaccgtcatcgacctacccctgtcagtgcttttcggaaagcccccaagaatgacccgcacggtggactctcggaagttgaagctgcctgcagtagatacgagtcttaccacatacctcccctcgctggcgcctaaccgcgcggagcttattggcgaagctgccaacagggttctgtcgcttcctgccgttggctccaaatctttcctcatcaccatcggtgaccgtacagttggtggtctcactgcacgcgaccagatggtcgggcgatggcaaactcccgtatctgacgttgctgtcacgcgacacgtcttgttcagggtgcgaagactggtgaggctatggccatgggtgagaac

SEQ ID NO: 4287 - DNA, 2845 bp, Emericella nidulans
  unsure (1)..(2845): unsure at all n locations
cgctccgtcggctccgtattttgatttcgccttattcctgcattcttgccaagcttccgtttagttgccgggcgccggcgtgatgtaagaatggctggtggtcatttacgaagttaaccggccacggtccatgtgtccgctttttgtcctatttttcaccctaccaaccgctttgtcttcgctgttcccccacttcagttcatattccccgcttcataatctatcttcttgaatctatgcactattcgtgtaaataacgtccttttcggcgagttgtattcttgtatactccttcaggaaccgaggcaagaatggtggctttgctaatttcggacggatctggcggcagcgacattttgggactaggttgtgatagccaataatgatagctttttcagatcaaaaagcatacacagcgcaggaatccaagttattgaggtctccttagagctggagttggtgagcaatagagattatacacgtgacatatgcggaacatagttgaaccgacagcgcgatgatatgacgaggctggtcctgtgatcctcctccaacttatgcaaagctgacctgcgcttcctcttgaccgagctggttcacttgagctttgacttctcaatgtcaatggaaaccaggagcatcggatgctgaacttaccccctgcgagagctgtttctcccttcgatggcagctgcggggtaccggttgaactaagcagcatctccaattgagtgagcaacgatggatggccggaaaaaaaagagaaaggtcctcttgatgggcaagagtggctcagggaaatcatctatgcggtcgatcatatttagcaattatgttgccaaagacgtacggcggttaggtgcgacgattgatgttgagcatagccatgtcaagttcatggggaacctgactttgaatctctgggattgtggagggtgagtctagcttgccatgatgatcagctgtctctaatcgtatacggcctgctaattcagtttctgcgcagacaagatgctttcatggagacctacctcgcctcgcaacgagggaacatcttctccgacgttgcagtcctaatatacgtcttcgacattgaatcgcgtgaggtcgaacgcgatctcgacacatacatggctattattgccgcattaagagaatacagcccccacgcctacgttttctgccttgtccacaagctcgacctcattcaagccgagcaccgccaacgcatctatgaggagcgctccgcgctcatccgcagccgcacagaacacttcacgatcgacaccttcgggagcagcatctgggaccagtccttgtacaaggcctgggcgggcatagtccacaaactcattccgaatcttagcgttattgaacgattcctgcacgcttttgccaagcgtattgatgctgaggaagtcatcctctttgagcgctctactttcctaacagtgacatctgtctcctctgaaatcggcgatttaaatccgatctatgaccgacatgaacgattatcaaatatcatgaaggcgttcaagcactgcgctgctcggaatacacacacgactccggcttcggcaggcttcgttgtcatgcataccaaaacacctcagtttaatgtcttcctcggccgcttcactgacaatacgtacatctttatcgttgtgccaccaggcgaggcagcatacaattgtgccgtgctgaacaccatgctcgcaagagagggcttttctaaagccgcaggtgctgtccacggtgatggcttcccgcttcctgcacccgactccccagatgagtcaaatagcaactaaccagacaccctgccaaatcagaagcctaagaataccgattcctattacaaacagggtatattacctctcttgcgaccagttcaggaaacccaaacaagccttccactgcctccccgttgaataccaattatgctagcgactatcttgtgatacccaacccagtcttacccagtacgatggacatatgtatcgttacactgtgcaacatgcccagcatcaacagaagaataaaacccgagtcaaatagataatgcaagaggcgtcctgtcataactcaagttcatctacgtggatctgtggcgtcgacggtgccaccgacatccgcgacgtcatactttccagcctgactcctagaagcaaatggccggtatagggatgattgaatccaggcaaataactgcctacctgcctgcagacgctaccatgtttgaaccactaggtctatcgttttctttgttttgccgcccaaatcattagtgccggtaggcggtatacatttgtatgacttcaaagatgatatgccaaagcatcaagcactaccttataacgcattgcagcaatagtccaaccgaatgaagctgctttacttaagcccacaggcaagacactgatatatcatgcttggtgccggggtgcactttcgtagggggtgcagcaatgagtcggaaatcattgctagaaggtattaatagaaaaccagtagaaagcaacgagtacaaaaaaaaaaaaaattaaaaggtatggtccatctatttcaattccagctcaactactgtatgtataacgcgtgaagtgatgtaggtagaaggtaaaataaaggaaagagaaaaggaagttttacatcattgtacatccggcattcggacagcaatatcccccgactgcgtgatgtaccggacccaaggcagagatggatattgtaactatagtagacgcancgatcagcaacggttaaaacataagttaccaagcaggatgaaataataataaaagagccaaggaaaatgaagctgagctgacaaaccttcggctct

SEQ ID NO: 4288 - DNA, 4175 bp, Emericella nidulans
gtgtccgcaattacaccctcactaaagggatctcttcctccccggaccagtccttgcgagtgcaaagatctcacgccatattctgaaagaaatcttctcctcggacatctggtacgtctatgaatgtggccagttgacggaaacggaggcctgcggggtgctctcgaccagatactcgctcgatgtggccgacctcgctgatatactgcaaacccgggtccgaacaagaatcatatcccaggtccagggagagagcgcgcgaaacaaagaacaagggcagaggcaaggccatgagcatgagctcctcatcaacaatctgcagcctctcaaattcaaagcaaaagcggacaggaaagggcctctgctctgtggcatgctgaatatcccccaaccagaatacgcaaccatccaggacagcatctcggaatgggccctattcgaccacgtcttcgtctcgtgccaggtcggcatgcgcaagccagacctgtgtttctaccgacatgtgctgcgcgaactggggctgtccgactcgcttgaaagagcgctctttgtcgagacaaatcctgagaatatcctccctgcgagatcggtcgggagccatgtaatcctgcacatggacacgaatgcgactctgcgctcactgcagaacatattgtgtgatccagttgcgcgtgggaaagaatttctccgcgtcaatgcgaaacgcctgcatagcgttacgagcactggggtggtgatccgggataacttcacgcagttgctggtgctagaggctaccggggatcggtttgtctgcccactttgtggctgatagaggtaaagagactgacctggatcgtctacccagtgagctcgtctacctcgaagaacacgcgcggtcatggaacttcttcataggtgcagtccctccctgtcaaaggtgcctcttcatatcccactaacaactgaattgctattgataggaagccctctgctcacaactcgcgcttaccccgacgacttcgacacaacggcccttgcattgacagtcttggagccttcagacgtctcgatcgtgcagtccgtgctagacgagatagccagccatctcagtgccgacgggataatcctggtacgtccgtgtcagtcggagcacaaacacgaaacgcacacacacacacacacacacacacacacacacacacacacacacacaaaaacagaaaagaaatgcaggctgatgaacctggacagacctacttcgacacaacccgcccacgcgttgacccggtcgtctgcgtcaacgtcctcgccctcttctacaagtatgggcgcggccacgaactacatactactctgtcctgggtccgcgacgtccttagacaccgcgcatacttaaacgggacacggtattatgcgatacctgaggcattcctctactttcttgcccgtttactcgagaatacaagtacaaatggagcaggactccccatgcatgatgagttcgtttgtctccttcgtgaacgagttgtcgagcgcgtcggactgcccggggatgctcttgcgcttgcgatgcgtctccttgcggcgagatacgtgggtatcgcagatgtgattgacgaagagagacttcgcgagatgcagtgtgaggacggcgggtggaaggttgggtgggtgtatcgatatgggaagacgaatttgcggattgggaacagggggttggcgaccgcgttggccgttagagcgctgtcagatcagtgagactagggcaaagaccgatggaatcaagtactggatgtcaacataatgtattgagaagggtgaatacagattggccctattagtattacttcgccgcgtgacgtgctcgcgtatctagaatagatcaacagttcgagtctgatcaagaacaatgagaggactagtccggtgtctgagagctctcctccccaatgcaacaagaaatactgctggtaagaagagtcgaatgctttattgtcgctgtacttggcctctgtgtctgaacagtgtatgccttccaacgggtaccttagtcgagctggcaatccgcagggtgcttattgaaggagaatgtattgtccaggaggatctccccacgacgccctcattttcttaatgggtagcatccctctttgcaccgccagtagttcgagtggctacactgtcagccagaatctcgatgctcaagcgggacggtgctaaattcggccaatcttccgcactcttggtgtcgtcagcaccggatactacgctgatgtctctttagtccgttgagcgttcccgtgcccgtgacccttgattaaggggcccttgttcagttgataggtgcttgaatggttggtcatagtgtaataaacaaaagcttgtgcttcttgagtcgcataatgtagactgtcaggcctaaatggtagatctaggcaaatctgcattgaatccactcaatccgtaataaaggggatatttggcgctcagccgaccctgcaggtagttggaaggattcggcgcttcgcaacaggtctaatgtcacgcaagaaaacattccaaacggcctaaacagaagacatgttcgaatttgtcctagatagctacagcgtcagtcaatgtgtgagccctcgatacagcgctaaatatagacggttaagtcggcgctgattgaagtctcacatcgccatggactttagtaggtttctaggcagggtttgtaacgccgtttccatgagaatatcaacaatacgccgtgggagattaaagggggcttcagtttgaagggttagtagtccaaacaaaccgtatgacggcgttagtcacctaaactcatcattgactcgtcaaaaatgtcagcgcttccggcttgcacagacggatagacctcgtacaataacagccaggacttggacccggagacgagcgctgagagagcgctaagtgtagggtagaagatagcatactatatggactcgaatctcgcgtggactgaaatgtgggtttttgttggctgtaaagaagcgccagcgataaatttactcgtctcattggaaatagaatgagatgagaaaccaagggtctcttctgtctccgcggactccacaacggaaagggcagaaccgatatcaaaccaaacgatcttctaagagtgaagcccaggtcagttgtctcgacgaacctgcaacatccttgaccttgtcattcatgacaatcgtcaataggcgtctgacagtgtctctgctccagcggtacggatctcgagtacgtcctaacgctacaattggacagcgaagctgcaagacactttagtccagcggatctcagaacattggaagctaatgacttcagtacctgggcgatcctgaccctggactctctctgtgggtgtaccacggtttggccgtatgtaggcggctaccagatagcacagcgaatggatcccagccaacagacggacagcgggcaagcgcgcgccagaatcggacaagagcagtgttgctgaagcgcggaggcgtgcagttaagtccatcgcccatggaaacgagatggggtcaaatggctgaacaggcggggattcgctggggcccctgttgggttttcttcaggtgccgcgcgcgattctgcagacaggcagctcgagctggcccaggaaggagactctggaggcgtgtttcaggatagaatcactggcggcagagaagcagagagagcataaaaggagaaagtttcttcaggatgatggggtttacattcgcttcatcgtgatattcgtcttttgtgtttgcattctctccaggggttgaacccgtttttccgtcccttttttggattcaagcgccgagtcgacctcccgctttccagccaacattccaatccagccaggtagctggataaaggggcagatccagtaaggccggatcgcttctttctaaatcccaccgtctctggctggctaagacttcatcatacaaattcatcgtacaactctctgctctgtgtgttctattttcgacgggtcttggcagctaaccgaattcggactagagcctggtgctgtattgataccgtcttcaagcgatctgtatctgtaatttacgaccatcgcacgaaatcaacgctcctccatctgctcttatacaaccttttgtcctcttcaatattgtgggctatccatattactatctttagcc

SEQ ID NO: 4289 - DNA, 1580 bp, Emericella nidulans
caaacacatcccttcatgacacacactcttcggtttaacgaattgttggctgtggctcccaatgatttgcatcgacggctgtaaggatcgctgaacgttgtaccctattatttctctgtaactggtcttctcaatctcatcctaactctgcagctacttggttgcctgtggagatactgccagtggtgattcgcggtgggtacaagattatggtgaagagacatcctaggatccgagccaagcaattagctttggacaagcatccagacttgattaatatatcagagggactgggagtcagataccagatgatatgaagttggactgtccaatacggcttcgtattctggacgcaacgctgcgatactggataaattcgtgctggaggactctagtaggaaacgggaatggtctgataatatcttaagcttctaaagaaggaccttggatcgcaacagcattccattcaatcactagattcaagcagagatggggttgcaatgcagtgcagtggtgggaatggaatgggatcagtagggacgaaatggcaagcaatcctcctcgactatataagccctagccatgattataatctccccccaaccccaccccccttacggtgtgggaatccccgatcaaccgtctgatccatactcccttctctatttccaacggcagcataaagcgcctcctcaagagagatcaaaagccctgtaaccttctcatcggacggcggcatcagctgcgtaaacagcgctgctgctatacctgatttgcggtcgatccacttccatcatttgacggacgttagcaaaaaaacatcataagtatccaggcaagagaaaagagaggaccaacccaatggcaattcggcaaacccgcccagcccacactgcccttagccctacggccagggatgtcttgcattgctacgagaccggcaagggaatggtcgatttctatgcttacttccggttgttctaccggttgttttactgtgctatacctggcgtcgactccgaccccgaaaatcctcttcatctgcctgcccaggccggctggaagcgcaatccctgccttgggatattcagagaataactgcggcgctaagaggagatccgtactgtcttttcctctggcgaatagacggtcaccatcacggaggagagatgccaaaagcgatgcaaaatcggcgggcgtgctgaagaggccgattccgccgagatcgtgggagagcggatacgtgagaatgatggggcctgcctgcaagaatggtattggcttcaatacggggttgggagtggtgaatgaggaattggtcgctttgctgttgcggttgctggggctgggggtggtgcggtaggccatttccaggagcggaggcggcgtcttatcctggggttgttgattaggatgcagaaacgatgtgcatgatgcgtcgagtctagagaagatattatcttctatgtatgttgacagtcggacccctgttacgcgctcaatcttgagtagaccctgttaggatttgacagataaagatagggctacaatccctacgagggcaggagaaagaaggggct

SEQ ID NO: 4290 - DNA, 4724 bp, Emericella nidulans
tcaacagatatttgaacataatcaaattaccgctgagcaccttactatgacaaataaaataattagtcaaatcagggctgcccaagctcccctacagcaccaaccaactaaataacatgttaagctactcagtcaggatggcatactaaaagtgtgtaatgcaaattgatcaattgcagctaataaggaggctgttgcagaggagaaggggttacaaagacagtggaagaaggtgcatgataagaaaccaccaccagcatctatacaggagaataaggtatcaaatgaattgttaaaggcagcagaggagaatagtgaggtttttttcttagatagccaggcaatacgttgagaatagcttcaaatatagaaaattggcaattacgctgtggttggaaattacggtgtggctcacccacagcgggaagcggtgtgggtgggctggaagtcacggatactagtccaccacctcattcaagactttgtgcctgctaacgaaaaggaaagtaatgaaaaaaatcatgataaaaagtcatagagcacatttgatcggagtgcacatgaccattctgggtttgaccactcgcggaaacaggaatacaaaaagtgaccaatgcattactccaatgactctatgtataatgaagcagatccagtcccgaagctaacgctagcaaaaccaaacagagaaatagaaccagaatgatagatatggatgtccctatacagcccttttccggtccgcccatgcccaagaataacagtgtacaataccccccttcgtgtttgaaccttcttggaaacagcgcctgagaaatgccatattgaatgcaacgaaaaagtaatcatgaacgaccgcatgaaagagacatggaaaaatttcatcgcaaaaaattgttgtgtggtgcaagggagtatggtgattcataaagtcgtggagaagatctatgaccagttgttggaattcgagaatatccttgggccgaagaacttcatggaccgaaggcgaacagagcgaattgtgagatcagatatgcggccagtgggtcaggcgacgcccaacagagacgccacctaagaggtcgcaggtgacggaagagttggcgatggaaagagagaataggatgtcgtgcgacctttcttcctcagcgcgcttttcgaaggaagctgaggcctcatggtgttgttcactgtgggagcagcctccacttcggaggtagactttgcgcggtcgtggggatagataccagtcagcttgatgggctcgtggctgacgttgccatccggccgagacatgatttgcgtctcgatttcgcgtgctaggctgttagtctgacggtggctggatgagcgaaaggaatcgtgcccaagctcggcctgctcaccagaaagccccgggtccgaagaggaaaagcccaggctacttgcaaggctatcgaccaactcaggtacactcgtggtcgagacaaatgaccgatgcttccacacgatcgaagctgcacgggataggatcaagctctcctgagagctatatttgctaatgggtgagaagctgctccaagagtatcgggctggtctatagcttgaaatcctctttgtgagtactaacaaaagggtcgatctgattgtccagcgccagcgaaaaagtcctcgtcaagcgtgtccgaagagatgtgtttactcagagctcctgacaacgccgaagaactaactggttggaaaaacgtccccatccttctcaccttcacagccggcacttgacggcgttatggccaggcgcgagcttggcactgactgcgaagagctaggatctaagtcgggagtcgacacaaacggcgtgctgaggtatcttgggttggccgaagagacggacgtattcggtgacaaagcagccgaactggaagtggtaatactgaccccgacattatctcctcgcgataattcaaaggaagagcgggcccagtcgaaatcggaatttgactcagctgcgtgttcatagcagtagtcgatatcgtcatcccaggactcgtaaatcgtttcgtggatagttttatgaacagaggactgtcttcggagtgtcgactgagtgcgttggtcgtcgaccgaggtggtctctcggtctgcaagatactgaggaagagtaggggaacccagtgcctcagtgaacttcttcgagagctccttcgccacgtcgatggacaagcgagattttggggctacaatggctttgggtgaaacctgacttccaagagacgctgggtattctgaatgccgagactcggggctatcatgccaatgcgttgcctcatcttcctcaggaacatcgtccaactcggaagtcgggctcgccattgctgaagtagatcttacttcgataccgtcactgtccaggccagcggtaatagcatggcctatgttcggatgcatcatagcctcaacgtggtgactcattggagaagtgctgtgtaccaagtcgtcatccgcgtcgaaggcatgccccgggtgctgttgccgagagtccaagtctaggatttcatcgattactcgaggcgaaggctctgggatttcaggagaagaagccaatctaggcgaagaagcacgcggtggtgaggatgcaacatctccccgctgatgccttgctacgggccgcgagaaattctcgaaaacccgggactctcgcagaggccggtactctaatacttgagggctgatagattttgcacccggggagcgcggtgggctagcaggggattggccattattgtcgtgctgggggaggcattgagagagatcctccgttgaagggcttcgcatatggatatcctctgctcggatacccttcaaatttgcgacaggcttttgagaagccctgatggcggaaaattccgtcaccaattcattctcacgggttttgcccaacgcctcgaactgggccggactggtgtgagtcaagtgatggaagtcgaaaggatccgaaatcatgcgcttcatgtgctcatctatatgatgccaataagagaccggttattccaaggcacaattgcttctctcgcgaggttcctggggtttgggggagacacttacggttgtcgttcgaccgggatttgcggcgaccaaagtcaaagcgggacttatcgcgctccgcatcatcttcttcatttaaagatccaaccatgttgaccttgctcccttgacggcgcagaatgcggcttccacgtaaaaagagtgacttggttgcactttcatgccggtcgtgacgcactccagttgtagagggcgtccggtcctcgggtgccaagggcaatgggccgttctcgttggaagtcattgatgaggcctgtgagcgacgagaagatgtaacagagggagtggatgttgtggtattgcttcgagaacggccactgaagacggacaatcttttagggctctgggtgtgagcagtcgaccttgaccgcatatgaactgaatgttcgggcgtgtcactggatgctccggtcgaaggacggtcgagatcctgcgccatttggcgaggggctgaaacagagaagtgagggttcaatggcatggtggaacaacgtcggtaccacgcagcacgcacacgaagtccgaacggacagggacaacttgaatgttttcttgagagctgggaggattcttgtgggcatgggtgatttttaataaggacgtttactgtcttgtatgaggtttgaccgtcccttgtcctggaccattgtttgagggatcaatgagacatttgaatttgctaggctgtacttaagtttagtttgtagtatggcttatgagtatatgcttcttttatattttttttcaagatcgttatatttatttggtcttttgtaagtttgttagtttcgcttctatctttatactctctctcttttgtgttgcgttgtacttcttttattattacacaattcttattttgtttttatcgttttcatatcttcttgcttcttttcgttggaattagtttttttttactttttccttggttttggttatgtatttcttattttattttatttttaattattcttatattattttcttctttccaatggtaatgtctgatcttctcgcacctttttgctcttttttatttgcctattgtccttcttttgtttatgttttatcggtgttattttttatatcatctttctctttgtgcttaatttaataattggatctttttttttttattttatctcatttcatcctctcaatttttattgttattcttttctattcttttatcatcatcatttatacattattcttgttactatttttatctttattttactttattattttgtcattttatctatttaaatattctttattctttgtatatttcaactttctcctattctctctttatcttctctctctatttattattcgttcatccactttctctctttcgtgttctctctatgtctttttctcatttcaatcactatacctgtcttcaactttatctctttcttattcaccttctcttctctattttctaatctcttttattattatctatatattttttctttaacgtaacttgttgttattatttttcttcaccttaatttctttttattttacttctctatttactatatatttatttatctacaattatttatattatagttctgtctattatttctctacttatcctcttacttcttcttccttcattactt

SEQ ID NO: 4291 - DNA, 2970 bp, Emericella nidulans
ctacgtattccaacgtccatcgttgttgtctggtatccgccgtatccctcaaagttgaaattccatttctatacagtaacaggggataagaacagcatgaccttcagatggtaaaaaaaaaactcaacgagaaaacgcgctcagcaccgtccttcttggtctgatattgtcgagcagtagttggtttacccgattctcatccaaccacctcgctgaagctgggccattacttccccaaaccgcgcggacgttcaacaggtacatcttcctttatctcttccaaaggtcctcaccgggttaacagccccaaacttcgaacctgttctgcttgtgctccggcttcgcgggggtgtgcggcttcagcctttcggtaggcagcctgcattctcatcgtccgcagagcctattaaacgaccagtcaatgaatatgtcgctacttaaatatagcctttagagtttgttgggctctttgtcctcgtatatctagatgcaaaaacttagggcgcgtacctctttccggtgatgtaagcactcgtggtaatcctctaaggcgggcaggcactttctcttgccagattctccctctccggcattaacgacatagcagccaagaacttcttgccagaagttgtagcagcgggaaggacctgagtaagagtacaagtgttagccgagagctccgttctccataacttgacctcagggaaactcagcaccacagcccattgaggtttttttctatgcttatatttatattcaggggatacataccgccattgagaccgaaaccagacgccattgtgtgttttgaggggaaagatggcggggaactgtagggagagggtggaggagcggatgcgatgaggttctgcgcatttagtcacttcccggccgcccagctggcacgtgcacttcgtcaccgtcacccacgtcgactgcagtcaacaccacacgccttcttgtttagcttgccaactgcgatgcaatgactgaccccacgtcgctctccggagcgcacgccattcttttggcgattcatctctgtgccacaggcaaccccgctgtcctcccgcatttacaagctcgattccctgccaccttgacaaccgagcggctgttgcgcattatcttgacattcttacctgagagcacagagcccagatactacgtacctgtggtgcagactctagtgaatggactagtatctcgctcggacaatgatgatatcgatatatcgccggtcaaagatctcccagaagctgccgcaaggaaacgtgtacggaagatacgcctgttacccttgagatatcccggggacgaggatactcgagaatcagcagacttgttggtaatcttcctggttcaccgagcacatcgcatcgactccgagacctctcttcaaccgctcatcctcgatctcctgctgccgttttaccagcgctctccaattctacggacgtggcttgtctcgtgtctcctgccgcttctccgattgaattacgaatactatcctaatcgagacaaatcatgctccctagaaacgctaagctccctggacgatcagaccgccacaaatatccttctttcgatggctggaacacggaagaacgacacggacttgatcaggaacctacgtggactagctggaccttggatgtacggcagcaaccggccaatgagacgacgtttcagtcagacagtgcgtcgcaattcgattcctgcctcccagtcacatataaacgaagatgtcagaacgtctgggtgggagtacgtgaacgaatggttactgtctcgcagctcggcggacccggaagcagtagtcaatgccttcatcaattgggatggccctggagacgttgatttgggtggctatgttgaagaagagacactgtcaatggatcaatcaaagcagctactgtaccgatatggccagacgggcctagctgttatctatcagagtccggaggtatctcttgacgggtcgattcgcgtcctcgaacgggtcagcaaccttctcggattggagaagtcgttattcgtagcatccgataattcaactctcccttctgttgaattcgatgctggcccaattcagtcagtgtcaagagcaacgctgttccagaacgctctcctcgttcctacgaatccgctaacttatccgtcaccgtcatctatatccttcattagtggccttcttctctcactacgtgttctcaaggagctagggcatcacattccgtgcaggacagcaactaatatctgccttcatagcaaccaagatatgcagctgtatgagctgcgcagtatgatgacgtcaatcgcgcaatcgagatccattagagactggagaacagtccgtcagaagttgttatggttacgggattggaaagcagagactgaaaggacagccgagagcgagcggtgctgccatggtctctttttcagggtcccactaagtactatcgaaattgagatcctgaagattctgctagaagtcaaaggtataacccctatagcccgacttcttagagttgcaatgctaacgattctcagaatacgacctagctgccaatatctatataaggtctaattcggcattgaactcgatgcaggtggaggatgcagttaaggaatccatatttgcggcgtacgacaatgcgagcaacggtaacaggtcacgaggtagaatgcaaagggcatacgaaatgtgagtggccatcctagctcaatcaattttctcagagaataacgggattacagcctgcaagcttttcagccacacttcccggggtctacttcgttgaagcagctacaggccctaatctcagcaacgcacgctctatctttttactctttaactcttcagcagggcgttccttttcaacctgtcagaatccgcccccatccagaccccctttctttgatcgtattagtgctcgatcaaaatcccaaaagttacaccaaactcga

SEQ ID NO: 4292 - DNA, 2270 bp, Emericella nidulans
cgataacaaactttctgatcctatggaaatcgcccggctaaccagtctccctgaaatacgggagatctgggttgcaggaaatccgttcgtgaagacccatccaaactaccgagttgttatcctcaacctgttccgccgcactcctgggtattcggaagatatcatcatcgacggctccggccctggattcacggagcggaaacagctgatcgagcgagctgcagagccgggggtcgtgccggtgattcgatctaccgtcgcggataattccacgctcgtcagcaagccttccgtaacccctgcttcggcagcctctgccactcggcctgcacaagacgtcgacgcctcaagggcagagcatctcgccaacgacaatggcattgggtctagccgcaggaaaagaaataaccgaaaaaagatcattgaccaatctggagctgcctccattgatggtgatagagattcaggtgcggtggtaccttccgtcttttctgctcaagatcctcagttacctgttgatccgtttgtttcgtcgcccaccgacagtcaatggaaatctgatggtggtcctcaggccggatcctttcacctccaaggccccggagcggccaaaaaaaaaagccgagatgactccgctgtgccggcaagtgaatttgttctgcagcaaacgctacagagtctcgaatggggcgtggacagtgacttgcaaaaacaccaacttacagcgctccagcaagagctcggtagtagcttttttgcagctctgagagaccacgcctggaaccaggcgcaaaagactgtcgctgttccccgcacgggcaccaacttcagtgaatcgtctcgactgtcacctgaatctttgacgagagctaatactcagccgattctgagcggtcgccatcctatcgtataacctaatccgagccgccttcttcccttgtgttccaaattatcatctctcctcgcacctctcctttctgccgaggagacttaccatgaaacgcaaatcgacagagacttctttagacaaaagttctatttctgccttgattcgtttcaagctatacggcggttctattcttgccatcgtccactatctcgaggcatataccgcaacagcttgttgactgcattttttcgtggcgttatgtgatcctttgatgtcgcgggccggatgtctgagctattctcatacctccgttttacttcccatcagcccacagctttcacttcactccgctatatccggcactctcaaaacatcacgggaactgctgcgtactctttttagagttcttgtattttatcggcaagggaatcggcgtcaacggcgttgttgggacgatttgtgtttttgagatctttcttgttgagttttggggtgcagattatatcgataccttgttctgcttggtttgtcttgtttcctttatcccgccctaatgatttcacgacgacgatctgatgcgtgccgaaatatcattgattcgagcagttgttacaggcttgtataacgttttttgttgttctgggcgggtcttttgtcatccacgctttcggtttccggtggacttatgacgaatttcggacttaatacacatgagatgttgtgacgagtgaccttctaacctggccatgtctatttgacttgcaaatagctgaatgcgatgtgcatggtgcgttgcagcgtctatggacctggagagcacggagtaaggagtagctgtagtcgaggctaacgctgacccaggtgagttcctccttgcagcttcccgaactagtaaaggcaaattcaagatattcgtaatgcagtcatgataacaaggacccgttgatgtatcgactatcgatgagaatttgtagagactagagaagttgagcacagctcgatttatgccctggctgaacctaggctcgttgtcgatgcgtactgccgtggtaatgttacccccgtgctttatttatagaattcagattagctcaccgctcggcatacaactcaatcgattggcggtatgttctgccagaagttgagcgggtaaattagcggtacgggtgtaacgccttcgcggtttgttcactttgttgtggtgctgactaccgcagggttttcgagcttgccattcctcagctgaaatcatcgagactcaaccctcctccaaccaaagcagctgttgtcttgcttcgatcgcttcttttggtgagctcgaatcctcgcaatctaatacatctttgacctaccctgtatagaagtctgctgttcgtgcaac

SEQ ID NO: 4293 - DNA, 3971 bp, Emericella nidulans
tctcgcgtccgaaccgaatcaccttcacgaagatcgatgttgacaagcagcaagagatcgccaaggcatatggcgttacagcgtatgagttcctggaataatttactgctcaagaaaaattcgaagctaatgtatgctagcatgcccacattcattgtattcgagcgcggccgtccaacgaacaccattcgcggcgcagaccccacgaaactaaaccaagtgatccggaagcttgccaacgaagccagcaagagcgaagcctcggccgactctgctcagggctcctcttctggcggcacctgggtcggagccgcagttcccaaaggctacagcgacatcacggaagaatatgacgtgaggggactcgaactgctgaaccgagacagcgagttcggcgtggccaggacactatttgagtcgtcgaagccctctgcgcttggaaacggcaagggcaaggatggtgcagcggactggatcgagagcgacactgatgagcagttgatgctcttcatcccgttcaagtctacactcaaggtccactcgctccatatcacgtctcttccgccagccgagggagaggatgacgatgagattccgatgcggccgcggacgattcacctgtacacgaatcggtcgcatgtgcttggtttcgatgaggcggatgacattcctcctgtgcagacggtgacgatcgaatctggcgactgggattcaaagaccggcacggccaaaattgatcttcggttcgtgaagttccagaacgtcttctcgctgaacatcttcgttgtggaaggtgacggcgacggcgagaagacgcgcatcgacagaatccgcatctttggagaggccggcgagaagcgagagatgggcaagctggagaaaatcggtgacgagcagggcgaatagatgcgacgggatatatcacaacggcgagctcaaagtaaatctttagactacgactacaatgaactccggatatgcggccatgaatccagcatacaaaaatctgagctttatcgccatagtgtaaactaacccgcggagtctacaaagagctccatttacgaatccccaatctacagtgtcgacttctcgtcttaacatcgagacttgaaggtgtaatgtccgatcccaaaccaaatggtctcatcctcgaagaaaaatcagaaagaccaataaagtaagaaccggcgtgcaattccaatcttctgtgacgcaacggacacctgaaaatacatcactgagtgtagatgtccaggcaacacgggtgaatagttgcgtcgccgcacgaagaaaggaaagaaaaaaaatttcaaaatgtccggctcgtgtggaagtatttatgggaagagaatttcggaacggggaacaggtttctccgtctttacctgcagagtttgttgtgtgtagactgattacgtgagcaatgcagggagcttagaaaaaccttcattcggccatttctctcttcctttcttcatacaaacataggtctatgatgagattaatggatgttaaaatatatgataggaagagactgactcccacaaagtgaggagcttgatcttaataccatccactgaggccttgttcaagcttttattattgctttccctcccataatcccaattcctgtcccgatgcttaaggagcttcatcgttggagtagctctggctcggatgttggatttgtcttctgcttttgtcagttgcatctcgccgtcttgtgatgcttgtgctttttttttttttgattatcttctttttttcccttcatatttgttcaataacttgacactttcagtgtgacatttaggggtcggggcttcagtcccgacaccgatctgatactgggttttgatatgaatagcaattgatctggtcacgagctgatgactattggagggtacgtttgctgttcaaagttccaacacggactcgccatgcccgtggccgacgcggcacttgatattcctgcgcctaccgacgttctaccacgagacgacccgaagaaactatgctatacccatgctgccttctgcgtcagctagtgggtcccgcagagttgaaattttcagtcgtagttgttgatatatatagcctcccattaaactgcgaggagaatttctgtaggtgataatggcagcccagtagaacagctcagggtaggtgctctgcccccgtttgtaggcggatgttcgggtggcctggaagcggttgctgcttgacagttggagcattcaaggtaactatataatgtattcgtcttggtctactacatgggaatgtactattataagaagatggacattgcgaaggggtggaggtggtcttcaagctctttgatcaagaaactagaaacgattctcactgttatcctccaggcttcttgtattcagcggtgcagtggtaataggagtggatgcataggtgattgttaaggtatttataatcccttgtcaatctaaacacccagtttaggatccatctgaatatagaacgccgtggtagtggatacacgtaagaatctgtatctgtttctaagagattatggtcgtcaaaacaagccttgactttaaaaattttatttttatatctgcaatgaagcctgacacgctgattaaccaacaatccattgatatttttgtgcatcaccccaggtgcctgccagaaggtaaccgtcctctggcaaatccaccgaatgcacgttcctatcgaaagtagcactacgaagaccccccgtgctaaggtatcgtccgtaatggaccccatcttcacttgtctggagtgccactaatgcacattgggtgtatatttgatcaggaagggcagaccttaagataattccatacgcttcgccttggctgagattaactggaattgtcccttttaagtgcaagaatgaaagctttgtgtcgtctggctctgtcgctgacttgcttgcttccgaaacatagtcaggatcataatcggcatctagatcaagttcaggagcacaatggggcttggaatcgtcaagccacttctcccaatccatctgtctttggtcagggtcagatcgttttgatttggccagtgcgagatcaaacaggtcggacgaaagagctatcagtgaaggatacattgtgatgcagaggccccgcgacgtgatgtctcccgcatcaccggacagcgtagtgaaatcgcccgtaaatcgacaggttttcattgcccatcccaaaccgtattcttcgaatcgtggcccgttgatgaagagcacgtcttggggaaacacatgtagcatgctatataacctcctcatgcgctcatcggcctccttgaacttaaggatcttgccgacatcaagattcaggagacctgcgaggacagtaggacgatcacgatccttgctggaggctcgtgtagccacattgaaccagttccaagctatcaagttgctgtggcttctagtagttccatttttgacgacagaaagattgattttagaggcggagtcagtgggctcttgaaagtatgagtaccacataattgcggccatcgtagcgatcccttcctggaaaatcggcaattttccttcgtcgaccttattaaaaagcatgtaggggatggtgccaatattgattgccttgtcagacaacagcacgaatagcttgtccttcgcggcaagtccttcttggagcgtccataaacggcggatccagcctgaacagtaaaggactctcaggcaaacttccattttattgcacaagcgcgagtcgaccagcatcaactcggaatcgagaatcaaattcctagaagctgtgaccaatcaggttagcagtacacctgaaatcaactattacagctcgcactgaccaccggtataaacatcgcggatgcgttgaattgccagactgcgtgcgtcactttgatgtgggatgccaatgtatcaatcacaccagcacagaattgtctcttcgccgagccgcatt

SEQ ID NO: 4294 - DNA, 3787 bp, Emericella nidulans
ccaataagggacgtagaagctccgggatttccgatgttgatttactccaactataactttctggacgtcaagctggagctccagattcgatacccggatggtcgtctggttgagaagcctatgccgagtcaggcatccccgcctggtttgcgattcccaaacggtgccgttattaacgggcactttgtggtcagcggcacttacctcacttcttcaaagcaagaatacgcgctgtgggcgctagacctgaagagtctcacctggggccggattgatgctggcgggtctgtgtttggacatggtagctggaatcgtggtgtactgtggtcgaggaggaatacatttgtcattcttggccatcgcaaacgcaacctcgtcgaggattacaaccaccgccgcatcaactttacccatttgtgtatggttgagctagaggccttcgggctctacaataacccttgcagaacctccccaacgtccgcatatatttcccatagtggtcccgcagttcctgcgtccttccagcagaagctggcccaattgagattcgcggccgcccgttttctgccgcagcggctgagctgggacgccttgcgcagactgttcctgaaatggctgatatggagctccaggccgtagggggagagcggatatccgtaaattcacgaatcctcagtcggagatggggcccatacttcattcaacttctccgcgaatcctccgatacagcctcagatacggcgactctccgaaccggattgcagccgtatcccagccgcaattctagtataacgataacaccctcattagaccacggcagcacatactccaacgccacaaccctcgccagcagcaacaacaacccggccaaatccatccttgcaaacctcgaacttccctccgcacacagtcttccccccacatctcgcccccgggtgctattcctcccgcacactgttctcactcttcaagtactcgtcttttacctctacacctcagccctaccccccgttggatcccccctttgcacgcctcaaattctctgctccctcctccaacttgcccgcccctaccaggttgacggcctacttgaagccgtcgtcgaacgccttcatcaagtcctcgatggccgcaacgctgctgccgtcttcaacgccgccgccatggccgccggtggcggtagaggaaccggcttcattagcgggcccggcggcacacttgaagccctcaacggcgcccacgccgccaacgagctcgcagacctcaccaacgctatctccctcaccgatacccgtagccgcctgaactccgactcatccgacactgaacatggcactgcgtctgccgtctccgtcgcaagcagcagcgccggcggtggtacacgcggcgtccccctccgcatcaacaccaatatcttttcccgccgccagggccgcgagcgcgaggactccatcagtaacgctagcacatcgtctgcgtcggctactagctacgatttctctgattctgagggtctgcctggtgatatggcgcggtcttcacgccggaggagaggcacgcatggcgataacgaggtttggacaggagatctcagtagtgtgattggactgcagaagcgtgggctccgcggtctgatggagggccggcggttgagagagcggagcgcgaaaccccccagctcgggccaggcttcagttgcggcggtcccagtggatcatactgccaatgtcatttgattgaaaaaattgattatttgagtgaaaggtttattgattaagtcgggtcgttttctgcttgtttcatatccatggatatctgtgcctgcatttacctactacatctgcatacacatatacacccttttgttttattgcttttttgcccctcagccaagatttccctcggtgatatatctgtccattgctagttactggctcactagtgcttggagcttggaaattgtggttagcggataagaaaagcttgccccttcttgatacttcaattgtcacttgatgacgaggatctacttttagcgtcatctcgacgatactatcattccgtactcctgcagtttcccctctaagctcaggtgagttcatctagtaattaagccgttccgacatgcaacattaaatcatgtattcgtaacaattgcccactccaggcaatccaaacctcagtcgtaagtcaacccccccattaaggcacagggcaatacagaaagcacgctaaaaacagcgaagcacagaattaagccctccttcgagcaatctttcgtgggctagacaggacccatgcctcccatatttgtctcttctcatgggtgacatggatcccattgtcgccgagttcatccacggaaaggttactaataacttcggggatcgacgcatgatgcggaaggttcaacaatgcgaaagccagctccaagtgattgatgttgactgctgtgttaaggaagtgatggtaatgaaaccccgaggatgcggcaccgctactgttcccattaccatagttgacaccgtggctgctaccatgtccactgctgctatgaatgccatggacgcaatcaccactaacgtaatcaatttcgcgcaaatcaatgtgctctatctcatccatttcatcatggaggacagagagaacatcactccagcggcttccgtcgcggagggtgacatttacaatacgaacatcacggagctgacgacgatggcgacgaatgattgcgacaatctcctgggaggttaatcgccagccttggatgctgagcttgcgcacgctcttccactggatgcggtggaagacctggtctagcgataagcctaggggaacggcggttgcgaaaccgaggtgaatagcttccaggttcttcgcggcggagaagaagtcgtgaaagactcgagaaaggtcttgcattaggcttgtcatatcctcttgtgcatgaaaagtgacttccaggcacgccattcgggctccaatagctgagagggtggcagacggagtttgcaagagtttgaatgctgcgttcgggtcaatttgaggcccgagaaagcgcaccgaggtacatttggagacgagcagtgcttttcccaggctgttaattgcgcgtgtacaagctggctcccaattcaaacctaatgttccttccagtgagcgctcgcgtatatggtcgagcaactgttcgtctgcctggtcctgcagccggaggagtttgacttcctgaagggacgaaaatgcgattagggcttttttgagaagctcacggtcgtggttgccggtgaggatgtatacttgctcttgcaatcgagctctatgcgtctcggcggcaggtaaatcatcggtggagaattgcgaccagcctaaactattgtattagaatcgtagatcttcaaaccagataatgacgaggactgtatattcaagagacggttaccgctttcttggtagaaaggtcgcaccatgtacgtgaagtgtttcacatgacaggccagctgcatgtgcagaagctcttccaaccttcggaatccccgtcgcgaaaatcggagatggaagctggtaaattttctcggagtgctgatacgaaggaagcgtttgcacacgagtcgaaatcggtctaattcggtcttctcgccatagatatgagcccgacgctcattgagtcccgccagaagggaatgtcacctccctggagacgaactgggagatcggtaaacaaatgggacgagaaaaaagagaatctcactgatcagcaccccgcctaagtcttcgacacgtagcgata

SEQ ID NO: 4295 - DNA, 1887 bp, Emericella nidulans
ctggctaggatctggcgagaaacttgagctggccctgcgtctgcttttagactgctgcttgctctctcctgctacatggggtaattggtataatgctatggttactcgctgtgctgcatgacagtgtacgatattctgggcttattggtgagcaatacggatcttataaatatttacggccagctcgtgccgcgctatggaacacttacatttccgcatgcctcgcagcgaaccaaccaaaaggcatcagtgtagatgatagactagagcaggaacggctcatagggggggcttaggttggtacagcaagaatcagtcttcaaaacacagcgagccgttcatcgtcatctccccacctccacaaatgtacctgatcccagtcgaggtaatcaccaatgaaatcgtgctcgtcgtccgagtagcacgcccgatacgtgaccatctttacggcaatgccagtgacaagacggctgccaaagacaagcgagcagtcgcgctataaagaagtcgttgggtcctttggggatcctacggaacatgtactcgacggtcgcaagctcctccttgggaatttgccgaggggacgtactcctcgaatcgtgcgtcgtggtcatctgggtgggtatacaggtggtacgtgaatgaagatatatatgcatctgagctccgacatctccaacttctctggtgagggctacaatgggcgttcccttgatggtgtacgaccgggatctcgttttgacttcgttgctggctgtgacctcaacctccgtcatggaaatgacccacgccggcacctgtctctcgtcagcgggggtatcaaaggccttatggcgaaatcttggggaggatgagaatgatctctcattgatgttaggcggggagcttttaaccccgttggctgactaagatattacatatccatatcgagcctcccataatcgtagcagaacgtacatataggtaagagcaaggcacgttgcttaggatagggggtaagagcaaggcacgtaacagggggcgtgcggtatagcaacaatgagctcgaacatatcgccgttgtcttttgttcccataggtcgaagccattgaatgagttaacggcggcggtatgaagcagggcgcccaagaagacgcagagagccagtcgctgatggcttggccggggcttgaaaccggcgaagcctggatgcaggtatgggttttctgtcattgcgttggtctctatgggtcgcatgtatataaactgggcgaccttatcactataaaaaacgtgcttggagcttgagattatccccgcttatatagcctcgagtccaatagggtttctcctgtggctagtgaggatacaaagggctactagctggtatcgaaaaagcattgacatttcatgatctggaggaagagtgcactctgcctctgctctacctcaacaatggaaataccattgcttccatcgtcgtggctaccatgatggcattcgtcgagattgcagtcatctctgccgtggacagcggattcggctccacggtcgctgcagatgccgatacagtgtaaagttatacggggtgcgacgtatgatgatgaagtatcacgttcgttgaccgaagaattacccttccatctggcggtagttagggcaacattcaatgtttatacgcgtccatcgaaaccggcggtgaccgaggtacgtccgcgtcgtcacgaaaaaattccgcacaattcatagagacaatccaagcacgcgcacccgctactttgtaatcgggcagtcgagtgtcacgtataaacagatttaggggtttgatgcatcacggaccctccacggcgagaaggcgcaattgtatacggggccaaagcccaaaagacttataccatccataggcc

SEQ ID NO: 4296 - DNA, 1015 bp, Emericella nidulans
taattcgacgatacccactcagaaagcgcgtagtccccatgaggcacccgaacaataagcccatgaaacaaaaagacgttctggggtattgtgccgtagcaatacccccaatggtatatagcggatagcgaacgaaaacactagtaggggtcgtaaaagatcggaattagttgggtcgtaacaaaaggtgacgccggttgcacaccggacgttgagcctctttcgtcctcaggagtccagaggcgttgagctttgattgatcatagccacgatgtggaagctatcgggcccagccgatcattgaagatgctgccatagaggtcttcaatctccactagataatcattcacggaaaatttcttgagtccctttctgcgcagaatctgctcttcctcgtcaaacagaggggcgcctccaaattcctcgaccacttcgttgacctgctccaactctttgccgaacgggtgaggctccgcatgataagtatcgtaagctagccgttctgggttgctactggagctcggcggaggagacatgcgcttcaaggaacgctggcgcgccagctcttggtggttccgcttggtgtgagaaagagcacgcctgggaaccattggggcatcatttgaagacgtagtcgatgatgaagagcgcggatggctggtcacagttgcggaccgttttggaaaataccctgacagaggattcggttcgatgggagaatcatcaggtgtagtaagcggcgaggaaaaactgtgctggctaaacgaacgatccgagtcatcaggtgactgcaaagacgaggtggaggacgacgatgccgagtggagatctggtgcattatatgcaagcatgttcgtcgttgacaatagttcgaccggcccagagatcttgcctctcttgatcgtaccggacgagaattttacctggccttcacgatatggcatcggcgaggaaacttcaatgcgctttgagcgttggtaaacgcctagtaagtgcgacatggtggtcgagtgag

SEQ ID NO: 4297 - DNA, 4347 bp, Emericella nidulans
  unsure (1)..(4347): unsure at all n locations
caccctccttcacccggatatgggtgccacgactatcatcgtagctgatgtagacattttcatgaaggctccgccatgatctctcatccactctagcagcgttgtgtagacctcgaggttactctcggcggggctgtctaggttagcaacctcggtatatggcagtggtagctaaaatcttacgcagaaagggccgcacccgagccattttcggtgaccatgcctggtactgacaaatctatatcctttgagtcttgtcacgtttatagttatgctgagttcccgttttggcgtgatgtaagatcacgtgtacatgctgaccaagcgtcacgtgatttattccgtccaatcactgaccggacaaagccggatattcagcaaccgcagaattgaagctggaacgccatcaccgaccccctcgtgtcgtgcttctccttctcatattctccccgacagccattgggccatcgtcaccatgatatctcgagcggcggctccttcgtctactcctctcgcctccctttcctcccgctccctccgactccaggctccggccgcccgctctttcgcaaccgtttcggacaatgctccccccgtacaccaccacggcggtctgaaggaccaggaccggattttcacgaatctttacggacaccatggcgccgacttgaagtcagccatgaagtacggagactggtacaggactaaggatatcgtgttgaagggtcatgactgggtaggatctcgccgagccagccccgggcatgggatagattcgttggctaatagtggttatatagctcatctcagaactcaaggcctctggcctgcgtggtcgtggcggtgctggttttccctctggactgaaatacgtatgtccccccccttgattttcccaaagctagcgaatttgtctaatttgtaactcggctagtctttcatgaacttcaaagactgggacaaggaccctcggccccggtatctggtcgtcaacgctgatgagggtgaacccggaacctgcaaggaccgcgagattatgcgcaaggacccccaaaagctgatcgagggctgtctggttgtcggccgtgccatgaacgccaacgccgcctacatctacattcgtggcgaattttaccacgaagccactgtcctccagcaagccattaacgaggcttaccaagccggcctaattggcaaaaacgcctgtggaactggctacgactttgacgtattcatccatcgcggaatgggcgcctatgtctgtggcgaggaaacctcgctcatcgagtccctcgagggcaaggctggcaagccgcgcctcaagcccccgttccccgctgccgtaggtctcttcggctgccccagcactgttaccaacgttgagactgttgccgtcacaccaaccatgcantcgccgaggcgccagctggttcgccggctttgggcgcgagcgcaatgcgggtacgaagctcttctgtatctccggccacgtcaacaacccctgcaccgtcgaggaggaaatgtccatcccgctccgtgaactgattgaccgcactgcggtggcgtccgaggcggctgggacaacctcaaggccgtcattcctggcggttcttccacccctatcatccccaagtccgtctgtgacgaccagctcatggacttcgatgccctcaaggactcgcaaactggtcttggtaccgccgccgttattgtcatggacaagtccactaaggttgtccgcgccatctcccgtctatccactttctacaagcacgagtcctgcggccaatgcaccccctgccgtgagggaagcaagtggaccctgcagatgatgcagcgcctcgagaaggcccagcctccgaagcgcgaaatcgttattctccaggaactcaccaagcaggttgaaggccacactataagtacccttggtgaggcctttgcttggcccatccagggtctgattcgtcgcttccgtccggaactggaagctcgtatcaaggaatactcagaagggctgggcggtcagcagccacttgctggtggttggcacccgaacagccgggcagagggcaagctgatttctcctggcatgtaaagtattttattctcttaatcatcaaaagagttgactcatagaaatctgtccccaagttcctttggctttctaggaggggtgattatctctcttttttttttatgtttcccgttcgcgcgcgttgcttgcttgtctagggttttgaccatgtacattttcgatcgaatccgtagcaatgaactagattcattcatctggtccgtcccgtatttcctccatatctgacagcgttcctgaagagtgggccaggcaaaccatttaaaatccaaaaacactagagtcaacgacagtatccggctaagtataattgtgtagagagccttctttcaagacaggatcaaacaaggccacacctacctttgcctgccaaagatgccgttatccggtacggattccaatccagagtacctattatgccaacgtcagcgccaataccagtgccaccctcatcctttgcctgatctcctatcaccttccccttcagcaatctctattgtttccctcccactttcgcattccctctcacgcctcaatcttctacttcccctccatttcgctccatagacaaactcggaccaagccagcccaatagatgccagcagcaaaagccccagaaacataaagcaccaaccccatcccatgccgctcaacatataatccacaacagctgccccaagagctcccagccagcatctgaccagattacaagccgcagctgcagtagccggctcatcagggaacaggtcaacaagtaaggtattgagcgtgtttgtgcaggcgactgtcccgaagccgttgaggaattgcagaattaagggcgcggaaaggttcgctcgccgctccagcacgaagccatagggtactaatgttaggattgtgaggataataagggggaagtaaatttccaggcgggattgctcaatggggaagtcttggagagtggtcgctatagatgggtcgagggggaggtctagggactgggcgtggcggcgatagctgcgatttagaaagtagccgttgaggaccgcaccgagagcggcgccgatgcctagaggactaatgtgtgttagtatgctgagatcagtttgtatgggctgttggtgattacaggaagcataggccgatctggaggtcattgaagccgtatatctttgagaacagacttggggtactggtgagcagtgcaacgtttgtgagcatcaagaggcctatggatgagactattatgagagcgtccggttcaaggaggatgtaaagcgctctcaaagggttggggaatcgtagtcttgatgttgttgatgcttgtccgctgccgttgaaagcgctctgcatagttgcagcctcaaaatgagctccatgatcgtcattgaacccagagccagacgcagacttccatttcctttgcgaccactgagccgcagaccatctccatctttctctaggaaacagtctcccatccccaacaacagtcctcgcagtctccggcacaaagaaaacgtaagagaccaagtaccccccagcaccgatagccagaaaccaaaagacgctcctccaccccagaaattttgccaacaaccctccaataatcggccccagcgccggcgcaagcataacacccgccgccataggaccaacatacgagcctcgttccgccggcgtcgcaatgtcagcaataaccccatatccaaaagagaccgtgccgctgctacccgcgctctgaatgcaccgcagcaccatgagcgccgggtagctgtcttgcaaagcgagggccgatgttggctgcggtatagatgtcgaaggcgaagaaataggcagggcgacggccacaagcgtcagcgaatgtgcccataaacgcaggtgcaacgccttgcaggatcatataagtagtggggtgagggttgatcanagcgttgtgagtggaagttttgacaagggaggcatgacggatggtagatttggccggaagcggaagaaaaaagaccttgggtaccatagccacgagagcgcttttgactgtgctgagctgaaatttctgggtccatgggggggggcatgagggcggatggtgtaccttccgggggagtggggcctaagaagctaaaaatgcggggcaacctggctaagaggaggcgcctggggatacgctctggtggggaaccgtttttagggggcaggctcccggttagttacccctcataactattgcctttcttcaaaattgtctaatttaggtggggcccttatgattaatc

SEQ ID NO: 4298 - DNA, 3260 bp, Emericella nidulans
ccgtggtcagtccttggacccaccctccaagatcgacgaacttcttcctctttacgtcgagctcctcaccaagctcaaggaggctggtgttgaggacgttcagatcgatgagcctgtcctcgtctttgaccttccccttaagtctaagaacgctttcaagcctgcctacgagaagcttggctcccttggtgcccaggctcctcgtctggtcctcgctacctacttcggtgacattgtccacaacatcgatgtcctccctgctcttcacaacatttacggtattcacattgatcttgtccgcaaccctgagcagctcgactctgttatcggcgctcttggtcccaagcaggtcctctctgctggtgttgttgacggccgtaacatctggaagactaacttcaaggctgccattgagaaggttgagcttgctattcagaagcttggcaaggaccgtgtgattgtttccacctccagctctcttctccacgttccccacactcttgccagcgagaagaacctcgaccctgaagttcaggactggttcagctttgctgtcgagaagaccagcgaagttgttgtcatcgccaaggctgtcaccgagggccccgctgctgtccgtgagcagcttgaggccaacgccaagtctgtgcaggctcgtgcctcttccaagcgtaccaacgaccctaaggtcaaggagcgccaggctgccgtcacccctgagcagcacaaccgcaagtcccccttccctgtccgtatcgccgagcagaccaagtccattaagcttcctcttttccctaccaccaccatcggatctttccctcagaccaaggagatccgtatccagcgaaacaagttcaccaagggcgagatcactgctgaggagtacgagaagttcattgagaaggagattgccgaagttgtcaagatccaggaggagctcggccttgacgttctggttcatggtgagcccgagcgtaacgacatggttcagtacttcggtgagcgtcttaccggttacgttttcactacccacgcttgggttcagagttacggatcccgttgcgtgcgtcccccgattatcgtcggtgacatctctcgtccagctcccatgactgtcaaggagtccaagtacgctgtctcgatttcatccaagcccatgaagggtatgcttactggacccatcacctgtctccgctggtccttccctcgtgacgatgtccaccagtctgtgcaggctcagcagctggctctggctctgcgcgacgaagttgttgacctcgaggcggccggtgtcaaggttatccaggtcgacgagcccgctcttcgtgagggtcttcctctccgtgctggcaaggagcgtgaggactacctccagtgggccgttgctgccttccgtctgtccactagcggtgtgtctgacggcactcagattcactcccacttctgttactcggagttccaggacttctttccacgccatcgccgcgttggatgctgacgttttgtccatcgagaacagcaagtctgatgccaagctgctcaaggtctttatcgacgaggcttacccccgccacatcggtcctggtgtctacgacatccactctccccgtgtccccagcgagcaggagatcaaggaccgtgttgaggagatgcttgcgtacctgcgccctgagcagctctggatcaaccctgactgtggtctgaagacccgccagtggcccgagaccaaggctgctctctccaacttggtccaggcggccaagtacttccgtgagaagtacgccaaataatttttaacaacttaataatgacccaaggtgggggcgacattgtcaaccatgtcgtcccgagaaggatgaaaatttttttctttcctttaatgagttatgatgatgataccaaaagttcaacatatgggttcggggttatattagagatatcctgggggtaacggagttcaacattttactacattcaacatcggcgttagccaagcatcgacatgattcccctggcgtgggtttcgttttaatcttattgggattgcaggagcatgagcgatggtcggttgggccgatgtccatatatttcaacaatgtgtataatcacactaggggccaaaatcatacctcttatttcataattgttctctctgattgtaaactgttattagtggtctattccttccaagaccgtccctgcccagtcagacggttggttgtcagataggaatgcaccccttttaacctgcaacaacatttttttttttcactttacatctttatttcctaacaacttatcctaaaacggtttatagaacatgcagtcgtgtacaattcaaatatactatgtcgtacgattttttatataaaatgtccacgcaggggaaatatggacaacttaacctgacaaccaagaaacagatggcgtaacagcccgcctatcctgcacacgacctttacgcttccgaaacctctgaacataccacttcctcccccacctcgcatgcggcaacatgttgctcaccgcattaacaacaaacaccattgccggcagcggaacacgggaagcctcattttcccggccgcccaaacagcaggtataagccagggtgcaagatgcacggtagaggcaggtgcagatgcagcaccatacgacgtcctgctcgcgcccagtcccagtccaaagcctggtattccgccggttgtgcttctaaaagaggtactgagtacatcggggatcagagacggcggcgaaagagcagggaagactgtggtgcccacgagagcgaaaccagtccattcgagccactctaaaacgtagtgtgggtagaggattgatgcgaagaggccagatttcgggggtataacgtagaccttgtggtatttgtttggcttctttccgtctgttgattcttttgcgtctgcaccgttggccgaagtttgactggcttgtttgtctgccgcctcgcgacgaagcgcgaagagggttcgctcggcatagatattcccggccattccaacgaagaacaaaacgagtccaacagctggaatcaccagcgacgttcccaccgtactggacaaactatcctcgaggaccttttctggtgtcatcaaggccgcttcagctgcgcccaagccggaagtaggatagtaacccggcacagtggttacattgtacccgacaagccacaagcaagacaagtcgaattgaccagttaaatgccgctgctgacaccgcgataaaaacatggataggtg

SEQ ID NO: 4299 - DNA, 6570 bp, Emericella nidulans
gtactacaagctacctgtactccacagtcttgatgtcttgcttcgtccgagtctggacgataaactgtcaattaatctattatcattggctatgcttgtccgtacgaggtggcccacgagcggcacacatacttaggaaacactactggttgaatgctggtccaaccttccaagcccgtggctggctacagaccgcagttgtttctaccattgtccggctcgtctaggttccaagatactggcacacaggcagtcctgcaggactgcagatgatacccattctcatatttttttgttacggttacggtcctgtcagcactgttatggacctcagatacaattcgtcgtcaatcgcggtagaagcagcagtgctcaatctaaatacagtgcgaggggcaagggccgggagttttgtggggtaaaccgcttgattgcgtttgagatctagtgaattgtttgagatttggtggttgtaactgtaattgagtcttcggttaaatgctggattgtgtctctgtatatccctttcccttgacaatagagtccaggacgggcggtgtgttcgagaatcggcaagtcacgcaggcttattcaaaaagttcatggcattccgtgaatggatgtcaagccaccttcaccgtatgattgcgggtcgacctctatccacatatcaatcaggaaatccataatctggacgcgacttctcctgagcaacgggagagccactacgcgatgacgcggaaattgaagagtgaagctgaaacggcgacgttggccttgtcgatcacgcgggaactccttacatggatctgcatacgctagccttggaggtccaggttgtttggagattcaattacagagaagatctccatacagagtcgccccagccctccgcacgctgtaggcagtgtatctgggcgctggcatgaagacttcgtgattctgtaccgactacgctggtgaattgtccgagttgccctccaggaatcagcctgaatgacggttgcaccacggcgttgtgctgacgagatgtatatcaccccacacctttatacgctgcatacagcgcagaatccaagtctgcaagtttgagcaaaccaggtatatattttattgcatctccaaaacaataatgcctgctgctgatgcataacttttttttctgccagtttcacttctgagcggctccgaagaacatccaacatcaacttccatcgccatgaggctacgaattttaccaccccgagatttggctggctgactgcgattacgtttatcgtccggggtcgttctattgagccacgttttcacctcgatctcgcataatatataattccaatggaggggattgagtaatgctgatgcctgactgacagttgatcgctcgagaagtatgtcctctcggcatttcggccatgagaaagctgccagtcattgccggagtctctctagccggactggtacagctgctccgtacacagccgggtggacatagaggagcaatctgtaacagttcgatccccaccacgattcaagtttgagcacaaaccgcgggagatctgattgactaagtactccatcgtgggacggctagacccatggaacagagctgcgggcatttcccaggggttgcagctttccgaaccaaggatatgggtgagattgccagggcgagctcagactgtaagacggggaccgagttggagttggaacttggcttgcagtggttgctcgttccaggagttcgcttggctgaggaacctgagaagaacaggggtgtaggagtcactggcattgagctctgagatttggaactaaaaaattccgaggcatgccatggctcaggaataagagggtccggggcatgatcttcagtctgatcttgtacagtcgtaataatgctaccttccccattaattccttttaacggagaagagtctctcgggtcagtttgccttctgaatcgagaggctcaggaagcgaatagaatacgcaagaggcttcccaagtcgcttccgcttagtgttccagttgttgaggtctgggcttttcggccggggcgacatggcggctgacgagctaatccgagcagcagccttccgagcttccgtacattagcctcttagactcatattgtcagatagcggatgggggggattttctttcacaatatcgccatcgcccaccaccttgacgcctgtgatggtggcagaccagccagaccctagtcacccgcgaactgagattgctgacagggatggtacctgccaagttaccaacgtcctcgcctctccgaggctttccagggctccaaacatccagcatgttctcgcaagctcgcgacgttctgtccccgctctttttgccgtattgagagtgctggcgagagcaagcggcgagaaaatagaaaaggaggcggcgtaggctgtactattattggctaggctggaacatcgtcgataccgttacggcctagatacctcaggttccccacagaggaacctccatcagtatcgagccatatcgatgaagtggtcatggaatggactagataggtgctaataataatactccgcatgaccgacttgaattcgggtgcttcactccggctgtagaatgtcgtcaggtcaacctcagagtccatgccctgaaccatttccctgtaaagtcaattgcgtctggtggtgacggaagatgagcgagggggactccgtacagccccagaaatgtcttacccctttcgagcgcttgacaacgctggttggctgggaatgattcaggaggattaacattaatctacacttgcgatagcataaaccgcatcataaatcaatttgctatggatgaaactgctttatcttacaaagtagagtcgtcgctccgatctctattactgataattatgccaatctggttgattcgacggtataacttgcagctgcacggagagtaatcgccaaatccaagttgctgttgacgacgccgctaatcgatcttcccctcgtgggctttaatctgcacccagaaaccttccctccctcctttgagcagttgctctgcttcccctttctgacctctttcccagtatttcttgtgaacaagtagaaaactgaggccagaatcgattagttaagcttcgtcgaccgcagaaatcaggccaaaccaggtcagacatcagctcaaagacgagcgaggcggtccaaggttgtccctttttcgcgtccaaaacgcagtgaaaaatcccgcccgtctgtctccgcctgtcagtcagatagtcagtcagtcaccctctccctttagttagagcatcccatcattccaacttaatcctctctcctcgattccattatctcccacttcctttccctcagacttcctcttcttgctccctttcctttctacccacgcccaccccccctccccctcttctattctctccagtggccctccggaacggcgcgtcttctgcttgattcagaagttccgtgtcttcctaggatctggtcaccatttcctttcgtttctcctcttcctctgcctcgttatctctctagacttgcccgttgtcatcttcagctctgaacttttctttttctttcctccttgtttctttacacatggctcgaccgctctagacagcatctgccgctcctgacccttgtgttccttacatcgtacctcatcgctggctcctccctcttcggtcctcgttcgatccaagcgttccaatactttcttcttttcattcgacaacattcgcttccctgcatttgtctgagcgactttcttaatcgtttgtaccagtataattgagctgcggacatttattagaccaggtacgactattcccgctgccccgttgcttggtaccgatccatctgtcctccaaattgtgattcagctggataaacttcgtcgatgaggccctcgcccaatcttcgaactcggttgcgtggttgtacaatgctaactgacgaatacgtggtacagattctcccccctgttcccccctaccctttccctcgctcgagtgcctcccgaacactatacactgcttggacgatagcaccgaagggttcaattcgcctcatttcctgggttaggatctcttcggaagacgctgctaagaacgcgtctgacttcgacagctctgcaattcgtggaggagaacaacatggcagctttggtacagacgattcctcagcaaagcagcgcggttccggtgctccaaacacgcccctcttcctcgtcgggtgctttcacaacttctcagtccttacaacaaacggactctcgaaatcccgccatgtcctggaatacctacaacacgacgggcaattcggggggctatcggcccggtcatcaggttgtggccccctacgcctttaccagcactcccaacctctctaattcacccaacttgcagaaccgtcagtcatggtctcctagtttgaggcccgagcatcggacgtcctctgctccctctgctccccaactccccgcgaatgcctccctcgtcggaaacaattcccgtcccgttcatcacactgcagctggttctgtatctacttcatcttctaactcctccgtccaatcacacatgtccaaagacgatacggcgattccttctcgccagcttcgcggtgatccttctattcgtcccttatctaccgccaatttgccttctccaacaccttccttcatgaacatatcctcgcctacagtatctcgtccttcacccgaccgataccgtcgtgggaaccgtcgttcggatgcctctgcaggtgcacgctcatctccaccaattctggatgaaaatccccagaacacgacatccgctggtttatcaggagtaagaagtctgataccggagggtaaaggtcatacccgggctaccagcgcagatgataatactcgatcggataagccgcaaccagagttggcaaagaggtatcgacggaggagctggggaaacatggacaacactggcctcatcaatcttgagctcaagttgcccgcggcatccccaatcccaatgccgagtgggcaagactatttcaatcaagatcggcccagttcggctcagtcacatagggatatttcgggaagtatacgttctgctcgctcttccacatcatccgtaagcaacttgattgatccacaattattagctatggattttaaccctgaactaggttgctgattccggcactgtgccgccgaagcctgctacaaagtcggaagataccaaacgcacgccaaagccctccccgctctcacaacctgtttctacaacccctacctcaccagaaacctcgcagtcaactcagcgagaaccacccaaactggcgagccctgcttcgcaacgcctggctgagctctccaagaacgattcacaccggcctggcaagtcacggttaagaagagccttttcatttggtagcgcctcggaactcctcaaggcctcgcaaaacagtcaccgcaaagatgggctttcggtagacaagtctcgcagggaactcctgaaggaagagctgggtgccgaacaagctgccatagctgaacagcaagaagccagtggccttggagaaagcatatactcccaccaccagggtcgtttcttcaacagctccacggataacctatccatctcctccaccgcttcctccgcatcaatcatgttacggaaaatgggcaaagggatgaaacgatcgaccaggtcactagttggcctattccgaccaaaatcagtcattgcatcttcaccagatgatataacagcggagccaatggcgccacaagtgtcggtcgtgaatatcgaagcagaaaggaaaggcgttgcggcaaatgcagatcctacggatcttcctcatggtggaaccgtatttcccaaggtggattccacggtccttcccgcttctggccaggatgacctgacagaagcgctgcaatcgcgtaaaagcattgtaggaggagatcgggaacgcgcagaggtccttgcagctgtaaggaagggtattctcaagagtaagttttacgttctgaactacgacttttgcagagcaacctgctaatgctgtgccatagaaaccaactctgacatagcactatccgcagccgctaagtccggcaatgttacagagaatggcacggattcgccacaatccagcgcgccaagtacacctgaagatcaacctcggacggggattcgacgcccggacgcggtcaaaattgccggtgaagatgaggtacctgaagcgaaaaatggttcacttggaccaccggcggtgccttcaaagagcctcgtgttcagccctcgaattcagttccacgagacatggcccagcggggagtatgaccgccggggagatatcgcgacttgcaaccgactcactccactactcgctcagcagattaaggaggagctgaattcgttcaagatggttagctattacatggtcctcgttgcttctaggctcagctgctaaccgaaacccttaggagatggaagtcacgaaacctcgaaaatctatactcactttctctgaatgcggcattgcaatcggcgtt

SEQ ID NO: 4300 - DNA, 4652 bp, Emericella nidulans
aaacttgctggttataaaatttgggtttgcaagatgaacagtttcttaccaacgcgggggcactgcgacagatgtgactaatgaactcctaaagggagctcttttgggcttgacgagtaccgcacacaccgaggccagcgcgcgaaacgcacaaacaactcaccttcttgtcgagctgggcgatggtgtgctgagcacggtcctggaagctagccatttttctagatatgttatacggctgttgatggtttgcgatagaaggtagccgagggttgatggaagaaatatactgtagggacggcgagaaagagggtgatgtggaggttgttatctcgaaatcagcgagaggtgagagatgaggagcgggtccggcgaatgacggtgtgttcggtcacgtgatgccatgacgtcttgcgggctgtaggtcgtgtgttctcgaccgcgacattgcgaagtggacttgaatcaaggctgggtgactatgacgaatgattcctacgactggctgatcatcttggagttactagaatatactttcatatctctcgaagaaaaaccaattgatcatgtctggactatcaaacgtttaaagccgagagaccaactcgtgatcgacacaagtcctggaacaagaactcttggatctaagagtagaaatcgccaatgggaagcaatagcataaaagacaggtaaagaaaagaaagacggagccactaaataaacatatggtagaaacactttcctttcgtccatagaagagaatagaataggacagcgccgtcagcctgcatagctcatctgccgcccagtcataaacgccggccgccacgaaaaccagtggaatagtacatgcttaatcaacagtaaaaacagtgagagaaacataaatgtgcaaactctgcagaatctttggagcaagagtatatgtatcaagaacggtcctattggacatcactgaaggtcgtttacagtgccaggcatggcgcccccagcgttgaaggtcagtttcaatttcggttgccctggcgttgcagcagcgctgggggtgtcacctccggcaacagacactgggttatcatttgagtttgccgggccatcaaagtcggcgaactgtgggtgagcttcgacttccttgctcagctcggcaacacatcgtgcctgtggtaacataagtaaagaccaatttaaaaggtgtcataataggagtagcttacctcaatgtcgttagcgtcctggaacaggatgctaccatcttcgttgtacgttcgcgcgttctggcaaaggagaccgatatcattccggaagtctctcagactctgatattcttcgcggttgatcttcttcttgatcatgtccatagcgattggattctggatgatcatgtaatagtcaggatactgcgactttggtggtggcttcataaatggctcgataatggaacgtgtgacaggtccatcctcgctatcggaggagtcggctggtaactcctgctccatgtccattaaggcttggtagacattgttgaggatctgttgtaaagcggcccggtcatctggactcaacgtttcgacaggcttggcttgtctgcccctcttgcgctttggctgaggtgtctcctcagctagctcctctgctttacgctttggagccggccctctgcgaccacgcttcttgggttggggtgtttcagacgtctctcgtgatggctcgggcgacgactcgtcgccttgcgccttacgaccacgcttctccttgttggaacgacgcttctcaaccctcgcctctttccgtgcaatcgcatcctcgatggtgtcgtcatcggcatccaccgccataagccattgctcttctgtgaggccgtcgtcgtagcgagtaatcttacgctcgcgagcaccgtgaccagaaagctctatctcagcagcttcttccgcgacggggttctcttcagtcacgtagatctctgggagttcactctcgcccatcagacggggcagcttgtggccagggccgtatggacacgtcttctgccgttccctatccatgcgctggaaaaccgccaattcctcgtctgatcgagccattatgttgttcaggtcatcatcatccatctcatcctggtctccggcttgatctgtagcctcagcagtctcgagcagagtacgcaagagtgcatctcgttcttcgttggtagacttgttatcgaattttcccgcttgaatgaccttgcggtggatgtcgagtttaaattgagctcgctccaaaatcttctcttcgacagaattagaggtgatgagtcgcaagattctgacctcgttcttctgaccgatacggtgcgcacgatcttgggcttggagatcctggtgaggattccagtcggaatcgaaaatgatgacagtatcagcggtttgcagatttaagccgagaccaccagcacgtgttgagagcaagaagcagaaatactcagagtctggggcattgaagagcttcagcaagtctgatcggtcatcggattttgtagaaccgtcaagacgcaagtacttcatcccacgaagacgaagaaaatcctccatgatgttcatgatctgagtcatttggaaaaacatcaaaacacggtggccggtggccttgaactttgggaggattctatcgagcagttcaaactttccagcggtacgccagattagatcatttgtgcctcgcccagggtttacttgatcttccacctgctcaaacacaaagggatgattgcagagcttcctcaattgcatcagcatgttactgaggccacgcataccaactttgcctcccttgccatcactaacaaccatcttattgtgtgtagcaagttgcttgttgagctttgcttgtaaggcagagaagcggcatttgataactctctcctgcttgtcaggcaggtctttttcgacatccttcttcagacgtcggagcaagaatggtcgaaggaccttgtgtagacgacgaatgacaaggagctgttcttcttcagtcaaatccatgcggtcttgaccaccggtattagcaaatggcgtgttgaaccattcgtcaaatgacttcactgatttgaagatatttggcaaaacgaagttcaagagcgcccacagttcagggagattgttttgtaatggggtacccgtcaaaatcaatcggtaacggctggtgtagtactgcgaaagagtgctactaagcttagactgtgtgttcttcatgcgatgaccctcgtccacgatcatatgtgtccactttatcttgctcagaatagggcggtccttgatgatgtactcgtaagtcgttaatagaacctgaaaatttccccagcgaatgttttgctgctgttgttttcgagcatttggcgggcctttgtagacaattctcgacacggacggcgcccatttttcaaattcaaggttccagttcgtcagagtgctcagagggacaatgaccaaaaacgggccattgttcctctttctctcaataatatgcgtgattaaactaatggtctggatcgtttttccaagacccatttcgtcggccagaatgccgttaagattgttgttgtagagcgaaatcatccattgcagacccttcatctgatactccttcaaggtaccaccaacaagaatagaaggttgttcggttatctcttctttatacggtgagcaacagcgtagtagtcgatctttcggcggccctcgccttcctcgtcgctgccggatgcgatgtcttcgtcatcatcatcatcgaaatcgtgtcctcaccatatcgttcagcttggttacgctgttgttgtctaacagacgcggcaagctgtttgaggaaaccgtcagtctggttaagaagatgagaaatccgagaatctttggcttgtccgagaagcttcaagtaggtctcttcatcgttggccttcaaagcctgaagacgttgcttagcagttcgttcaacgcgcctttgctcctcacgttccatgtgctggtggtgttgaagcatcatacgaccaagttttccagcgcgttggcgttgctggcttgccgtttcccgaagttccgcaccgtgattgactatcgcttggagatggacatcctgtttcctcttttctcttgattcgcgggcatcacgttgctgcttctcaagtttctcagtgatccggcgttcgcgcaacgattgcttcttcatacgccgatgagtagcacgattggcagtcatgccaagattgtcataatgaaacatctcatgctggatttgtttgcggaggagcctctgtttaggcaaaagattgagcattctgtactcgatcagagccttcagcttcaaagagtcgtcgccagtagcgacatcactttggcccgagttccatgcagcaatgtttgcgggaagtgcagcaagctcagctttccgcgcattgattcggttgtatagtgcaacttctcgctcctcgcgcacttgttccagatcaatacccggcggcatcagagctggtatgcgcatgcgatgagaccgagatgcgtggtccgtgaagctgaccgttttaggaattaggtcgtatggggactggaaatgctcataaaactctttagcgttcgacacatcagcagttgccgcagcttgttctggctttccctagaaaattttccggg

SEQ ID NO: 4301 - DNA, 1636 bp, Emericella nidulans
  unsure (1)..(1636): unsure at all n locations
tacctagtacaccattggtggaaactctgccccggacgtgggtcggactagatgggttagttctagtaagctcacttatcatcacgtgatctttatcgataatacaagggtatcaaccattgcttctttttctccccagtcggatcgaggaccggtcggaagctgcgggatgaccgtggcaaaggcggctgtttactacccaggtatctctaacattgtttaaatttactatgaaaggttactgatgacagtcattgtctccaggcgctgttacggatactctggcacataccttcaagcggtgtaaagaaagtcagagtggtgaacctctaaccaaacgccgaaagaccaacccaaaagctcaaagcttacgggacatacaaggtctgtcggcttcacttgtacctaatggctatatccctctagcacgatgttgtctgcagttggtatgtgaacgctcaagggtggatgaggaattccactaatgggcatccaggactttgctcacgcaagcccattacagggtgactggagtgactttacaggcacggagcataatctgcctgtcattatcaaattctccaggccacaccctatggaaacgcaagaaagtggaaatgactgtgttgtgctagaaatagaaacgattcaggaaagggaaaccatcttcgtcgatacgtccagtgacccggatatcatcagtcttggtagacacttggcaattgcgagcgacctcgcgtgtgcggaccgctatcatacagctaagctaccgactgcatgctatcagtctactcttcggtgcttcgggaaccacacatcatttcagctggagacagtgattttatggagggattctctagatatcacggactaccagagactacctgatgcggcctcagcagcattctttaggtacgttctgggggaggataaggattatgatcccttcaggatacgcaggacccgggggcctatagcgaggggagacggttggacgcctcaggatttctacgacaacgttcatgtccctcggaatacgcctgaactttcagcacctgttaaatgcgacttgacggaatgtgagctatttccattccagcggcgtgcggtgcggtggcttctaaatagagagggaaaagagctcaattccaacggtcaggtggttccattagagaatcgttcgaaaatcggcttgcccgattcattccagcagatatcngatgcggatggaaaggtctgttttgctagccacttatacatggtagtacgcgtgaccctctctggttggtatcatgttacgcaacatctcaaggctggagtctaggctcaggagctgggtctggcacagactgtagagatgattagtttcatgtgtctgaaccgccggatactgcgccctgaagacacctttgcggagcccggaagcaatggtctgcagaccatcgtggagcgactctaattataacaccgccggtaatactgggacagtggaaacaggagatcgagctgcatgccccgaaactccaggttttccattacactggaatacaacggcatccaacattgtcagatcaggagccagtcgaacttatggctgacaatgatgttgtgctcacgacatacaaggagctggcca

SEQ ID NO: 4302 - DNA, 4901 bp, Emericella nidulans
tgtttcccttcccggggctcctcgacagcagccgatggaccccagccgcgttcaggctttcatgaaccagtcgggcggtggctctgcagatacctcggcgcttaagccgtccaattctcgacaggcgaaacgtctgttcgtgtacaacctgccgccgaacgcgactgtagaaaacttggtttctttcttcaaccttcaactcaacggtttgaatgttatccaaagcgtggacccatgtatctcagcccagatctccgacgaccactcttttgcactgctggagttcaagtcacccaatgataccacagtggcgcttgctttggatggcataactatgggagagcatgagagtaacggggaaaatggtgcagctaagggattggaagtgcgacgacccaaggactacattgtccccaacctcgctgagcaggatctggaaggagcgtctggcatgaaggatgttccagactcacccaacaagatctgtgtctcaaatattccgcaatacattccagaagagccggtaacaatgctgctgaagtccttcggcgagctcaagtcttttgttctggtgaaagactcttcgacggaggaatctcgggtaagttcttgaagtcttgatgacgtgcatagctaatcgtggcagggaattgctttctgcgagtacgctgatcctaacactactaccatcgccgtccaaggtctcaacggcatggagttgggagaccggcacctcaaggttgtccgggctagtatcggaatgactcaggcagctgggttggacatgggggtcaatgcgatgtcaatgttcgccaaaaccacgtctcaggatctggagagcagccgtgtgttgcagctgttgaacatggtgactccggaggaactcatggacaacgaggattacgagggtaagttccgtctctttctcattgattagtggtgttctgacgagacagaaatctgcgacgatgtacgcgacgagtgttccaagttcggccgtgttcttgaactaaagatcccacgcccgaccggcggcagcacgacagtctccaggcgtgggcaagatctttgtcaagtttgaaaccattgaagcgacaacagcggcattgaaatcgctcgcgggcaggaagttttccgaccggacaggcgtcacgacttacttctccgaggtaagtttcatagatcgctcaggaaacaacagttgtctaacggttgcaggaaaactttgacgtcaatgcctggtagttcgccatattgaaacgtcttatatcttgctcatcccacgatgtttctatctatcctttatatctgagattcccgggagatcaacagggccaggcttctccttgaattaatgatgtatcatagcgatcaatgcaaagatccgaactctttctggtttgtcctagtgtcccagtagtcaattctgcggtctggcattgctgatcaaactggaaaattagttcagtgtgcctgtccatagacagttagacaccctgtgagtagagcttaagcttgggcctatagctagtattactaaagacgcttgattacacgccgaatacgatcgttgacaagtgtattacatgaaactgaccagggactcaactgcccattcgccctctcgtactggtgctgccctctgtttatgttaaccccagaccgaggcaaggatgaacaccccagcagcaccattcaatatgccgaagtagatggaacggcttttgcggggaaagttgaggggaagagcgattccactcaaccacgctacattgaaccaccttcgtcctagcgggtaactgcgtagttcgatttcgatactcagattgagattgagtgatatctcgagcctcagtcttgttccatatatattgtttcgagatgataattgggcaaatacgtggatctccacttaaataatgacattgtggaacgaaatgaattaaattgaattaaaatgaattgccaattaacagtgaatattgaacataatatagtcaaatcaacattgaacaagtttgtctatcattgctggagaagatgaaatgatctacctcatcgggctcgtaccattggaattaattgagtatagaatatattgtttctgacagcgtaatacagataccgatacaaactgctttagcttcgtactttggtatatagtgtatagtgtagataacgcactaattactgtacttccgggtctccgagccctgtaacctcgaccaaatcgacctgcctactctgtatgatgaataccgtcttaccccaacactatcacggcgatctactgctattccagcctcagtccgtcgccagttcggtacggaaggaacctcagagtagcgcaagccaaaaggaccatgactcggattgactttccgctaaattctgacaggtacggactatagtgaacgacaagcaaaatatgtctgcgggtaataggagcgaggtgcgaccgagcctgacacagtaaggagaatcattccaaccatgattccagctgactgggtaaactagctctacgttcctggcccgggggtagactggtactaccctattccatccaaccaacccgataacgagcaaagataagggtaccgtagggtttggcacggtaatgccatctcgacgctacgctcaacggggtgagttcccgaaatagatgaaggtgcgctttttgtgtccccggtgatggtagctgcgtaacgccggggtgctccggcggggtttatctattggcacttatatcatgtataggatgaagaaataatgaaatattagcagggatagggaaaatcagaaacattctggaatgcgaaatcccggggctaagtctgtctagccactttctactgtacagggccaccatgttcctagtatatgataagggctggctagaaatgtttatttgagttgggcccggtggtttcaagttcggttccaagacttcaagactttccacgtggtgagaagaggcgaaggaagcgacatccattctatgtctaaccatgtgtgcaggcgcagtagtttacctgaacactaaggaggatccatgggtggccggtgaggagaatgggtttcagactacagttcgactatcccgcctaaaacaattggtgctgcatgtaaacttctctgtttccattggatttagaaagtagaaactagctactgagcaggtaggcagtcatgggactgagaaagagtaatgcctgtcgagtcagattgggctgacgttctccagacgtcaagtccagggctttccgtctagtattggataaccatacccagagcacctccagctccaccatatctaaaaattcagggaaaggttcgttggtttggaagtggattttaccacgggtggtggtgcagatctacttgatacctaccggtttcaatgagattgatgggtagttgatgggtagggactcgaactcgtactattgcttgtgctcggtattttaggcttgcgcgtcgtatgatctgcaaggaagagcatccatggaagtgtcaggcatcacctaccaactctggtccaaactgccaacctactgacgtcgcgctcctcaaactattgaacgtaacattattgtattgctatgccaggtcctaaaccccatgcgctccttctaagaaatccaggttgtacgccattttactcctgaatactccggcccttgtaacacgtcggcttgcgatgtaaatagtcaaggcaaaaagaagcggaattgtatggcccctcggcgtcttggccggtgccgtggctattccggcgaatatgcacgtcagaatacctgacctgctgaacaaacaggagaaaaaaaaaaaaaaaaaaggaaattagggtatagtcgtgcgcgtcgtagatatacattgcttttttaaacataataacatatggaacataaaaatgagagaaccaactgtcatcggtatccctgcgcaaatgtagtcgctggatcccaatccctgcctggagaggtcgggggtcgtggaacagagaagctcattgacggccgcacataccgcgcgtcccggccgtagtggttattcaggtcgggactcagtgtccgtgatgtgtacgcggggctaggggagcgaatctggggctccgcggagggctccacgtatggctcggggttcttgtagggtgatagcatctcgtagttgcttgcgtcgctgcgtttcttccgagcgtcggcagatacaaattcaaattgggcattgtccttggaccggaacagcagatcccaccatcccacgaacatggacggacgcgcgaagaggatgaagttccaaaatccaacgagggttagcaggatgaggagcgcaagcagtgttgctttctttggtccgaattcttcagctttgtcgacgcattttttcgcgtcgccttcgctagctgcgagacatagaagccacggtagcgctttttcgagattttccgccgtcatttcggtctggttatttgttctgatgaaaatcacagcgaaaatgaggacgttggcgaggatgacgaggacaagacagttgcttcgccattgcagcttgagaatcttgcggacgcggcggtatgcttgacgcgcgctcagggtgaccgcacttgcggtgtaggaatgaacattggagctgttggtggtcgaagcggtgtcgtagagagacttgatgtagatgtgcacgcagtatcccatggtggtgaactgcatgatcagggctgcgcctgaaaacgctatcccgggtatccagtagtcctgcaaactcttgtcgatattgatgtgacacacgtccccgaatcggaacgataccccggttaagacaagcatcacagacgttccaatgatgggtacgcccaacccacaaataaacgcccgccacataaaccgaaagcaaaggat

SEQ ID NO: 4303 - DNA, 2985 bp, Emericella nidulans
aactcaggtgacagcgtcggtagatactcagcgcaaaacctgtcatatcgctgctcagcctccaaggggtcgtactcaaactttcgccgcggcccgaatctgcgccagaatcgacccagatgtacttgcatgagccgctccgtgaaaatttctggtgcactagcattggcgctggtgtctggtacaagacacaaccagggaagggcgtctgccactatgccgtcaggaagaaacgggacccgatctagctgccgggacaaatggctgtctaggacatacagactgcaaagcatccttcgctctatcttcctttccaggttcgaggccccatccatacccagaagtggcgcatcagccgggatgcccgctttcaaggcctcgcgactcgacgcggcaagaccctcccaaatttggtcggttctgccgtctcacgagaatctgagagcaaggaagagagtatactgaacgcgcaccagcgacccttcccaatccagagacaaacaggcctgagctaggctgtcaccaacattgctgcaggtattgcggatgtcagtgagcgagactccgccgatactgtccactgtatgggaaggagacgggagaaagtgcgctgtgtatgcgctgacgcggagatcagaacggcggactcgacgtcgcgcacagtcaacggttgattttcggtccaccacagctgatactgtgctaggaagctaggggcatgcatggatgatatgtttcagcctgacggcaagctgattagcaaatcctctcggaaccattttccgcctcaggaaacgcatactaattcaactcatatacaaagtactgcacaagaaaatcaagcacttggcgtttgggaattcggccgagatcccgctccatacgctgaaagagatggatatcagatgccattgtttcgctgccatggctgtcaccatgactctcaacgtcccactacttaacgagacttggtcagtcgcgtcaacacttgcagcgcccaccgtaaggaatctagtgagagcgccactcgctggagcaatgcaggtattgcaagagctatcctcaaagtaaccaaacgagtgggccagggcggagcggcggctgtacgagtacctcttggcctcgtctgaaacggcagagaggggtccaccaggctcgaggaggtccgctcgaaccatagagggctgtgccgtctctagcgggcgaccctgagcctctgtgaggaggctaaatcttcgaggtcggtgacactgccagagagccactatagagacactcctctggtcttcgacggcgcgtacaatgattgcatggatattgacggttacactgcgcacctgaaattaaattgtgtagaatgcaacaatattagcccctttttcttgctctgatgctctgcttcacatacctttgtttcctcgtatggaaaggaacacacgtgctgaccggacatttttggtcgtcaggatgcatcagcatgagggatcctaacatcctattcgaaaatcacaaagcagaggactttcaatgaccaaatgggtctgcctgacgctttcctcggattctgtgaggtgactggggaattggccctgagttatgagcagtaatatccccggtgaggctgagaaagaaaacgaggggatgtcatcaccgccactgtccactagagcctccttgaaagaccttgcccagttccgagactaggttcattcccccggcagctcacgaggagggtgggactggttttctcattgacgacgaatccagttcctgctccttcatgattattggcggggtctacacttctccttcaacgaacagtagtctttatctaaacaagataccatactgtccggttatttaatacggtatttagagcgcaaaatgctaacctcatgtccgacatctttgctgtatctggaatatataatcatagtagagtaattatcacctggtgggcagagctcccggaacaaacggcgtcctgaacagccccctgcactaagcttgtggtcgtataacttgtcaggcttaaggagtcctcagaactattcttcgtgcaatatccgacctcgcgttcggagtccaacataaaggataccagtgcaccgcagaagacctcgacttcggccttgacagccaagtgatctgttattcagggcttcttgaaccaagctccaaaacttgcctctcttcctctcttcctcaaccagggcgcctccgcaaaagatctggaactttaccacctcgacagccctccccagaagacaactttgtccatgctggaaaatccaaactccgcgcgctggactgtcgtcgcttgctggaaccaattgaaggctttttcgtgttcttcctgcccacctggctcgaggaacgcatctctggggtcactgtgaagacctatcgaatgtcacatgccagagccataaaccaaaatattgttgccatacaagaatgattgattgggactaagcacagtggttggtaaagtggactctggagggcttcgaatgctcacatgacgttcccacacgggtttcggcaatcgacttgcggcctcacgaatcaaagttgatggagatagtgactggccttcgcgcccttccggcgatagctgaacggacatatgctatgggatgtgtccaggctgttgtgaaggttggccaatttgccagaaattcggaggcagtcagggttctgtacgttgagtggcgctccagcatttaagaataactgttagtccaggccccagtccctaatgtttagtccatgccttcgttgggctcacacaatgtagggttacaatgtctatcatatcggactcttcaagagcaggaaaagcgcccactattccgtcgatcccggcaatatccggggcccgcgtcccaaatgccggtcatacccggctttgacacaggagttcttcaaccatgagcgcagcaccggccatgggggctccagtgtctacttagtaccccggca

SEQ ID NO: 4304 - DNA, 2738 bp, Emericella nidulans
  unsure (1)..(2738): unsure at all n locations
tggacatagtgtttgacctgcacgaaggaactgagaacatatagacacattcctaaacttatagcttgcattttaattgtttgatattgtaactagtctacgactcctcccacaacttcctatgtagaatctcagaaactgtcttcggcttggcgcccatcttagggcttggggttgtgtcactgttaaaccagcttctcctttctcttcgaatgtttcagtttcaattaccaactctgatttacatacggagcgccatattgagccatctgccgccgcagtttttgaaggcaggtttgctgcgtgtggtccagcgaagacgcggttgactcaagacgtggtgccttgaccgcaggcacgcatctctggtcatccctaggtagtcaagcagggaccttctaacggcgatgctcgaaagcactgactccagaaccggctcaagatgtctaagccactattatcaacaagctcatcatgtcccctttgctggccacgagcccacagcggccatacttacctttaagcctcaaatctctatctaccataatggggcggataatgccatcatctatcttgttccactatatctcacccaccttcatatattgcaagccctaagcgatgtcaagggcaattgaatagccctttccctggccatctcactaagtgcagaccatcgccaaccgatatgcacgggacatcagcagactttgtatccctacattcatttgactatgcaaactcgctgtcagaattagaataagtggcgaggaagtaggctagatactggcgggccatgttctatgataagaatccgcaggcgctcacacggcagtgttctgaggcggccattgaggacaacaccagtacgaccttatgaattgagaagagcttttgatggataaagacatatatggtttattaagaagagctagaatatcaaagctaaggagcttggaaagttacttctgccggtctgcaaccgggagagccacaacatgtatgccagtgtaggttaatatacagtccaaaaaggcatgagcgcctccttcctgcttactccggacgttggtgccttaacaagtaagttaggtaagctgctcaccctcaatgatgatttactcacatcaagctggtttaaccctatactataagcgcctgattgcactgctaaacagctttcccatcagttctcagtgctcttccaggtactgaaaggtatgaggatacacatacctattcttaaaggctgaacaacatgcgtatatatggcttcgcaggggcacaccatcgtttagccggtgtcgtagtcgccttcaattagtgacacgcaggaccatgcaagcttcttggacatgttaagcggctctcctacttatagatttccaagaactggcagatacccctggtttcaatcataagccagcccccgtaggagctagattatttacaaacagcaaactaacccggcgactacctttgatgagtgctgactagaaactgattactggaaatttaatcattacctgagtatattagtagcattaaagggaaaattacacatctgccatgacatctctgattagctaggaaagctcggtcctgacgaaaatacttttgttatgggttcctcgtacaagccatgcttgcttaacatggtccctatttctacctgcactcattggatatacttttcttattttcaacaaagccttcttgtacatatggcagaatagctttgaacaagtatattgtcccatacaataccgtaattttgcagatacgtctctgtcctacctagtgagaatacggttgcacaatacaccgcatcaccgccacttaagtcgatctcaaaaccgtggctgctgctccactcagaccctaaatgcactgcaaccactcactgtgcccacatagtatagggatttacccattcacgacgagaaaactagtggcgttgaactttggttatgcaggtctgtcaatagctcgcatactaaccgtcaattcggctgacccatggcagtgcaaatgcttacatgcatgatcctcggcagtggagtccagagtgtagcaaacggttactcattgtgggagcggacggcaccgtcctcaaggcaggaactggaactcaacctgcgctggaacctgtgctgggaaatgggaaatgggaaatgggaaatgggaaatgggaactagtacgccatgtaggaggctgcactaagtgctcatctttgaagacaatttgttctagcatcgagatctggtaatatggtaatagcagattgatcccatggtatttgtcggtgaagaagaccaagtaaatgttgaacgagcacagagatactgacctatcacagcggattcaggtttgttactctagaagaacggngacactgtgaggagtcacatccgacaaaatagactacatgtttgcatgcaaagagccactagttgtccaatgcttatcgcaaattgccttgatcgaaaaagaaacggctgaaccttttgctagatgttacagtacgcccgagccaaatacaaaaaccgttgcgccagttagtcaagtgatattgttccttcaagtgtatggaggattcgggtaccagataagcccctgcgcctgtgaaaccggacaatctttgtgtgcaagtaacagtgtctacaagttaacaatttcctcccgtagttgagtaacaagaaaagtaagcgcgtcattcactgacgtaaacagtgcg

SEQ ID NO: 4305 - DNA, 1117 bp, Emericella nidulans
gtccaggacggcgatcttcgatggtgtgatgcgggtatcttggagtttcagagcggaccgtttctcgcatcccaacacaacgacatcttttccttttacaccgacagcgcaagttcctacagtccgtagaatattgggtcaggattcccgatatgcagtttgctagcgacggatcttaaagtgaacctacctcgcttgacagcttccatagcatattccacctggaagacgtgcccatcagggctaaaggtccttagttagttgcgtcgcaagcaaaagggagcattttccgcgtacctaaaaactgtacagttgcatcagctcaggttcagtaccaacgaagcagttactaaagaagctaagccgtcttacctgaaagagctcggtcgtatccagacataatgagcggtgagtatctttaggtaccgcgggaaatcttgaatacgaggaatgtagactgattaaggtagctcggagcgtggtaaggagatgcaattcctagggacaagggcgtggggtgctgggatgagagagccagcttgggcgatgacagatggaggtgaacgcgagtcccgcggttgcctcagagctcaatgccaagcgcgcggctaactggccagctcagtcccacagctacagacctacagcttattgctgaaggaggctcatacaattatttcgttgtaaaactgtattcctgcctaactgcttccaaggtacctgagtatggttaggaaataaaataacgagtttactctagcaaaaagactgcttgcgcagtgtcttgaatacagaaaaatgtgggctacacacttgctgggacccagcttcactataacgagtaggagtcgaagttgccttgggatgctgtacatgatccgctaaatagtacctaagctatagtgtggcacaaggaccgcacattgacttttcctaaaaagaacacaacacatgaaagacaagatagaagagatacaaataacaggtcgagattatgaacaaccaaagcaatctggcggtactcacaatccccgatccgtgtgctgcgcatgtccaaaagctgtcattgctggatcaaaaggaataccccaacacccccaacagttcgtttcatgta

SEQ ID NO: 4306 - DNA, 2850 bp, Emericella nidulans
agtattgcttgcacacgggctttttttatcagcataccatttcatttagactagggacatagatgtagtgaaattctattctggccgatgtaagccataataatatgtacacgaaggtaagagagtcattatgtatccaatataatcaaactccacgctgacagcatccaagctgcatgcaataccaacaccacaacaccagccctattcaaaacggaatagtaaacgaaagcaaagaaagagaagaagatcgattgtaagccaactgtgtacaaaagaaattcaagtcgatcgggtcaagtcggtcatagtcaagtcatcacggagttaaagaaaaccaaaaaagaacagaacaaatggaatggctagtccatggtttaggattctcttccaaagctgcttttatctttgcaaaaaagccagctggccaggcagccagttcttcgtcgttgggcacgccgcggactctgcaatggttcacaacgttaaccaaaattctgcccaggacatcctgggtgatggggacggcgccctcaagctgtgcgtcggggtacaggaatgggtcccgttgacccaagaggtcgctgatagtcggtcgcagtgtctgatctcgttgcagacaccctttcagagtccgtatgagtcctggaggcacctggatgccgccgaccccgaaagctggaaaatcaatcttcactttcggattcggaattgccatgatgcgctcgtagtacttggcaatctttgcaaaaggaggctgcccgtagaccatcttgtacagtatacagcccagactccatacatcactcggtttgccaagcttcatcatcttgccaacacttgctggtaaacccagagaggcatttgagtcaaccagcgcttcaggggacatatagtttggagtcccaacctgctgctcgcggtgtacattgacagtattgtcttggatggcgttggcaattccaaaatcgatcagttttagtctcccttggacgagaaggaaattggcgggttttaagtcggaatggacgacattgtattcatgaaccgcctggacacattccagcatctccttccagtagaaccgggtgaagttgatatcaaaagtggcatcctcagcattcagtttatacgtcagaaccttttccaggtccgactcgccaatctccatgagcacgctgagagtgcgcttgtccgagttcaattcccagtcaaacaagcgaaccacacggtcaacgttttccagtttcttaagaagatcaatctcccccttgtagccagccaaggtcgtcggatcgacatcctctaaatttacacgctttagagcaaagatcttatagttctctgccattacacggtaaactcgcgagctacctccacgaccgatgcaatccaagcgggtgaatggcttgtgattaatcgaaacttcggtacgctttttgcgcgactgagatgccgtagctgctcctcccgtggcagtggcggtttctaacacggacatcttaggaggagggggcgcgggtcgatgaggtgtgttgttactccgattagaaagtatcttccttggcgatgtccctgctggaagctcttggtccttcttgtcatcgccgtaaaccaccgaaagtttctccggtttgtctagaaaatcgaatccctgtggcttggttcgcttaaacgttggtggaggttcattctcttggtcacgggtggatggtaatgtcgggggaggaggtactttaaatataggctctttcgagcttgaaggttttgaggaggcatcagaagatgatcccggggtggatttggagtgtgacacatatgacttcggcgaagaggaccttgagaatggcccgtcaccggacgaaatgcggcgatagtctgtagtcttctgtggttgctcgggatctgcccatgatactttgggagacgaggccctcgcacttttgtaattatagtcattgttatcaccgccttcggcttccttagagtcggagagatagcttggtgattgatcctcctcactctggcgtctcagcacaccgcgtctggcgggcccgttgagaaatgtgcccgtcaacctgccgactcttttcacacgcaaggaactctgaatgccaatgtcttctgggttgcgtgaacgaagcacggatgacgttccaatgatcggcgcgtagtcatcatatctggacttcccttcttcttcagggcgatctgcgcttccttcttcgtgaagagggctccggctagccgatcgccttccagacggtgatgcggatgtgggagatcgtgtgtgagtacgcgacgtactgatccgaacactgcgtgtcctaggacctggggtgatgaaatcacttgaataatgttttgcctctgcttccacctccgcattttccccactagttagatgcgatccttctcttcgcaattttgagccactgccgaggacagatcctatgcgaacaacgcgtggggcggggcttccgttcgattgatccagcggcgaagtggttcgggatcgtctctcattgctggacgcagctgatcctacacgcaaattcggccggtattcgtttaggcccctggtccgcagacggggtgaagcatttccgtcgtcctcgtcgagaagagccttgacagacgcgctgaatttcggctccggtacttcgtcatcggagctgtcgccggcagagtattgctttgatattgatgcagcgttgcttcggagagcaacagaattgtggacctcaggtgaagagcgcctggacccaaagcgagagacagaggaggcgcgggacatctggcggattggtggtgatcaaagctgtcgcatgggcggtagagagagaattc

SEQ ID NO: 4307 - DNA, 7042 bp, Emericella nidulans
gggacaggagatggaccaatttgggcaagtccgacgccgcttaaaagtttggggtgtgtttgcgctgcggggcttgttctggcgtgagcatacggggtgtctttaattgcgcccatccctcccatgatttcgaaagcccaggcaaggggtcaattgctggcagcactgaccgcaaaatgaaggtatgaattgttggctgaacttgcttgggattagtcgcgtgctaagaccagtgccctagctttccgtcctatccgttctcctggtcagcgtcgcccaggccgcggccgctccatggagaccgcgcgagcctagagccgccggatcgaagcgcttgacattcaacgaaactgtgattagtgcggcgctgtcgccttcttcgatctcggtgcaatggatcgcgactgagaacgacggggattatgtgtaccaggaggaggatggaagcatcaagattgagagcattgtcaccaaccgatcgcagacaatcgttccagccgagaagatacctgccgatgcatacagctattggattagcccggacctgtccgcggtgctgtgggccacgaattatactaagcagtaccgccactcgttcttcgccgattactacatccaggacgtcgagacgttggagacggtgccgcttgtggaggatatggttggagatattcaatatgcggaatggagcccaagcggcgattccatcgcgttcgttcgcggcaacaacttatggacttggtctgacgggactgtcacggctatcaccaaagacggtgggccggacatgttccatggcgtgcctgactggatctatgaggaggagattctgggggaccggtttgcgctctggttctcgcccgattccgagctcctggcattcttgactttcaacgagactggcgtacccaccttcaccgtccagtactttatggacaaccaggaaattgcgcctccatatccccgcgagctcgacatcagataccccaaagtgtccgaaacaaatccgacggtcaagttaaatatccttcagctcagcgacaacaccgtatcgaccattccaatcgatgtgtttgacccgagcgagttgatcgttggggaagtcgcctgggtgactgatacgcacactgagctggccgtcaaggcttttaaccgtgtgcaggatgaatcgaaggtcgtcatcgtagagaccgcttctggcgagaccaagatcgcgcacgagcgtgacgggaccgacggttggttggataacttgctttcaatctcatacgttggtcctttggctttgggctcgggggatgcatcatccgcttattatgtcgatctttcggaccactccggctggacacacttgtatctcttctcaacttcaggcggcgatcctatccccttgacggagggagagtgggaggttacgtccatcgtgagcattgaccaggagcgggagctgttttactatctctcaacccagcatcatagcacggagcgacacctttactcggtgtcgtatcggacctttgagattacgccgctcgtggacgataccgttgaagcctactggagcgtttcgttttctgcaaaggccggatattacattctaacgtacgcgggtcccagtgtgccgtaccaggagctgtactctgtgaaccaaacagccccactgcgtactctcaccagcaacgcagccctgatcgagaagctggaggaatacgcgttgcccaacattagctatttcgaactggagattccaagtggtgagaagctcaatgtgatgcaacggttgcccgtcgggttttccccggataagaaatatcccgtactattcactccatacggcggtccaggagctcaggaagtcagcaagagatggcagtcactggatttcaacgcgtacattgcatccgaccccgagcttgagtatgtgacctggacggtcgacaaccgcggaaccggctaccggggccgcgagtttcgctctctggtggctaagcagctcggaaagctcgaggcagaggatcaggtctacgctgcaaagcaggccgccaaacttgactgggttgactccgagcatatcgccatctggggttggagttacggcggttatctcactgggaaggtcctggaaaccgacagcggtgccttctcgcttggtttactgaccgcgcctgtttcagactggcggttatacgactcgatgtatactgaacgatacatgaagacactttcgacaaacgcggagggctataacacgaccgcgatccgtcacacggacggcttcaagaacgttgaaggcgggttcctaatccagcacggcaccggcgatgacaacgtccatttccagaacgcggcggcgctgggggatacactgatcggaaacggggtgacgccggagaaaatgcaggtgcagtggtttacagactcggatcatagcatccgttataacggagggaacgtgtttctgtacagacagctggcgcaaaggctgtacaaagagaagaaccgagcgaagaaggagcagcaccagtggagcaagaggagccaggactgggttgtttagcatagtccacatttgactgtaacagtttgggctcagcctctgaaatcaattcagccttctctctttacatcttctttgtctatttcagcatatttgaacatgacttattggcttgcagtgtcccccatgaatgccatcactcggtatgagcttgtcgacagtgccggcggcgtaagcctgccgcgatatctcttgagcagcttcagaagcagtccttctcaaccaaagaagcaacatcagacgtaggctcgagcccccacgaccataaactttggcagcaatagctggaagcagcgatagccaactgaccttccgtacaggccgaatatgccagcagggagtagagcgtcgtgaaattacgccgtgaccgcaatggtcatcgggcgtagaagtccatgcggccaacgcaccgtgtaataggacgatcgtattctagcctgcgtatctatgctgacagctctacagtattgattgataaacacagatccagagcccgtgttcagctagcttgggaccggcacacctgacgcagtcgagatttggaatcacatcccagagcagtgacaaatttcacttctccaaagccccggccaaacctgggtagcacaatgcccttcgatgagtatgacgcgccggttcatttctttcgacaaatagacgttgatcaccgcgccatcattctgagacagtagcggagtttgagagccttccaaacctatgcttgtttctcctaccgacgagcgtctttaaggaacctgaacctggaaagtgcaaccaattcataccaacatgggcactggccgcgtgggagcggtgggcttgtccttgagaagatcataatcgatatggactgactcctgatagtgggcctgtcctcgttgcacgaaaatcttgtggtctagcggcactcccttggttatctgccgaagccctgatgctggtagccagagcaatgggctttgtgcaacatccggtactgttctatctctcgtagtttggagctgcagatacgctgcgacaccgaactgagatcataaactggcaaccacaggaatctcagtgacacgtagctatgtaccgctgagcttcgccgtgtcaatttctgtggcgcgtcagggtcacaattaaaagaccttttctttccattctatcttgttcgttttctcttctttctttttcttcagtattcttcctcaatttttattctattggtctttttattttttcatttcccttcctttgatttcttttttttccagacttgaccatcggtttattgtttaccctgctgcaggacttgttctggccattgatgcgagtttctggcgccatacaccattgaacggacagatcacaagcttgcaatctagtactagggcggggttggcccgtttcttgaaagccttgaagaggtgagcccctccaaggcatattaccccacttgacgaggcacataccccaggtcagaaccttggatattcccaggggtctggcacaaggccagcgataaaaagggtcgggacttaagcgacccgcggattttccccattacaagcctcgtgcctgagtgtggagtacgtttggaccatccgatagagacgctgccaacacgataatgcgcaacacacttttagccatgtcagttggacgagcgttcaacgttttgagtgaatatcagccgtgaaactgattagcaccaatactctctcctgtgaatcataagatcataacgtcgggttgccttgtgtatttttttctggaagagtaatgttacctttccgcgagatatcggtatatcagcatacaatgctcgactggtcaactcgccccaaagcgctggcgtctcgtcggctttctgaggtgtcagacttgcacgctcggttcgtatccaatctatagtaattggaggtgtcttaacaacatttgctcacatacatagcagctaactagatgacgaaaactgagcgcgcggcccgtctaccagaagtggtatatcgtattgcgttggactgcatccgcccgccaactgtggcaaatgaataagaccagaaagctcagcagcgagagcacagaaagcaatgaagagcaacagcttgagttgcagtcaaacaatgcatagttagatgaagcatattgtgtctctctattcaaccctattgagcgagatgtacatctcggcgtgggccatgccgacatcggccaaacttcacctccgctatccggacacaatgtctggttccgacgttatgcatccaattgaatatcgccattattatgcataatgggcattgcttggttccgttccgacaatccggccctgcaaaagcgttcatcatgctatagggtggcacatcacgttgccatgactctcgaccacgcaagtggcaacgggcaacgcaaacgcttgcgcagagccagactggcctttagcagtcgtacctcgcgcgtgcgcatagtacggtcgattgcataagtgcccaggtgccttctgcggccatacctgccatccagtgggagtttgcgaatacgccgggattggtatctcgctcacttcggcggatccaagttcagtcacccaagactcaaagtaactctgatcccccattaccgaatagacatagacattcccctcctttgactggcaccgtcatgctctttgataacactgcgtccggctcgcacgagcctcgacacagcctggggagggtatagtttgtacgctagacttgcagaaacattcgcaatatgttcttgataacaagtatgaccttgcgagagatctgctcggtgagttaggctggcgaggtaactctaaatcacggaaaggagccggtgcctcagatcaaggaagcttccccttcctcaggtataagcaatccaccatagaaaggaaagtattccgacttggtaggcatgaactttactactttatgcgagatacataacgtattgttgaggaatcgtgcccgaggactcaccctggctaatcgtcagagagtatgaatacgcattacgggcactcaaccaaggttttaaccaggaaaccgtggtgtattttccgcaaccaacccagtgagctcaacctagacggtggaagccaaagctgcggggagttgcgagccattatagaaacctgccgttggtgtcataagctgggccgtgggatgtagaaggttaataggtagacatctgtttcatactgtcacaatgggaaacgccttgactagtataatagtggttagggatcataaaataaagattcgttagcggcgttgctggacaagatgcatcgtatgcttgctgttcttgtaagaacttcccaaatatatatttgtaacattccagataatagccctcatcagctggacagcatctttgcattccaagcaacagacaaggctatgaaagagacattcaaagtgctggatcatgtcgaaaatggacaactacggccctcttcatatactgcactatatataaccagtacctgcagaggatcttcatttacggacacgatatatacggtgtaccaacacttcccgattctatggcagaaaggcctcaagtaggggtccacaaatgatgtgagttatggctggcataaagttaagcaggcattgccactctttgggccagtccgtgtctgtaaggtgcgttcacacaaccaacgccacctgcgtttgcacatcatatacaaagcaatagggacaacgtttccaagacgctaacaatactgatcctgattccttagcgtagaaaatgcacaacgctggaacaaaagccattagcatgttggggaagtataacccccgcaccctgggcgcgagtcaaagaggggtctccaagcgttgcgccatggcttagctctttgatcttttcttttcttcatttgcctttttctgccatttttcttcggttgcgaggggggagatacgtaagtagacgccatggttaactaatgggtagtcccggattatattagagcagccacgtggaaaatggatggaatggaagcattaaatgaagacgaaccgttctattgaaatgttagaatccactgttctaaccggtttaggcagctgagaatggaagctgcgatgacgaaccagcaaaccataataatatcatccagtgaagatctgcttccaaggaacatgcccttcacctgcactgaccatgccgccgcatccgaccagcgcgaaacctcccttcttcagtctgaaccgtggagcgtggactatcgggttcaggagtcggagcacaagctgtagagcaataaccagaccgatcgcgaagactgagggaataacggcccccgttgcgttctttaaagcactgttgcgtcttttgagcagcagtaaatcacgcattcagcaggctataatcacgcattcagcaggctaccggatagacatagatattcctaatagattatgggtatagactcgttgagtgctctactagcctttgcactagacttaggag

SEQ ID NO: 4308 - DNA, 4813 bp, Emericella nidulans
cgtctgtactttgtatgcttgttgacaatgccttttctcgtcgggaagccactgagcctggccatcacggccacagccggtagcggttttttgctgtgagtataaccattcgttaaggcttcgccattaacagctcagattcggatacgaccaaggtgtcatgtcgggtctcctgaccggcgatgcttttgtccgggtatttcctgagattgacacaaccgtgggaggacatgggaactcctcgttgcagggaacagtgtatgttctcctccatatggtctgttgaattgaaggccatgactgaccgtgaagacagggttgcaatctatgagattgttcgtacgggatccaagcgtccgcacacactgacagtagacagggctgcttctttggcgcgatcatgtccctccttgttggcgagcggctcggccgacggtggtgtatcatggcgggttcagtgatcctttctattggcgcggtgctccaggccacctcgtatggcattccgcagatgatcgttgggcgtattgtggcaggggtcgggaatgggctcaacacgagcactatacgtaggtttatccagagatagcgagagcactgggcgcttaggtgctgacggaggcagccgtgtggcattcagagctgagcaaagcgtctagtagggggaaaggggttcgttcgtttgctggttgcttattgatggacgatgctgattcccgcagcttgcaatcgagctggtcatcaacatttttggcgtgatgacggcgtactgggtcggtgcgtaagggcatctcctttcttctgctaggttgttggccgctcatctgatatactaactaataccagactacggcatgagctacgtcaacaatgagtcccagttccgctttcctcttgccctgcagatcctctttgccatagtcaccttcctaggtgtcctcgttctgcccgagtctcctcgctgggtgagtagccaccgtccatccatgcatcaacagcgttgacgagccagctcatcgcccatgaccgccacgccgacgcccgtcaggtcctctggtctgtccagcccaatgcccgattcatcaaccaagacgaccccgtaatcaacatggagatggcggagatcactcagaccatggctgaagagcggcaagcggccgcagagggctcttttaaaaggctcctcacggacggaccgcagcggttccggcatcggacactgttggctatgggcggccagatgatgcagcaactgtcgggcgtgaacctcattacctactataacaccgtgatctttgagcagtcggtcggcatgacgcataacctggctctattgcttgctgggttcaatggagtcgcgtactttttgtcggcatttgtgcctgtttggaccattgaccggtatttgtctaacctgcctcctcctgttctgcctatcctgttaccctgaaagctgatcaatacagactcggccgtcgcaaactgatgctctttgctgctgctgggcagtgcgcctgcatggctatcctggctggcaccgtctatgacggtggtttctcggccggtattgtggccactgtgatgctcttcctgttcaactttttcttcggagtgggaatgctcgccgtcccgtggctgcgtatgctcttgttttatagctccagatccctaattaagactgactgtttttctatagtcccagccgaatatgctccgttggccatccgaactcgcaccgctgcgttggcgacggcaacaaattgtacaatccgactattgcccgttccaggtcattttccaggctaatattaatagggatcttcaccttccttgtcgtcgaaatcactccagtcagcatttccagcatcggctaccgcacatacatttactttgccgtcttcaacttttgctttctgccgatcatttacttcctctacccagagacacgtaatctcaccctcgaacagatcgaccgcctcttcacgggcgagaaggtgcggctgcactgggatgcctcgatgggagtggctggtgatacggagcatcggctgcaggagaagatgggagacgcagaggtgcagcatgtggagtgatgctatattcttccccgggtagatattttgcggcagtggcaacagaactgactcgttaagtgggtaactctatctctatttcttcagatcttgattttttatgtttattttttgtctctcactactcctttgggatcggacattgtccgactatcctccgttctccactgcgctgcgcttgcgcactcctgaacaggcaaattctcttcgtgcagtgcattgcattacattcttaagtaattctggatttccatgtgttgggacctctttagacaaaaaggaatctgtctcatcctcttgatgtaatgttatggatatcaatatgaatcctgctgagcatgaggactcttcccgttctataccccgcaagcggactcgcaccggctgtgtgaattgcagtcggcgcaggagaaaatgtacgttggaactatgtagaaggtagtatgatgcgctgacaatataggcgacgaggccaagccaacttgcacggggtgtaaacgtcgaggggaccgctgccagtggcgcgtctatggggcatttcgcgatgccaacatcaaggtgctggagccagggcatccgtcgatgagccaggcaattagccggccgtcccggcagaaagaaaagttcaaggtatgaagatataaggaagatgctggtagaaaggcgctgacggtgcagatcctgacagtagagccaactcgctggagggagggcaagaatgatgccagcagagaggagaaaacgccaggcgggaatgagatcacatcgccagcttccgagcaggctttggagacgtcaatctcaggccctgcagggcctgagattctgcggccagctcaaggaccagacgaccccttcccgagcccagggcatatggaaacggccaaagacctcacttctccgtccgactcgacccagttcaccaatgagcgccgtcattcatatatatcttctccagagctgatcgttgacgaactgactgccctgcgcagcctctctcaatcttaccctggcatgacaccgccccttctcgactccagcgtcttttccgacctcgacaacccagccgacgacgtattcctgccaggatcggcctacgaggcgctccatacggctctccgcaaccgccagctctggacagcacgccctgacacacccagtcgagctgcctcgcctacaggtctaaattatcctgcgccggatcatcgagctagcgagcgggccaggccagaccggttcgagttgccgccggacagggaaaatattctatggcagaactatctgaacgagatttgtctctgggtatgcagctttggtgagggtcatgaagatgtgctgacccgaccagctagatatgttcgacagccaccgccacttcgcgtcgacgttcccccagatggctaaatcggcgccgcacctgcgatactccatcctcgccctctcagcacgccagatggagcgaaagcagaacgaaaagtcccagtcggagagcctgtctctgtaccaggaggccattcatctgctcctgccggagctggaaagcaagtcgacgcctgtgatcgcatcatgtgttattctctgtgttttggagatgctgagctgtatgtcggtcctctctcatcttatacatatatccagaaagaagttattgagggacgttgtcaggcaaccccaaagaatggcgccgccatctagacggctgcgcatatctcatccaagcagccgagataaacggcttttccggtaaagaagaacaggctctattctggtgctttgctcgaatgggtactcaatccaacctctctgatgagccagaaactaacctgggtagacgtctgcggcggtctcatttccgaagaagaaaccatcatcccaatttaccgctggatcccgagcgatatgaacccacccaacgcaacgcagcttttcctcgcctctgaccacgatacctacgccaactacaccgtgtatctgtgtgcacagactctgggcgtactgttccgtcgcccgccaggctcgtcaccctcgtaccccggcagtccggacgataatagtgactgttatgttgcgcggtggagccgcctgttcgaagcagtagagcagtggtatgagaatcggccgagccagatgaagtcgatattcagtgtgtcgacggcgacatcagccgattgggggagagagaggccgttcccgacagtcctgtatgcgaacggggctgctagtatgttctcccattcctggtcttctaacctttattatcgtccgtctaaggacatggatgatattgacgcaaccgcccatagtatctggtaaccagctctaccatacttgcgctctactccttctccagcgaaaaccgaaaactctatctcgtgttcgacgaccggtactattatctcttttccatatttagtcagaattatactgagatccacttcagaaatccgttctctggcacgcgcgccagatctgcgccatctccacgtccaacgcccaccagtaagctagcccgtccccttcccctaggacctgaagccgtgtcactaagctgcatagtggctgctggacaaatgctctacagccgctctggatcgcaggcaaagtaatgtcgcatcattcagaacacggggcgatcgtggagacgctgacgaggatcgagcgcgaaacggggtgggcgacggcatggcgggtggaggattacgcgagttctggggggatga

SEQ ID NO: 4309 - DNA, 1307 bp, Emericella nidulans
agttccggtccaggcgagttaactccccggctcagcccgtggtggatagaatccagatcccttttcttgtctattggcagcgaatcgatgttacatgttgatcgcggcatctaatgtctgtttgctctctctttctctctccagagtctttactcccctaaccgagggaataggcacttctcaactcaaggagctagtaaagggctcggtggcgcccgcttcatgcatgccactgtgctacaagcaagacatgagcgcatgttcttagactcagatcgttatcgacatggacattgttctagcggccaccccgggaatagaaccaccggccgggcatatcccccagtgcgagggcccattctgctacttgcaaataggtacgattatcgcctttgctgtcacgtatttcttcgcgacactctttatcagcctgcgatatttccaggcgttcaagctgacgcagaaagtatgagctcgatctaggcataagatggagggcatccccttcgttcgattccatttactctgaacgctcatattcgatagtgaccattacagtctagaatggaatcggcctcgcttacttggataccatgctcgacctgttcaggaacggttggggcaagcacatgtgggacgttagtctcgcgcagctgattgagttgaataaggtacgtagtggatctgccatatactacctcgtctccacccaacccaaatgggtaggaatcccaaaaattaatggactttttcagggccttcttcccaaacaaaaatttgctacttgatctggccccgccatcagcaagctcgccatcctctctgtactctatcgcatcaacccggccttcgtctaccgcgttgctgtcgtcggcactgccgtcttcattttcacatacaccctggctctatgtatcatcacgggcggtccctgttcccctctcaaggacgggacgctgcaatgtctcgaaaacgtcgcgctctcgggtgcggtgcttaacatctcctctgacctgatcgtgatctcgctgcctatcccaacaatccataatctgcaactgcagctgaagcagaaagtcaccgtgggctgcttgcttgcgctggggtcagggtgcgcttcccccgctctttctaccttgttagctgtcaaatgcacagacttggcctccaagacgacccaaatcgatgctaatgtgcggtacgtagtgtgatcgtctgctccatcgcccgcctgccctacgtcatccgcctcaggcacacgcccgactcaacctggacgcaagccatcctgggcgtctggtcgatcg

SEQ ID NO: 4310 - DNA, 4372 bp, Emericella nidulans
attgccctgggtccaagttgtgatccgcaaacagacgacatatggtggcagcaaagatgaataacggcactgacatggtaacaagtgttcggaaatttgcgttaccaggccaatctggaggaagagattgctcgtgcctgattgcattgagtttgttttccaagaacatggatatgtcgcgttctattaaaggctcgggaacctcatggagtattaaattgtgatgaccaattgtccggaagcctaatctgataggcagctcaggtcgactggtaataaagaaccgcaagtagggatatttgaactcttgaacccgtggcaagagctggagaatgatgtggatttcattttcatgttcccattcatctagtgcatcaaccacaatcattaaaggtgagttctgaagtttggattgattcagactttggagtggtttgtaaatgagctcattaaactgctccttaagtggtttggttgaaattcctgggttatcccgaataacctgtagaatagccagcgcagctccgggatattcgtaaagagctgcttggtgagtgtcggaaagaaccgagctgcgttgccacgatctccttcacctctcttgaagaaaaagcttgcccctaacaacccttgtttctggaaggattttgcaatggttcgtgatattgtggacttgccagttccagccaaaccattgagccagaacatgcattttccttctggtgagacagtccacttaaaagtctcgtcaagtagctcttctcgagtcccttggagacatccttcctcatgctggtccatataggttccaaatttaactcccgcagcaattggtaactcctttagatcagtactctcggcaagggctctaatttcttgcgcagatccggcggttattgaatggagatcatgaatgttctcgaatatattgtccagtcgatttctaatccctgccaaatagcaactcttattatgagaaatcaagtattaaaggcatctggaactaaccgtccaaaacttcactagcttttcgttcagcttttacccgatgagggacggtttgatacaagagatctcttgtatatgcagctgcaaccattgcagcccagccttgccattctttgcttttgtgcgagtctgcatagtcacatacaccacggatgaccaggcaggggaaatggttcattagtcccgccgcttccatttcaaagcatagaacatcctgctccactgctagcttgtcacgaaacgttgcgtccttgacaccctatttccagatgctattaagccatagtgaatcacagggtcatcgtcctcgtccgttcgctttggtcgcaaaaccaatctcgaactgtcgcagaactcaccgcagcttccctcagaatttgagtgaacaaaatggctgtcaaaaagtcgatcactttccaaaggaggccgtgcaaattttcgcttcagccgtttattgccttcaagcacggtgtgaatgctctccctcaaccggtggccctcctcttcatattgtgcttgaagcccagaaacggctgcgcgtaggacaagacgaatgtcatgccttgtgggtaccccgccaccataccaaccatgagcccaaaacgaatgtgtggaaaactgtgtaccatgtccctagctactccagcaactgatgatgtgccgtattctccatctggcagaacagcaataacaacctgatgaccgcctatttctcccagtgtatagtgattgttatcgttaggcgaaagcgtctccgggagactatgtttcttgtcgagaaaagctcgagcagcaacatattctgtctgcaaggcacatatccaaccaacagtgtactggtctggatcagacattgtgggccgcaggtggcagtggtgtccgagaagtattctgcgccaatttgcacatacaaatctgatcttgccgcgattcgaaggctaggcgcaagtcgaactagaaattgtagagataaatgaagcgcttcactcgaaccttacttgctggaaagaggggtaaggagtgaggctgaggccgctgggcataatgcatgattatattagcctgaactattcatttatgccaagcctctaattatgtattttcatgaaagcataactctgactgtaccgggctctccagccagcgaaacatttcttcgactccttatggagacatcgccttcggttatcgaggttaccagtgtcggttctgctatgtccaaggtctacaactaatccaatgtattgaaggacataatctctctatcacaatttgtgtaggtgtctttatagtcatccatgggaaagtagggatgccgatgcgaggcatgctcaagactgggatacgggggtaggacatgcacgtcgtagatattgctgagtacaaagagccctcatccggttgtcaggctttccaaccctaaattgggccgagtcagagtgaggtgtagagttccgacagcggcaaaatgacatagctcgatggtaatctccagttatctgtcagaatgagtgtgttctgaaaatgtacaagtgggttcgatgtctgtcgaagccgcccggtcaccagtacaacaaaatctactggcggggtggacatcattaccaacttcagcaatggacaaagtgtaaaggtcatactttctgctacaatatgtaaagcctattgtttggaaagggatacagttcaggctaaggcatgctctagccaggaccctaagatacagattggcacaatcaggtgaagtattaaagcgcccctggaagtttggaagcggctgaatcattctcatagcagcatggaatgctgacttgacgagaagctctatggcaacgtcaaaatagtgactctcgtcccgtcatgcaccgcgcatacccaggctgttacaagccaaaaaaaagtttaagctgcatcatccgtgaatcgaacacgggcctcatcgatggcaacgatgaattctaccactagaccaatgatgcttcttgctgaagacccatcgctttttgtcatctattcccaaaagactcgaacgagcaattacagaacatgaatcggcgtaagttctcggttgacaactatagagcgtcggattagacgtaattaccagcatcaactaacgaataatataaaagaatgagggtctgattcttacaatctagctctatagagcagctttaaatacacaagaaataataatcaacctagcctaatacggcagttggaagagacataacttttgaaccgtggaaatagctgaagtctctgcataagcatcggcgagccggagcttgcagttccgatatcccaaacaggaaagttccatatatgactagccgtcacatacggtcgacacaccccctcagcggtcaaatgctgacattgatcgctgcattacccgatctggtcatggatgaggtccttgatatcgaccagattgagcatcttgatgaatttttggtgtttttgaacagggagaggcttggtaaagccgtccgctgtcatctgattggtagggatccatttgatatgaagtctcccttcctggacctcctgccggagccatgatctgttgatatcaacatggcgtagcttgcttcgttgcgctgtatcctttacaagcaggtcaatagtttgcttgttatcacaatatacagcaaatgtatgaccagggtcaaattccaatgatttgaaaactcgacgccaccaatatgttgccttagcagcttctgctagagcgacatattccgcttctgttgtagagggtcgtgacagctcgttgcttgccggatttccattcaattggagccccaaagagcttgcataggtaacctccggtgctttttctgtcttcattattggcaaatgaggcatcactcgtgcatatgaagatctcatcagcatactcacttgcgctgaattcaagcgctagatatcgtgtatgatataggtaggcaatgacttgattaatcgcttccatatgacttggcgatgggttcctagagaatcttgcaagctcgttgacggctagggctgcatcaggcctggtaatgattgttggaaatagagctgagccggttttctgctggtattcatggatctggcctggtgtagcttgctcttcgttatgcagcagcttcatatttggctgtaagggtgtttctggccatctcgtcatgtcatttaagtgaaactttgcagccatctgatccatataagcatcctggcataccaaagcttcctgttgggtcgatctcgaataactcggatgttcagaaaccatccaacctcccccatatgtcttagctcatatcgagcctctagggcttctttgaatcggtttgcctctgtacgagcttccggggta

SEQ ID NO: 4311 - DNA, 2701 bp, Emericella nidulans
gtctggggcgccttccacaaacaccttttcacattctatatctctgccccttttgcagtagaccaagtggtaagtctcttcgtgctcgaatacccagtcgaccacattggggtcgttgcgcgtcaacgtctcacgttttctaacggggttctcagatccatcatcactacgcgtaaaaacaaaactgctggcaaactctccattgagagcaccctcatcgccgtcaaggacaatgaacccgtatgggtcatcgcccacatctgtctcatcagggccgtttgggtcctcgtcattgttgccatagttatctgtataccgatatatcacgtcctcttcaataggattaggaaatatcttcccgagatcaaacggtaaatccctgtctggtttggggtcacagcacaagcgatgtctgataccggggaaatagtagtcacatggagcccatgttccagcacgtctattaggcaacttagcttttgcggcggtgaactgggtagaggggcatcctctcttcgagcattccgacattgtaggcatgttgataagggtaatgtcgccatcttgctcgtagctctcgacctctgggacccagtcgcagtttttcagagcagctgtgctttttagcttcccgacctatttcctgttccctggggtggccttaccgtcaagttcacagcaaaagttctgagcttctccttcttcgcagaagtcgcccctagtagcaatcggctgggcataaccgtccgagcaagtatggaaaaccgtgcagggagaccagtgacacttctgcagctcaggtgccgcatcgcagcagactgagattgcaccgcttgagcactttttctggcccacggcgtccacataacgatcagtgatcagctcataccgcccattcccacaagtcaattcggcctcgccgccagtacacttagtcgagtcgccctcaggcgcaccaactgtctggcagttcacggcgggactgtcagcgggacagcaaacccgtttatattgacctagtccgcaggtatctgcagtatgagaaagggctccgtagagttcctggtaggattctgtgggcgaatgcactagggcaaccacaacatcccctttcctgcactcggggttaccctcgatcgttggctcaccaccaacacacccactggtgacatagcagccatcgcccgtcagtccgcccatttcatcaaccaggtcttctttctcctcatcgctcagttcgcctccttcgaggagctcgtcagtcacccagtcgcccagaaggccagttagggcttgaaagtcattagtgtcttgatcaatagcccagatcatgacacccccaaagcactcgttgtcgagcatttctcgcttcttctcgaagctctcttcatcatcgtaggtaatccactggttttcgtcgtagaccatgtacttgacccccgagtcttcatcgtacttgatcaccttttggtttagccgcttttggcgggccatgatttctatatcagtagattagcagacagtctactctacttgaatgcaagtgtacctttgaaggtgagaatcccagactcgccagagcactccccacgaaggccagcatcactgaattcacagccgggctccgagcatccgggatcagacagcgtgaaggtccgaccatagaaacccattcctaggctgactttgtagagattaatattattccgccgcaagaggtctactccaatttcgatttcagtgacattcgtgtgtccaaagacatatggacctgtccactcgttaaattgatcccatttaccgcgcatatcgtaactgcagtgtaaagtcagcattcttgggatggtacaggaaaggcagaacttacctcatgaggttgaaccagctcacttctttctccattgccgatacatcaaagtgctgcagataccagtaactagctgggatagccatcgatatatcccatgacggattgcgcttctggaaggcttcattcatttctcgtactagggagacatagttttcgtagtcctcgtcttttccaccgcggtcacctaaatatctcgttagacaagcccttcagcgaatatacttaaccctaatacttaccagccacagggtactcccagtcaaggtctacgccgtcaagcccgtgtgtctcgaaaaggtccataagactgttgataaacttttgccggttgtccgaggtcgaggccatatcggaccatgcggttctcgttggccctgcaaccatcagcttctctgtgctctttcatgggggtcaatgggaataccaggatcgctgaacgcccaccctccaacagcgataaagaccttcaaggatcgattgcgcctcttcagcttgacaatcctcgagatcatctcagagctgtcaatggtgatttccgagtcttcgattcccgcaaacgcaatgttcaaatgcgtcaatgccttcaccgggatatcctccggtcgaaaggcgtcgcattctctggtatcggcccaggtctcataataagcaatccggcgtgtctcccagcgactatcgcatgtgtctcgctcaggttgaccacaattactctggcagcttgactcctcatcatctgtttcctcgcagaactcctctgtcgtgccacagaagccccagcgactgcaacaagaatttcaagggacactctttatcttcaccatacttaccaca

SEQ ID NO: 4312 - DNA, 3213 bp, Emericella nidulans
  unsure (1)..(3213): unsure at all n locations
gctgattttccgatcgacctaaaaattgccatctccagacgtcagtcacgggacatcaggcaggaaatgaggggaagcatgagaacccagtctcgacctgaacagaagccgtagcaccattatgcagtcatccaactgatcttaaccgtgggttcaatatttcacttttcagcatgctgacaatgggcactctttgttcagttcatgggaagaaatgatgtgtccgacgtgatgctcaagttgcgaaacctcgcttgcggcgtatcgtaatcaaacctcagaccaagtcattcgtaactgggaccctggtcttgatggtcatttttaccaccacaattgttggcactaacctggcaattatcgcaactttgatcgcagttctttgagagagtagggataaagaaaatggactgtatcttacgcctcgtcgattctgctctctccacagcaaacatggatgctgtcgatgcactccgagccttcttcatcttcgcagcttgtacggtatgagctgcacggcatcgtcggcgattttcttctagaatggacgagaactaaattccccagatcttctctgttagtctgccagattcacttcggtcgcggtttatcccctatggtgctcgtgcgacaaaagctgcagccgagtcagagacgtccgcaacctcgacctcggcctcgaaatcgacctcagccgcgcccgcgagcgtgtccgcggtaacacgcgcccttgattacgccgctgcgctgcgagtccctcacagctacttcacccagttttacgtcatcttggttctatcgtcaattttctgggctctgcagctgctgtctcacgggcgcgcgttccaggccatcgcagctcgaatccggccagaacacttggaccaagcaatctcaataaaccaggtcatgctgtgttggggcttgctgttgacccaagggctgagacggctacatgagtgtcttagcttctccaagccatcgtcatccacaatgtggttcgttcattggttcgcaggtctcgggttctacctggctgtagccgttgcggtctggatcgagggagcaggtctgtttggaatcttatcagacccaagacatctgctgattggtaccacagggacggttctcactcatcaattgagtctcgacgactttgatctgacgagccgcttctctggacgcacgcttttgagtcttcccattttcctcattgcatcgggtatccaacacgactgccaccattatttgtcttctctgaaaaaatacactctgcctactcaccccatgtttaattggatcttgtgtccgcattacacggctgagtgcataatctacctatccctagcctatttggccgcgccgaagggcgagatcatgaacaagacattactgtctgcagtctttttcgtcgcagtcaatttaggcataacagcatcaacaacccggcaatggtacaggcaaaagtttggcgagtccgctgtccagggaaagtggaatatgatcccgttgatatactaggcttcgtatctagtccgacaaaatgattgatctccgttgtccgcccgatattaatgcctattcaaaaatttcattgtattgcccactctggcaactttgagcacatcacgatacgtcaaactcaccctggtccccctctcacaccaccctttggcgaactgctccacattacccagctgctcccagttacagatggaatcctgtcccaggtttgcttctttgtgccgctccgcaatcccgtgcaaataatccctgtagatgctacccttagtaacaagcagactgcgcctctcctgtaaaatccgatatttcggctgccgagtccgcccccctccattccctttgtcagccgcatcatccctggtgccagagctgaggttgttgttcttctcatacaaatcgagcaccacaacaccccccaaactcactgtcgccacgagcggatgatacgcagcgccgtcctcatgcggcatgatgccctggcctgggttgtactcgttgacgagaacatggttgggacctttgtgtggcgagtcatcgaagaggtgcagggctctgaagcgctcgacgataggcggtgttgttgtgagccagggcgggaggggcgaggagagcagcgtgtttgtggcggttagagcggatgggtaggtctgtagacgtcggtgggagagatgtttccaaactggcaggggagcggatgatatctaacggagttagtaggtgtttagttggtagagatatgatgtggagtgagtgtgggtggcctgatagcaagcaggtaggaggggttggaacagccatcagctgcggaggacgggttctgtggacgtgagagggatgcatagatcgatattttgattaggttgtcccggtatagaacagaagtacgagtgccaattggaagcatacataccttcgccaaaagcctctcctcctcctcttcatccacaaaatccgggatgtagaacgcctcgccgggcagccgttgaatgcgggccgcctccagatccatactcactgactgcgccatatccttcccggcgcccgtgtgtagcttggtaaggaatcgattggagactaggtcactaatacgccgactccagatctcaaactagaagactgccaacgggaaccagcctatcggggcgcgtccagcgggtgcagggtgatgcatcagatcgcatcagagcatatcagagcatcagggcgcgccggaagaccacttccagagtttttgttgatgcagtcactcctcattttagataggcgtgcttgggtttcaacgtggcaatcattgctttctcaatactaataaatctcatattaatgggcttgattccgcaatgctgggaaagaggagcaacagcatgggagaaggaaaaagaaatgcctactagtatatatattactccagatgcagtgatagtaaggactaacactcgtttccaatccgcctcagcccttcagacatcaagccccagccaacattcgtttgacttggtttgctgtctttctccccactaccccaccagcaagcacatggactagtcagtcctcaatctcacagcagctcagtctcaagctcatttagtcttcaaagatccctggacaagctttgcacaagcttccttataagttcctgatcccctaccctcggnctctcaccatgggcaaaggcaacgccaaaaaacg

SEQ ID NO: 4313 - DNA, 1123 bp, Emericella nidulans
catacgtggtatcgaacgaatctgggaccccgcgcaaatcacttctccgctggatcaactgcaagagaggagaatgaaaggcgagacggcgccgtaaacgtcggaaattccggtaccgaataagatcccatgccctcacagacccatccagcgatgaggtaaacagaacatttcctttcttcgaaaattgacaggccgttactccactggtgtgttctgtgaatgtcacaagacagaaccctgacttgacatcccaaactttgatcttgccgtcgtcggcagcggtgactattctctggccatcaggggagtaggcaagggcattcatcgaatctagatggccttgttgtttcaggatgtatgactccgactgccattcccagaccaataattgcccgaatttcgaggaaccaaacgccaaccactcgccggttttgttgatggatacaacatcaatattactttgtgagatactggaaattcgtttagcgtcaatgccagtacgcaatgcatatgccacttaccttaagaggtgaattgtattgaactctgggagctcgtaaagaccaaatagtccgttggagaaaccaacgacgagcaggttggaagccgcatggaatgccgcgcatttaactgttgcatgaggctgttggaagaaatccttcttaacaatcctccagcgcggttccgccacatcctccatcgtgtcagggtcttttttggagacatactcccatcggaagagggcgcagtctcggctgactgtgtaaatctaggttgtattagaacaagagtgccacattgttgatcgggtcacttacactttcttgatcggctgaaaaaaaggctgctcttacaccttgtcgatgaccggaaagagttgtgggctcgaaaccgtcctcgggatccaagctccatacccgtgccgtcaagtctttcgaagcggtcagaagaaatcgggagtcactcgaccattcgatatgctggacttcgtcgaagtggccggcaaggtcacgatgcaagacaaagggagcaaagtcgatctccccgtccccaccgacggttggggtctccggggtgtgccatatttgcagccgacgtcctactccaacggcaaagtgac

SEQ ID NO: 4314 - DNA, 3304 bp, Emericella nidulans
gcccttctcctgcccagccttcttcttcttcttctgcggccttgaatcctctgcatccaacttagactcgacttcctcgtatgttttcgaaacaatcaggtagtgcgagaaattgtacgctgctttctcctcaatcgcccaagtgatttcctcctgcagcatcgcgtacatgggaggaacgacttcggagggcatgtttatgagtcgttctgttaaaatgagcccgattggcgggatgggcgtctgggagaagagttgggcgaggggggagagggaaggcgtcccgctggctttgcgcttaatgtacgttgttaaggacttaatcgggggtttatcctgagcggaaaaccagttagttaggctgcctataatcaacgcttcaagtaggtcagacatacagcatgttcctgcaggttcaacacagtcaaaaaggcatacggatctgagtccttcccatccgtcttgacggtggaccccagcaatggctgggcgagaatcatatccgttaacccggaaagatcgaggtcctgcgcatcaacatcgaagagctgccgaatgaggtgcttgattccgtgaaagtcaatctcctgagggtcgaaccattcgaagtcgacgttaaccatgtcgatgtcttcgtcggaggagtcgccggtcgcagggtcagtaccgcccatggagacgtcaccatctttgatttgcttgcgtttacccattgtgagtttgtaagggtgatcaaatgttgcgcagtgtttagtgtgttgttaaagatcaagttaagctgccaggtgaggggataagataaaaattgttgctccgcggagacggctctgattggtgaacacgctcttgtacttgcgcttcgaccatctcaataccattccttcatcgttttgtcaaattgacatctggagtattgagcattatttaagagatcaaagttcacttcacgaagcccaagcagcctatgttgagctatttctttttccagaaaaacgttgcttcttgttccaatgacttcctagacacctagtagataaaaaccataaaaagcctgcaatatcctttacttttcctctactcaaagttcgctagccatacataaacatactgagtacaacacctgaaagcccaatgtatccgtacttccagggccgaagggtacagtgtacaaaatccgagcggcgcaagagacaaggcgggaaaagaaaagatcccatagatcgaggacagaaagcgactcgacactggaacgcctacagattcgtactcatccgatgcacaattggcaccgcgctcggcggcagactgcccatctcagtaacaaccatgtccacatattcagcgggcgtagcatcatacaacaggttcagcagctggaggttcggcgtatcacgccagtccgcaagtggagatctgttcgtttgtggcgcagttgattcagatgggctagggttcgagggcacggacttgcctcccttcttcggctcgggctgtgcagcggcagcggtgatcgggcaggtccgttagctggtgaggtgggtgcgttggaacaagctcgtctgcgtccgcgatttcgttgacgacaatgctgtcgagtgcaagcggtctgtgaacttgacagtttcgcagcatacgatgacggggatttcgacgccgccggcgcgctccttagccgacatggcgaccagcgccgtgccgacgcgcgagtacagtcgtccgttactggtcatggcatgggcgccgaggaagacctttgttgcctccttgacggcgtggctgagaccgctgatgagagagtattgcacttcgaggccggcattggccagtgtccttgcgagattcttgccctcaaagagcggacgggagtcgatgatcgaaacgcggaatttcttgccctgtttaaacgcggcgaggagcgtctgtttcacaattgaactacctgcgaatgtcacgacaacgtcgccgtccttgatcttctgcgccgcactgccggcaatgacttggtccgccaccgtaatcttctcgcgtatgaaactgtcgatgaattcgcaaagtgttgtctttgcttgtgcttctgggaccgagggatctatggacgagatggccaatttgagggctcgaatggcatttccctggctgatggagagtggacgacatgtggaaaggtatgtgatctggtgagaaagatgtgtggttaaatgacgagcaagggacgtgcccttcggtgttgtgtatgcttcgattacctgaaaatgtcagcaagcttcagcagaactgggagggttggaagcataccctcttaaaagccaacagcgtcgcaacgcatctggcactgctcccgcaaactacgtagtccctcatctgcaatcccagcgccaaaacggcaggatgaacctccttcccagccccggcgaccgtatttcgcctttgttgtccataaagatgaccgaacacagcgacgttcttgttctccttcttcttcttgacctcctcggcctggggaacagtctgcgcagacccccgtctaggaatagacttctgtcctttggctgctgaccccgctgccggagctccagcatcgccgcccttcttgccggccggggtattctgtccaccaggtgcacctccttgctcgcgttcagccttttcccgggcgcgacgggaggccttttccgctttggccttcttcttcagctctgcgggggtgagcttctcgtcaccttgtccgtcggtggacgcagatgtggcagttttgtctttagggggttgtttggcgggttttgcgggtttgggggccttttgctggccttgcggttgggatggttgctccatcgcggctgacggttgcgaagcgggcgcaggggtaggggaggcggagtgagaggatgcgttgtttagtgtagagtcagcaggagtcgtcatgttgtaagaactgtgtcgaacgcgatggcggcaatcaggaggggcattggagacttttttcgggcggttgtggggatgaggaagcgcgggctggattgactcactcgccgaaaagggcgatgatgccataagcgcaaccaatgcagagcagccctatcaacaagctatttacggagtaatcgtaaactacgcgtaggtttttgggtgcttatacctctacaaatagatgttgcaaatgattcattgattattccaaatcgtgtgctcatccgacattccatcgtctcatcgtcgcataacaggaaagatcaaaagtttacacgaacaaagggttgcaaaacaaaagcaaaaataccacccaacgccttgcaggatcataggc

SEQ ID NO: 4315 - DNA, 5312 bp, Emericella nidulans
tgtatcattgaccagtgcacctcatagtcactcatcaacctagggtaatccatcagctctcagccactttctctcatctctggccgttggttctatccaaactccaatggaccatgcggagtcgatacggcgccaggtatgggaaggaggcatacatcctgttgaacggttagtcgtgaccggaatggacagacggacaaggcgagagtgttcatacttcataacctaagtaaatttcatacgtcaggtcggttgccaacacatcagtcgatcctggggaggggtactcacatctgtctcgattctgcgcttggggctgctcatgttgactgatttcgcacggttgcgagcactcgatagacgaaaagtattagaaagacctcaaatactgaactttgaggctggtaatcacagcaaacgggctgtgtaactgagcagtggaatcagagggtctccgaattgccggcggggaagtaagagaggcgggtggcaagcgggccgataggacgaaaaagtaagtacgattcgtaagccaaaactgcgatggacttgtcgttcgaatatgaggaggaagaccggatattaaatgatggttgaacgagaactggggagatagaaggaagtggtgggggaagtgaagagaaggaagaagaggaggggcgttcaggttggacgctggaaccgctgggacgctggggcagcccagagggtgctcccgtatggtccggccggtaacaacctcgatagcgcccaaagccaggcccgagtcactcgctacgtcgctttgcggtcaggtgccctggtactccacgatcaatcttgcacaaggtcctatggtgtgatcgtgtgcctctgtctctttggaatctatgctcaaatgctatggacttcgcaaaaccagaaaggacaggaactactccttctgacgtgttccatactgatgtgtagtccacagatacaagcaataaccctcagaatcgaatgatcgccatcgcctgcggagatattacacttttacccaaatttaagtaaagagctatttgtttcaccatatgcggcgtgccatgaaggtttaggagtggattaatgatcgtcagcggcttcaagacggattcttcatgtctttcacctccggaagccagcctgaaatgatgtcatctgccgcagttccggtgcagttctagcccgcggttcgcgagccatactgttgggtggctgtggtagaacgctttttcggctgtcatgaatgagcttattctgtctgtgtcggttgattgtgtagattctatggggcggaagactgccaacgtaagagagctcaaagatgctggcagttcagaattgggacaacaaagatgtaagtcgttgctgcctcaggccgtaacatagctcagaccgcggatatcgactacttgcctacactattcaacaaacaccatcttttactggattgccaacatcgtcagatttcattagagatttaaaagagcctgcgactttaccgttgtgctgtctgttttggtcacttggcacaaaatgagctctccttcttcacgtatttcctcaattaataactctccgaacccaaacttgcgaaaaccatcgagccggagggaaagtttagaccagccatccaacgcacagaatgcgcctataccagacgatgagcatggtgcagacttgccactgaccatgtctgcgtcggtagttttgaccagtttaccacgcgatgcacaccaagctctggcggatgccgaagctattgatacaggcaaaggtatgaatgatatggttcttcgctaaataccttccacccctattgcttcaaatgcagcatttctctttccgtaactatatttctgttttcaaaagaaagtttggcggcctttttatatcgtcttccagacttgacaaacaagccgctgactacttatcagtcactgtccggttccaacccctggcatctgccccgattcttaaaaaccgggttttcaaaataagtgcctctcaaaaatttgagaccgtcgtcaatttccttaggaagaagcttaattgcaaggacacggattcagtaatctgctacgtcaacagtgtttttgctccccgccttgatgaaggtgtagggggcctttggagagtaagtacaggccatagtttctatctggaagggagaattcatgtctaatagagcgactatacagtgcttcaagaccgatgatcaactgattgtcgcttactctatgacacccgcatttggctgagtctcagaacaatagacacttcacatatttgaagactctaaatgtgaggacccccataccccgactcatcaactttgagcgcatatacttggtgactacctaacccgcgggcggttattaggccaaagacgctttatcgtcataagcaacgccaggatagtaacacaatatggttgctccttgtgaagttatggtgtccgccgcaatttgagcctacgctagcctaaaaaagtagagttggcggctctcgtgaacgccattgagttggataattatcgttgtgggtgcggaaatacgactaggagttaggaatagatggcccgccaactcgttggttaactgtacaagcaactgtgtgttcaagagcagtattattgcagttgtttcctttgtaatatagacctcaaaatatgcggacggcgttggaagtcagacatgacctaagaggaactagtcctgatatcgtcgtatctgctagggtctcaagacccaaccataatcaggattttatactactcgaaacatgcaactcagtgctgtgattacagaggtaatgtgtggcgaacagaatgtgataaggtatgacgctgaagagtttatcacgtgataagacacgagcaatgcttggcagacgccagacagtgcctttcgtgactttcgtcgcgttattttttcggctccttcaatcagcttctccagtatccagaactccgcaatcaccgtgacgacttgatagtttcattagaacatatctatctggcagtcgcctatattgataggcgaatatcgtcctattaaatccgatcccaccagcatggcagacgtccgttcgttgctccgaagcgagcttgcttcccgcaggggcacggcccagacagggagcaacacgccgaaccgcgtcaccaaaaagagaaaagtagatccgacggattcattaacgcgcaagcgagtcaaacaaacaagcgccgaacaactgctcgcaaatgcacaaatacaccctccaagagcgcaggtcttaggtgaagatggtgatgacgtcgaaccgctgcagcaggattcagatatcatgaggacagagtcagacacggcgactccaactcagctggaagatcctcaggacaagaccgcgcagacctctaaaaccccttctaaactagaatctgaagcacctacgaaccctgaaacgcaaagtattgatgaggacgaatgggcggcttttgagcgtgaagtcgctgcgccaacgcgtgttccgcagaagccggctgctgttgcggcgaccgcgacaatatcagctgctccgataaccgcggaagagcttgccgcgttgcaagagagagaaaaggagtctttcaggcgaaatcgggaggcggaggcggagggtgagcgggaggatgccgcgcggtttctggaggaggaattcgacgagatggagcaattggaggaaagggttagacggctgaagcaaatgcgagaacagctgagactgaaacgggcgacggagagtgctgaagttgacgaggctggaactgctgaggtggtccccacagagccggacttgaatgttgccaatgccaccacggccgataacaaaaacgaggacgaagaagacgatgatgacgatgacgctgatgatgactgggataattggagatttaggtagtgctactaatatggttgctgcacttgcaccagccgacgacaaagaccggaatggcgtcattcctactggaaaggtcaagcttgggcttctttttcacattgatacccctactcatacatacccatatctcgagcttcagggcctgttatgagtcagttaacttatttaaatcacccttagcgacattaagatttttgacccaaccttattcgcaacttactcagaattaccacgatgaacaagaccagctcagggaatactgcatttcagcgcatgagaaatccagtttacgaccaagaatatactttagttatgacaaacgcaagcatgtaactcttatggaagaaaaaaaaaacacatcataaacgcaatggtatcccgcaaatatatctcattggattgtgaaatataatgtacatcgcgcgtgagtaatgggtacccagaggacaagctactccccatctataggtttcgtctgctctgctgcttgcggttctaaatggctccgaagcccgctcttcccaaccctcatagcctcttggacctccgcttcgccctcttctaagagatgtctactgcgagcaagctcccgtttccgcctctgttcatcttcttgaacctgtttctgccgctctgcaagggctctttcacgcttctcgcgttcaactctcttcctctctaattcctccctctgctcgggcgtaacatcaacctccggcgcacggggtaaggtcgaaatgtatgcctctataagagggtcgcgcactttgggagacagcgcaatatatctgagatcggtgatgagagcaggcgggagggcttcgaggttagatgagcggtttaaatcatgcaatggtaccgatttgagtagagtagataagtcagatctccgagtgctttcagggagttttagccgactaacaagatcgcggtagtacttttcacggtctttatcggagagctgagagtctctcatttcgggctctttcctgtatttgcgcttgaactctggccaatatagcttcggcgtcgcgtgatcttgtaggaaggcgagatatttgatgcgggggtctttcttttcttgtttttctttgcggtctttgatttcttggattcgatctcgactccaggtggagaatgcctctcggcgggatttcatgttcgggagaaccgtgtagcgagtgtcctctatgatgcggccctcttcgatgatcttctcccatgttgtgaaccggtttatgttgtagtcatcgaggaggtcacggaataaatctgcagcatcctcgtcggtcagcggcaggccctcagcgccctcttcaaagccttcctctcccggctccccgtattcaccagggtccagaccgtactctcgcccaagccgcagtgaatcc

SEQ ID NO: 4316 - DNA, 8552 bp, Emericella nidulans
acccttatagtattcccgttcagcccggtttgcttattgtttcagcctattgttgcttcgtttttcctttttttctcttatatgtttccctttaggtcatgggtgaatgtccgctagcattataactaaatgtatgtctacgcgccgagcccctttggctctggtcggcctgtaggattttgtcttgctgcaacttgaacgttcaacgttatgtggtcaacttccgaatcaatcaacggttgggcgttgttcaagctcgactcgtttgagatcgcgctgtgtcatccggagcggctacagagatctcaaggcaaggctgagaaacctttgatgctgagctgtagcagcctctaccgcgatttcacgaggagaacttgtacaaaggtggctaggaggcgtctacagaaatctattgcccagactctagcagaacgtatcctgcagattcagcaaatctacaggccgcatggaagataaagctagagctgctgcggcaatgcatggacacgcagttgattggcggctacttttagaccaagactaaacatacaatggttggtacctatttaccgccgaaccaaccctaggagatcggcctgccgttgttgtagtaggctaacaaggacagttgatcgccagttgctaaaggcgaagaattgggggtaccagcaagcaagagtagatgatactaaagcgatctagtgctcttacgcccccggtggatgaggaaatccagaagggggattcctatgccgttcagggccgtggaagatatcttcaactggcccaactccaacacattcccggaggtgttgcctatttcgcatgacactgtggtggggccctaatccattttaacgcacgtcagttttcgaggaaattgggcgttgaggttgggagagacagaggctagggaaacttgcacagaacagggaccattaaatgcgtttgacttgacgagtaagcttgtaagtttactcgagagacatgttaaaataggcatacgtctgcaacttttgtagcctccttgacgggctatcattatttcacgctgggcgtctagccatacaccatttgtagcagatatggggcaagcataggaaatggaggcgccgaacatgcctactattttaaaattgcttataattggttcgactttttgcggcacagcaacatgcatcatccggacatttagcgccccacctgctggccttccgcgcccctcatactctacgagggttatagataaaccaggctgcgtaccgactggaagtgtttctgaccccattctattgttctctaacattatctctaaatttccaatctgtcaccttcagaatacaccacgagcgggcggacaaacaattgccagcaagaccagtatgcctgatgccgccgacggtcctaggatcccatcgaggagccgcagctcctcgcataaccctctccaggaccatgttctgccgtctgtggagctcacctcatcttatagcccctcctccacgggtccaggaacacctacttcctctgtaactgacttaggtgaccacgaagataatcaacgcgccctcacacctacaacgcaatctttgttccagaatttacgcctaagcgaaggggagatccacgaggctactcagtctacgcattctttgtccaacggccagcaagcttctggtttgaccccaaccactcgccgaacaacatacatggacctctacaatgcgacccccgctccagaaagtgctcccacaaccgggcctcaggaaacgctacagacacctacttctccattgggtgaggtgagctccggcttacaaaacctcgtcttagcggaaccagacgaggcggcagctgaagtctcagatgaaaacagtagttccgcatcgtggcattataatggagaccgggatgatgacggtgatcatatttacaatgttcgggaagaggagcttccgcgggctccgatatacgatattcggctccaaaatgcactgcggaacgtgagaggtcaaattgcggacctcgcacagtttattggtgagcgcgagctgacgcatgacccaaccagtgacattcatggtttgtatgatcaactgctgagagcgagccggttttcgtaccctgcaacacggactgtggggtttattggtaaatcgggagcgggtgagatgccttctatcagggcagacgacgggaatactgattgtttttggcagggaagagcagcgttatcaattctatccttgacgaaaatggactcgcgcgttcagtaagttaacgagcagatctctgtctgattgatggaaggcacttactgttatgtagagcggagatggggctgcctgcaccactgttgtcaccgagtttcgcaatgtggatgaaagttatccggataattatactgtcaaagcggactttatggacaatgcagagattcgcgagctttttgaggaactgctgtcgaacgtcaggagatattacacggatgcctatcgggaagtcacccaagttgaggagcaggagaacattaggatcgctgccacaagggcttggaataccttccggtctctttttcctaatcagccgcagcttgaacttgacttcttgtccagggatggagaagatgccgcagaatctattgtgtcaacgttagtcgaatgggctatagctaggttggatagccaaccaggggggcgcgacaggctcgagcagccccgggtggcgaatcatgctgatgaatgcatggaacttttggatagcctgacgactgatcatggtggcggtgatggaacggctttatggccttttgtcaagttgatcaggtttgtgagcgtcatagggttatcatggtatctgtctaatggcgactatcaagggtctatctacgatcaccaattcttcgcactggtttggttctggctgatcttccaggtaatatctttaacattacctctctaatcttttctttccttatgatatttctgtgtttatttcttttcttcctctccggaggaatcttggctgacaggttttttagggtttggggatttaaactacgctcgcatacgggcgactgaaaaatatcttcgtcacagttgtgacgaggtgttcattgtcagcacgatcgcccgttgtacaacagatccatcaataagtgatatcattcgccgatgtttgcgaggtcaaccaacacgaattgtttgtactcgctcggaggcaagtaaactatttcccaattacagagaatgcgtactaaagggcttcaaggatgtggatgctagagaggcagtacggacagcctctgcaacagaagcgatgcatatccgcaaccttgaccatcgggttagaaacctcgaccaggaaatcaggaatacgcgggctctcagacgacgatccactggaagaaggagtctgaacctggctgcagaagaagccagattaaggttagtgagcatttctggtgctagattagattgatgacccacgattatcgcagtgaccagagagaggcagctgagctggagtaagttgttcattaactctttgcacgccccaagttatgtcctgactcacgcattggctaggctaaagcagttcctcatctcaagacggaaccagagagtgacgagctctttgaagcgcccctctggtgaccaaatccgcgtcttttgcgaaagcaacacgctatactcttacccccggcacgcaggaaccagatcgagcaaatgcatacatccagcttagtggaatcagagatcttcgtcactactgtcagtctgttcctgccgacgcgcagcttcgggcaacggaggggtttcttgagactcaagttcccgcacttttgggttctgtatctctctggaccgcagcgggatctgatacagtcactcacacccgagccgaagtccttcgtggtgtactgagcgatgccgaacaggttcttcaacaggtacggtgacggcttgcctagtcgtgtgcctcttcttttttttctagctggagatatggctgttttgaatagactttcacaatctaaagaacgtcattactgacatcgcttagagaattacctctcgtggatcagacatccgccacttgcaaagtagcctggaacggcagtttagagaatcaattacacaggcaatccgtgagcaatagatattcctcctagcttcaactaagtgccgaattaatcctgacgcaggcaactcccggaatgactggcgggatggggcagtcgcggcgagcagggactgggcaaccgtaagtgcgcttgacacaaaaaaatacatgtagaatgctattcctaatgggacatcttggacaaagtggcaccattcgacatacgccgcttggtgtcgcaacaacggcacatatcagaccccaaagcaggcataccggtgctggaatgaagaagtccttggtcggggaaggactcagctctcagccgcatgggataccatcctcgatattctggaaggagaaaaagacgagattgacgaagaagtatccagattgttccgaggaatctgcgactctattgacggtaatatcgaccgcttacgaaggattttgctcgcaggccaaagaacttgaccgatggatggctaagctcacaaacaagaaaagagcatatcctctcggctttggtgatgtgaagagcaacgccgacgcttctctcaaagaatggtctgccggactccaagatattctcagtgatatcgtcaagaatggcggcctgggtgaaggagtcccggaagtggcgatcgcttgagagcgacgaagaactctctgacgacgaagactctggctcaggcaaatcaaaggctcgtagaaagcctcagtccgtggtcgacttggaggacatcaagatgggttccaacggtcaagctgtcggttcacccatcccggttgacttcacaacctcaggtgcatcccgggatgttcagcctactgaaaaggaaatggtgcctaaaacttctcctacttacgcttctctcacaaagcaaggatacacgatcgttggctcgcattccggcgtgaagatctgccgctggaccaaatccgcgcttcgcggacgaggatcatgctacaagttctcattctacggcattcggtcgcacctgtgtatggaggcgacaccgtctctgtcttgtagtaacaaatgtatcttctgctggagacacggtaccaatccggtcgggactacctggcgctggaaggtcgattcgcccgagctcatcttcaacggcgccaaagaaggtcactacaaaaagatcaagatgatgcgcggcgttccaggcgtccgcgccgagcgcttcgccgaagcgatgcgcatcagacattgcgccctcagtcttgtcggtgagcctatcttctatccgcacatcaaccgctttctcgatctcctccacaccgaacacatctccagcttccttgtctgcaacgcccaacaccccgaccaactacaagctctcaaccgtgtaacccagttgtacgtctccattgacgctagcaaccgcgacagcctgcgcaaaatcgaccgccctctccaccgcgacttctgggaacgcttccaacgctgcctcgatatcctgcgagaaaagcgccacgttcaacgcactgtcttccgtctcactctcgtcaagggattcaacatcgatgacgaggtcatcggctacgctaacctcgtcgaaaggccctgccctgctttattgaggtcaagggtgtcacatactgcggcacaagcaccagtgcaggcgctgggttgacgatgaagaacgtccctttctacgaggaaatcgccgaattcgtggtgcagctcaacgccgaactcgagcgccgcggtcttgactatggtatcgccgctgaacacgcgcacagctgctgtgtgcttatcgcttcatcccgcttccgagttaatggcaagtggcactcgcgtatcgattacccgcggttctttgaactgctggagaaggagaaggctgatggtacttcgtttcgtcctgaagattacatgaaggagacggaggaatgggcgctctgggggaatggcggatttgatccgaatgatgagcgagtctttaagaagggaaaggctgcgaagaaggcactgaaggagaaagaagagaaggaagctgcagaaagggcagcagcagcagaatgaaaactggattgactttgttctttctcatgtcgttgaagacacctctgtgcatccctccgtgtgatttcgtgtgacgagatacaatttgcggacgtcactgctccattaaactcgttcgttaacgacgaagtggctctaccgcagctttgtacggaaggagatcgctgggatgcgaccatatcctgcaattgcctagtctacctgactcggccttacccgatgtatcaaacaaaagttagctaccatctactcattgctatcttttatggatagaagcacgaatggcagccggtagcattaacagctgcctgtatatacaaaagctctatatctgcagcaattttgctggataccttcatatctcaccctctaactgcatgtccgtgacaatactgtcaatagcaagtcgtaaaacaagcatgacataaaattattagatagtaatgtaccacataccatgctaagcaacatagggtcttccaaatccacattcccacgccttctcctccctctccctaaccgcaatttcttcctcgtcgccatgcacgatcctccgctgagcacctgtaaacacctgatcaatttccatggcggtcttatccttcatctcaggaacaatcctccatgccgcggccagggaaaggatgcaaaaccccatgtagacaaacccggtcttcgcgcctagcgccccctcatcgtcattaaaaatgtaaggcagcacgatgccaaggataccattcgagagacaattgaccagccagcccagaccctgcgttttagctcggagttgcagagaggacgcctcggcgccgaaggcgtatgaggcaggccagatagttagaccggtaagcgttactacaaaaagtatggtcatctgggtgtacctaattggtttagaggatcagccagttgagtccgcgttttctgaaggacctgatttgatctatggggaggccacataccagacagtcgcagttccagggaaacaacccgcaatgcccatccccatccaaaggattgtgcaagcgatcagaccgaagagagtgagagggcggcgcccaaacttggctactgtgatcatgctacccacgttagcgacgaggcctagcccgacacctacctggaggaagatgaggctggtgtgcgcgttcatgccgacaacttgcatgaaatagctgcctctggcgagcagcgatattccgaagagctgtgggaggaggcaggcgaataaaacgaccattgttcggcggcgattggtgcccttgaagcaatcggaataccccggcacagagcctttggctttcttctctagctcgatggagaaacggcattgttgaaagaccatatctgcttcctctgtcgaatatgagagctgctcctggcatctgcgggcctcgtcaagacgattctctcggatgaggtatgtcgggctctctggcatcaagaaggagaccacgaacgggagaacagagaatggccactcggacacaaagcagagcttgtagccttctggcccgcgtctggcagccatagcatagatgattatgctcccgatcagctggcccattaggataaaggtaggaaagaggccgaggatcgggccacggagtataggaggaaggacctcagacatgtatgtttgggtagtacacataacctgattaacggcgaacccctggacaagtttcgcaacaaagattatggatctgcggccattgatctcgcttgggagatccgagatgtaggccacggcgacacctatggctgatacgacgctcgcgatggtgagagatccgcgccgtcctacacggtcctggatgtaccctcctgcgatagagccgagtacgccaccgattgggtttgcgatattccatagcgcaagccagagggctggaatgatgagtttgccgtctaagcgacggccgaagtcttttcttgaggatgttagaatgggcggatcgttggcgatggagtagaacattggagcgtacgcactggaactcaggcatagaggatacagatcccacaatagcaaggtcatatccatacaggattatgcccgaagccaaagcaaagcaccaggccacggtcttaagggagtttctggctgactgcagagccgactcgttcggttggtgctgacttgattctagggacaatgctctcccatgacagcccacaacagccggattcttgtcgtaagtccccttcatgtcccactgcttaccctgatgtatcgccccacccgcacatgagctctctctggaggcaccagttgtggtccgcaccctgcgtccgtcagcttccacccagggtgggtatggcgcaccctttgacactctcccccctgctttacaaggttctgctaagcgacagagtgcgg

SEQ ID NO: 4317 - DNA, 4982 bp, Emericella nidulans
  unsure (1)..(4982): unsure at all n locations
caggccacgctcttgtttgtacggcggctgttgtagatgcagttcagctcctcaatggaggagctcctctcagtggagctgcagcggcagcgactggagtgcggggaaaaagcggcttttgcacgggtgggcatgacaatttgagctcttacttgctggactgtaatctagcagctctccttttcccaattcagaataaagaacatgctgctcacggagtaaacatccgatcgctcgttgatgatgccattggcgagttggagtgttggagatccatcggcgaagtccgttttgatgggggaggcacgtgctccggccaagaccgtcagctgctgattggacagacaagcttcgataagcttctcttctgcttggccgcatgtaacactactactctctctactgcaactcccttctaccactacaggcgcacgtgcgactcggaggttttctcctgtcactcagccatctcgatcctcgatactgacagtctcaagtgagaggagtggaatgacaaaatggaccaaatcctggatgaaatggcagagataccttgctctctctttacagcgacgctgggcctgaaaattccatcagattccgcaggattgacaggccccagcagcccaatttgatcctacctagttgctcgaccttccctgatccagcagtcgcctgccccgatcttcttttgcttttctgatccagcttcccctcttttttctttttcttttctcaacctatctttccctttttccccttctgtgggttgcgatttcccgcggtattcttactcggctgttcatcgctatggtcaaagacgaggaaaagatcgccgttggcgaggaccctacctcgtctccagaagtcgcacccctcgagaatctcaacaaaagtcgctgggagcgcagctggccgaccattgcttgcggcgctggtcttttttctgatggctatctcaacggggtacgaagacctagggctctgcgcttgcggtccaactaaccgtggcaggtaatcgggtccgtcaatacgatgcttagcatgatctacgccgaagcgtatactaaatcctctgcgagcaagaacgtctcgtccatcgcgttcgccggtactgttgttgggatgctctttttcggtgttctgagcgaccactggtccaggaaaggctctctcttggtttctacgctggtcctcatcttgttcgcgatcctgtgcaccgccgcgtacggttacaatggaagcacttacggtcttttcgctgcccttgccgcctatcgcttcttcttgggtattggtattggaggagagtatcccgccgggtcggttgccgcagccgagagcagcggcgaactgaaaaagggccaccggaaccgctggttcatcatgttcaccaatctgcaaatcgatttcggtttcgttacttcggctctgacgcccatgatcctggtcttgattttcaccgagaaccacctgcgtgcggcctggcgtatggccttgggtctcggcatcatccctgcattgagcttgctctatctacgactcaaactgaacgagcccgaggaatttaaccgggagcgcatgcacaagtttcctgtctggctgatcatcaggtgagtctatcccactctatgtgtcatggcgctactcgcaagcagattctattggaagcgcctggctgtcctatctctcatctggttcgcgtatgagttcttcgcatactccttcagcacctactcctccgcgtgtttcgtcatcatcctcggcgatgaatatccgcgggggaagagcttcggctggaatacggcgatcaacctgttctatatccccggctcggtcgccggtgcttttgcgagtgactggctgggtccccgcaagacccttgcaatcggcgtcgggcttcaaggcgtcattggcttcatcatgtctggttgctacgaatacctcaatacgcccaagaacgttgccgccttcgtagttgtctatgggtacgtcggtccccgaagcgcacaggactgcccacgctaacacctcgtagaatcttccttgcccttggtgaattcggccccggcgacaacatcggcctttgtgccgccaaaacaagtgctacctccatacgcggtcagtactacggtatcgctgctgccttcggtaaagtcggcgcctttgtcggcacatacatcttcccaatcatccaagacaacgcccccaacgcgatcagacgaggccaggaccccttctttgtgtctagctccctgtgtatctttagcgctgcccttgcgattttctgtctcccacatattggccaggacaccatcaccgatgaggaccgtaaattccggaagtacctacaggaacatgggtatgatacgtctactatggggcagactcagaccccgcagccgactgaggaagcgtagtggaagatataaaatatgtagtttacacagtacagatgagcgagcgagattatatactgaatctgttttgactttcttcatgttctcgcaattgtatcactcgcgacggttaagcctagaaggcttgatgttatccagaaacaggtcagtcgggcctaccgggcacgcaatatgctgaccgtcaggagtgacaagcaacctatgcccgccacttccagttccctgatgcgcattacgagtacatgccaactaagacggtccataaataaagaaacaagaacatctctgatgtcttgatcctgcttccacccgtccaggcgtccagcgtatacagagcggagcttagcaagcgcagcttcaatctgcagttttacccttgtcttcgccagcagaggttctcgtcgataggtctctattgctaaggggtaaatcacgcacactgcatagaggaaatggaaacagctgtgtccattgccaaacccgataaattgcaaccttcagactccaccctaaccctaacctccctcaataggcctctccagtcataatcatggttacgtgcagatatcagaggatcaatcagcggagataccgttgtaatcgtctaaaatatctactaaacgtagaattccaggctgtgacatgctccggtattgccttgcatcgctccccatcaagctacaacattccaaccataatcactacagtacatgtccgcggggggccctgcattatatgtttgataaatgatatatatcagcacacagaccaggcaatggcccataagattagataaaggtcttactggaggctaaatagcatctcccgcaggttccagaattatgtgttgtttcctaggccagcagcatccgaggccatgtttatattggaaggattatgcgactgtcagtcatgttcatttgcgcttagtctagtcttgaactgcatattgggcacccatgggtgaagcccaaagccctatcgaaaagaagccctaaatgggtaatttctggacgccgagcttactgcagctggcgcatcgcactgattcttatattaggctggagctccagtagaagctaccagacatatattatctggcttataatctcatcttctggatgtagatgggtcacgttggataccgatttggctgatccaagtgatctggggctcagccctgcctactaanggagcctctgccggacatatttgtaccggctgtgctcagctgcgtctgggtatttgttccccattgctttaccgctgaaacaggagttgctcgcagaccaatatcacanaaatggagtatgttgtttgtatacacatacgcatacgcatacgaatacatatacgctcccgcaacacaaccctaaatctcgctccagctggaggccttacctagatccgctgaactttttatggcgaatcagatcaccctttatccgcaattcccgctgaaataggttatcgtgcttgcggctgaatgttagcctcctgtttgccaggtataaaaggacactgaacgccatgcacggctacctaggcatttattgagaattaatataccaccataaatcccagaatataactttacaacatccagccacattattatctcatctgattctgagtcatggctacagactcctcaacagcaggcctcacctccaaactggcccgtttctcctcccaacatgatgatatcatcctcctaacgaccaccatcgaaagcgaatccttcgatactctccgccccatcttcgtaaatccccacgcgagcccacttgccatagtccgcccatccaccatcgaagctgtcagtgccacagtctccttcctagcgtcgaacaagattccctttaccgttcgcgtcggtggacatgatttgcacggccggagtgtagaggatggcggcgtagtgctggatctacgactactcaaccaagtcgtcatcgacaagagcggcagtgaggctgttggtggaaagacagcaacagcaagaatcggcggcggggtcctcatcggcgacctgctttctgctctggaaccgcacggcctcgtcactcccgtcggcaccgtctcaggtgttggctatctaggctgggctatgcatggcgggtacgggccatatagctctgggtttggggtgggcattgatcagatcgtcgctgcaaaagttgtggatgccactggacgtgtcgttgacgcggacgggaaattgctgaaggctattaaaggagctggaggtgcattcggggttgttgttgaggctgtggttcgagtgtatgagctggactcggtatgtcctgcatttgagaaccaccagcttgccacccggggtggccatcaagtggtgtatggtgctaagtattgtttactagattctcgccggcacactcatcttcaactcgcaagaccttgccactacgatccgcactttcaacaaagcctacaaagccctagcgctcaccgagtccattccgtcagcactaaacattttctcctgcatcctctccagccctcaaacgccggcaccaatcttcatcctgctggtaaact

SEQ ID NO: 4318 - DNA, 4464 bp, Emericella nidulans
gtggcttcacagcagacggcagacatggcgcatcttcagcagcaactcaaaaattttaacgcaggcgtcatggactacgcaaagtccatgccagcccagcgacgattcgtccacaacacctccgcgagcacttcccaagtcccgtctgcaacatcgacgcccactcctggtggtagcaacgaacagaagaagaagcgccacgatgtggacatcgtatactctcagcctgcgaatactggaaccgggaaggatatcatgacgcaggtcgtcttcgctattgaacatatgaagagcaaaggtgtaccgcttacgttcaacgatatcgtctcctacctctcattgcagcaccgggcaaatgaccaaggctatgttcaggcgttgcgcagtatcctgcaaatgcacgaaaaggttcaatacgattcctagtggggctaatggagagggtacattcagctttcgtccgccgcataacatccgcactgctgagcagctgctccaaaaactgcagtcacaatctactggggtaggaatgagcgttcgggaactccgggaaggttggcccaatgtcgaggatacgattaacaaattggagaaggagggtaagctgctcgttacgcgaaacaagaaggacgatcatgcgaagatggtctgggccaacgatccttctctgatccagcacttcgacgacgagtttaagcagatctgggagaagatcaaaatacctgagcagcaggtcgtcaaggaggagctagagaaagctggtatcactccaaccaacaaaaacaaggtcatcaagccgcggccaaaggttgaacataaaaaagtgaaaaagcctcgtcgcagcggaaagactaccaatacacatatgatgggagttctgcgtgattactcgcatctcaagcggtaatacgcacctcgtccgtttccaaatttcggataggttctcgaaccatcatcctactctccgagctttgctctcagaaaccatcaatcaatgcatgcatataccggcgttaggtttgtttgttccactctgggacgcttcttatgatatcgggcagacgctcccatcccatcaactatgtcgcgatttgtaaattaccatttccgccaagatcagaaagatagataccctaattatgataaaaagatttactgcgtctcctgataatcacgaagggcaatttagccatgagactcccagtcttagcaggctgccgagttattatctgccggatcttgaggtacttggctctaaatgaaccagttgatcagaatgtaataagctatgttccgatctatactttgaagtgtagcaaacattaatgtatcatggttcattccgaccctctaatctatcccaatatttacataatcttctcttctttgtcaattccgcagtccaacccagatcaaaagatgttacagttatgtaccatgagcgtagccaccccagaatgcataccgtaaagctgtacagacaaataaagcaacccaaagcactcactgtatatgtttagaaagtcgacatagaaaacgtcgaatcagtgtttcccattgacagcatcaccagtctcgccatgcaacggcccctccaacctctcaacatactcaaccaaatcctcaatagtacacaccttcagcccccatttcttcccaaacttcaaacatccatcgcgcctcatcattccattattccccctgatctccgcaacgccctcaacgacctcgccatcctcaacaagctccgcaataacacctgctggtgcctttcctgccagccggcaaaactcaaccgcagcctcagtgtggcccttccgttgcctgacgccgccagctttggcctgcagggggatgatgtggcctggtcggcggaagtcttgggggcgggcagagggggaggcaagggttcgacatgctagggcgcggtcgtgcgcagagataccggttgtgatggacgggtcagccgagtcaatcgaaactgtgtaggcggttcctttagggtctgtgttttcgaggaccatctggggaagttggaggcgttcggcgatctccggtgtgatgggtgcgcagatcagtccactatacggtgagagtaatgtaagcttggtagtaagacaaagaaggcgaagcaggcgcgtgcgcttgtgattgttccttcgaacttgggcttggttatgttacgaggcagaatgacagcataactaaccttgtatagcggaccaaaaatgccatttgcgcatctgttatggattcggcggcgataatgaggtcgccttcattttcgcgatcttgtgaatctaggacgacgatgaattccccgttacctgaatgaaaggtgcatggttaacccagagtggttccagagctgcgaagaacaacctatccaagccatagtatagcccagtggtactcctagagataataaatgaccgagaaagggcagaattactcactgaaagctttaattgtgtcctcaattgagtcgaattgaagcgcggggtccgtcggcgaaggcatttcgtagacagatctttctcccggatgcaagcgcaggtagtgaggatatcgactgtttatttcctgctcctaaatcggaaactgttttgtgtattcgtacacaatcaattgcgagcctcgaaaaacagcagcgatgcgagtacgggtggcggatgttgggtcagcggagattctcggtgatttcgggacgcggggtgacgagggcgtgcggtgcggtatttgtctggcgacacttgcgagaattgtatgagcgaggcctggatgttttgagtcaaagatgtgtcaagataacgcaatcgatagtaagtatggatctgagtcaagcagacgcagacagaaggtagaagaaggcgattgcaaatcgtttgtcagtcgactgtcgctatcaacccactctgttaggtaccgtatccactcccgcggatgccgaggcccctactccattgttctctatagtcgcctatttcaatcctaaaatgaataaaagacggaggtcggtgctttgatcatgtaaatgatagagaatgatagattttcggaagccaggcattgtatgtataagggagaagatgacactgaggatttgtagattccgacgtaaatgtccaaagtatattcctgcgcctggtaatcacgaagtctatgtaggacgaactgagaagggctatctagacgtacaacaaaacccgctaagtgaattcgcaagaaagaataaaagcagtgacggttgttctaacctcaagaaaataacatacgaaccaagtcaattctgaagagacccggcccgttagtccatgatgaacctgtgaaagcccccgcagggtaaaagggaaaataattaaagaccgaagtcgcccatccgccgcacctcgtcagcttgcgtctctagagctcttcgcatcattttcgagtattctcgctcgcgcgcttgtagttcgcgctttttcaaccgcacttcttcgcgcgtggcatcatcgacttcttcatctagagacatttcgtcatcttctcctatttcgtctgtatctggtgcatctgagaacatgatttggcctttacggtcccctgtccagaccagaacctcattaccggtgaggttaccgcctgctgggagactctttcgtgctacatctgcctcgttttgggcccgagacacactagcccagaggcctctcacattatgtgcaccgtcgtgtatatgagagtaactatgaccgtctggactaaaacgcagtccctgcagtgcagccgctttgagttgatttttatgcgagcgaacgtttagttgctgttcatcacgctcattccactttgatatttaccgatcccccatcgcattaggacaatctcccgttgccatgagatcgggacgggctgtactttttgagaggagcaatcacttctgtagatttctgatcttcatccttgttaggtttataatctccacttttacacgtccatgcttcttacatttaaccgcggttgtgggactctgatattattcaaagttagcccttaccatcttttttatcattgatacattgcaacgttattcaattacttctactaatgtattatctcatttcatgcagtctcttctgggttaaaaattgtttttctcctcttatttctcttctttttatactttttctttctacattgggtcccatttctctttattttagttatatttccttatctttctcgatagattttttatactttattcattctttgctcctctttactgtcttcttctttttactcattattacttactctttcttatcgactctttttcatcgtctatattatctatatttgatttctatctcatcttaatgattattatcttatatacatttctttcaactcattgtgttcttaccactcaatacttcttgtttgtcttaattatcttttctgcttctaattgtgatacat

SEQ ID NO: 4319 - DNA, 2355 bp, Emericella nidulans
gcgtggtttgttcttctctgtagaaggctctctgctttcggaggatagtgagtaaggagtcgatacgcttcccctctgagtaggggtttctgtcgacagcccaaatgccgacgtaactccctttgaagacaactgacttgcacgaccccaactgctgttgggacgagaaagcggtctgttctggttttgattcgaagaaatcgacatcgacctggaccgatgcggactatcttgctcagtatcagtaggccagactcctcgggttctctcttgatcctgtagttctgcaattgaactgaaggttgtgaattgctttgagccatcaactgggatacagcctcgccccccttatgccgcactcgcttatgatgctgcgccaccgattcaaaaagattttccacgcgcttgcgcttggggctgagggggtggatattcggaagaaactgtccatgttgttcacggccagtaatcgcttcagggtctccacgaccaggtaggacttgggctctggtggccagcgactccgagatgggcgtagcatatatccttaattcttgtttagtagcaccggaaacggctctctctttcttaggcgaggacaatataggtggcgtgggcggccgttcataggaggtggttgttgacaaaataccatacaccaacaggtcggtggttgacgggcctgaaacccttggccgtgtagccccgttcagatccaggagaaatccaaccggacattgaatggtctgaaataaggctacttcatcatcctcctccaacaatgtgtttgccagtaatttgtgtttcagccatcgtgaggtttccggattactcgtatggagctcaaggttcggaccgacgcgcgcgtaaaaagggataagagctggattcacaaaagctttaaacgccagagtagagctctttagtatgtccgattgccaactagcggaacgatcgattagttgaaggtctgtgtatggttagctagcagctttggaccggcgcaagacgccttaccttgaagtagcgactgatccgccagtgcaatggcaccagaccagatattcatcttcaattcgctccgcacctagcagcatacatgccataagcgctccatccatacaggctattgctggtggtaatttggtgaccggcgttatgcatgatcgacacgacgcgggtcaaacaggaaagcgcggtttcacgtgacttatccatagatctacagatcgaacatgccaacatgatgagcggctgagtcgacatatccacccatatcaatcgcgtgtatgcagcagacaatagaaatcatcttgcaatttctatatgtaacgggaaagtagctaaattaaatcaagccatcggatcgccgaataacaacatgctccaagatagaacatcatgtaaagcccacatcaagaactcctagcgcacgtagaagaaagcaaatattcattgagacatggaaattcaagtcggagcagggccatgatatgacacaagcatgaggatcacctgacccgataatggctcataatctggtatcagaaacttgcactcggtcatcaaacaaatctcagcagctcagaattcctcttgttcccggaaaaacattgaaaagctgatgattgttccataaatcagtagacctccgaggatggacatgatcatggcgggcacttgaattgcaccactgtgcgcaaggacggctgggagcgctgtaaagatgagcaaattagccccgttcaaatagcatagtataggaaaatcatatcagaatcgaaaaatggcaatttcctgaccgacaatgcctcatcattttgggtagatcaacttaccaacacccatgagtaccaggaacccggtcaagaaccggccaaagtcggcaacggcattgccagagctgtccataaagtcatcagggttcgcgcatcttgagcagatccagttggggagcggcgcaataacgtatgtcgcaacaacagtcagcggcaggaagttgtgccagagagccgaagagagtataacaaggagaaatccaatcgcaagtacctgtacgtgatcaaactatgagcggccggtttttaagcggaactgagcaacgtacgaaggagagagcgatgattgtttttagaccagccgtcatgactgcggagacgcaggtgcgtcaagctcaagcttcaggcagcgggcagcgggcaaaggaagttgttgtaggactgtcttgtgcggaaagcaagcgactgcatataactcctcagtaataggagataatggcaaagcctcgaccaatctactcaatcatcagattaatcaatgtgctaatgcgggtgttgtgaagcatggaactgagga

SEQ ID NO: 4320 - DNA, 1180 bp, Emericella nidulans
ggcaagcttcatgatgaagataggtgacccaggaatctcattcgccgcagcattgtacaggttgataaagtcctcttccttctcaaccttacggatacccttaccaccgccaccctcggaggctttaatcatgacggggaatccaatctgcttggctttctctagaccctcttccggagagaatgtgcatcccttgttgtaaacctcttcctccaccgtaacgatgccgttctcatcaaccttcacctcatctacaccggttccagaccacggaatgcacggtacctgagcgtgctgagcgacgatagtagaggaaatcttgtcaccaagagatcgcatcgcagaggcgggaggtccaataaagatgatctttttgggagaagcggctagagattctggtaaccgggggttctcagaggcgtgaccccaaccggcccagacggcgtgaacgtccatccgttcagccacatccacaatcagctcgacgttggcgtagttgttgttattcgtaccaccagggacctgcgaggagatttaacaaatttgacctatattatatacactccgaatcatccgaaaggcgtttccatacctcaacatattgatcagccatacggatatagtcggcgttcgccgccagatcttctggggttgccatcactgtgaattgaatggcacgctcgttgccgaatgtctcgtaggcccattttcggacagatcgaatctccttgacggccgcaataccgttattcgcgataaggacctgaaagtgagagttctagttagtcgccggtccgaccgcctctaaattattcttcaatagtcgccaggctaaactcaccgaggtgatgacggagtgaccttcatggttagcgacaaagtccttgacgctgcttggggcagcagcgtctaagtggttgccaccgatgaaatgtgggggagggttgtgtttgggcggctcgagaggcttcgggccggttgttgtaccgtctgggacgcccatattgcagtggctgtttgagtattatgtattaaacgcttcccatgcgatatatattaatgcgcagttcgaaaagaagttcgggggaaagtggaaagtcggcgaaaccgcccgaagtcccgagagaagggggatccggctttgttaattcggaaaagacaagggtgggataagccggtt

SEQ ID NO: 4321 - DNA, 3290 bp, Emericella nidulans
actgaagccaagcctgcagagccagctgccacggagccagctcccgctgcagacccaagactggtacgtttgtccaccgtcgcattgctgccaacgaataatcgcccttctgacgaacataaccagccgagacccctgctacagacaagcccgctgagactcctgcacaaaccgagacttcagcaccggcccctgctccagctgaagcctcgacggccgccccggaaaagaagcctgaggagaccgctaccgagtccaagactgaaactcctgctgcaactgctgctgccgcaggtgctcctgcccccaccagctcctgtcgagaactccgagtctgagccctcagtacctcctgattctacagttccccagacaccatttgaaacatcagctgagaagccgctgagtccgctgagctggcgaagcctgcggatggagaaggctgctgagcccgcaaaaccgccgacgaagctgcccctacggcgcctgctgctgagccggcgaaaagtgagtcgcttactccaactggcccatattcatgcagtcgctaattgtgaaaagccgagtcaaaatagatgaactgcgcgccttggcttaggatcagtcttagttgggttttttggtggaccgcctctatagcagcagttctcttttcttttcttttctttccttttttttttcgtcttcatctcataccccagcgcgaacataacgagtttgatcttttgctgttatttcatctcaaatatgatctacaataccctgtcatgctgtcgtttcagttgcaagtcatctttcgccttatcggtttctagtacggattggctatgctggctgatgtgcatgatatcctttgaggctttggcttggttaatcagtgcgccaatgatagaactcgaaatgaacagaattaagtcatgcagtaagccatgcaatatgggtatcatggtttcacatcgtttagactcgagcagttgccgtgacaatcggtgtctaatcgctctcctgctcggttgcactcgcgttggcctccattgccgctatagagcccgcaccatcgccggccccagcggcggcggccgcagctttggcctccctcgccttctgtcttcgcttaatcttcttttcccggttcctccgatttcgcttctctgcctcggtctcctttgctctctttgcagcagcagctttcttccgcaactggattcgtcgcttcttacccggcttcttacgagacagtggcactctctccggtacatctgcaatgtacgtggtcgcaggtgttgccggagcagcgcccttttcctccttaggaagttttgtatgctcgcgtttcagacagatcactcgccaagggagatggcagccgggctgtgtataattgattagaatagcactcccctttctgccgagtccaattgagccaataaaatagggtgtgttagaccactcacccaaggtacacccgacaacttcaccatatcctctccactcacagccacatcctcgaactgtttcctcttcagcgcgacgcccacatcttcatctccctttgccccagttccagtcaagagttccggcgtagaaaaataataaccccaccctcggaacggattcacaaagcctccctccccggagcccagagctgtaggcgttggagaccgtaatcggattcgtaacttctgtgcgttttgagctgcgactgttgttggtgaatcgccgctttcttttcgagcagtactaggagctctaggcgtaggcgctgaggagaatagccggaactcaaactcttgctcttcaagttcgttgtcctccgttcctcgtgtctctggttctggggcgggtgcgacattgaagtcgaagtctaggagagcacttaggcgcttttgcgcatcaggaattagcgattctggaggcggtgatggggatggcgatgaggatgtgcgggtcaggaggtcatctcggcgaacgcttgtattatcagtacggttggtaatagaagtttgagtgggaggtgagacttgagtgcataccgtttcgcgtctgggaggtcgaacatcataatttgtatgtgtgataacttccagaattgcagcaattatatgggttccgtttttttttgcgatgggaagggtagtggttggatagtgtggatatggaaaggctgctgtgcggagaagatgaggtttgaaaatccgtgattgaggttcatgcttacttcctactcccacgcacaatgtcaagttgcggccacgtcccggagcatttctacggcggaagcatgaccagcttgcctacatcttcgaaaatctccttgaatttaggggaacagtttatactctcaatattcacatggattcccagtttcgctactgatgtaaaccgcaatagagcaaatccctgtactaccacagactttataacgttcacacgcagcggccaccatcaatctgcagaatattagcgcggaaacttggcaagttagataatgcatacctccagctcgactcctgtgataaaccccgcttcatcacttgcgaggaaactacaagtattcgcaacgtctgctggcgtcgaaggacggcctagtggtatagtcgacacaaacgcagccctattttcctcggtgtccggcttccctaggaagagatgtgtcctaggaaggatgttatacttgatacaaaaatgaccttaagaactgcgggaatgaggtcacttacatgccactgctcccaacaaccgggcacacacagaggaaccttatctctggggcccagactcagcagcccaaagccttggtagcattgctaccagcagctgtggatgcattgtaccacgtcaaaccgggcgtgggcgtaggccagcagttgatgagacctggataaagcatcctggccgattgtgttctacaaagtatggcacgataccactggtggacaggtatatcgacccttagcattgacattcacgcagaggtcgaaatcagcatccgtaacttcgagagtaggtttgttagagtatgttgcgcccgcattgttgaccacaatatcgagtgtcttatattcgtccagcgtagcttggagaagcgcttgccaatcatctcgccgagtcacatctgtgtagatgaacttgctacccagctctgctgcaactgcctggccatttttttctgaaatgtcggcggcaataacctctgctccctcctcggcgaacttctttgcggagccgtagccgaagcctgatccagcccccgtaacaattgcgacttgccatcacacgacagaatacga

SEQ ID NO: 4322 - DNA, 2242 bp, Emericella nidulans
aaactgggttttaatttttatgaaaaaaagagggttctttgattactggaaaaaaccatgtgataggaaagattgataggagggtttttagactaatttgagtggggggtattatgggaccggagttttatagaaagttcgagaggggtggttaatattggcaaaggggttccccggaaaagaaataagggatattttgggtggggaaaagggaggccaagttatagggggaaaattgattttgcaaagggagaaatttaccatttggagaaatgggttaaggataaagaaccagtttatggcgaagcctttttaaggaataagggttttgggtcctggataaaagacccctaaccaattagcccttgcccaaaatacttggataaagaacaaagggtggtttcttatcataggtgtcagggcctaaggttgaatggggtctatttaagagagatttttaaaattgggagggttggtttttttctagtgggaaaaataatattttttataagttaaagcatcgggatttataagatgtaggtttaatgaggtgtaaaaaaaatataaaaaatataagatataaagtcaattgtggactttaacaaatttagcgagttggaattttttgtacatttgtcactgcgctacttgtagtggccttgggctctaccgttgttttgagtactccgcctgcattcagtagcccccgccggagttcttcttcgcagggacggcagaaggttaccccaaggttcctgttgtcgatgatggaagccgcttgtcaggtgtggagaaatggtggggtcaaggtttcgtaccggttttggagctgaccatgaccccccaccacttcacacttcacacttcattactaacctcaagttttgaccaccatgacagcggctgcatcatgcagtagccttccgcgagcatgagccaagctgactgcgagcactgcccttgcacctgacatacgatgactacatagtattctgttagccgcagccaatcacgccatcatcgtctcttagaggtcctcttcgagtggcgatatcacgggctgagcaatgaggggcagaatttgtaccagaaaccaatccgtagctctccattacgagcgatcctctcacttgagaatccaagaggcccagggacagcgccaccaagacagcttctgcccctcatctttgcgccgactggtctggacctggtttcagggtggcagggatcatatcagggcaccaccattcggagctttctcagaaaaaggaacaaaagaaaagctaaccgcccaacttccaacgctgtcttatcgccggggatgcccttgcttttacgagtcgtcctggtcagctgctccttcgcggacttgctccggtatctacaaatagctgactgctgtccgagtactcggtaccagtgagtcggtacctgctctagagctgctgattagtaccggtacagattgtctcagagtatcggccatctcgactctacagcagtaagacctgtcaagacacgaattctcgggctgttcgaaatcggcccaatcacatgctttatactttattgcatcggtctctagggcaaccttcaggtacatctcaactttcgaatcgaagacgcgaactttgtcgtctgtcgcgagaggataatctgtccaaggttcgtgtcactggcccccaaccaagcggtgaaagctcgcaacctctgtcccaagcgtcttgtaaccaatgacggcgagttggctccaagtactacgtatatccatgcaagcaacatgcatatcataagcagtaatattactgctattgcatagtacatagtacaacgtactttcggactggaggctcccgttggcggcgacgtgaccagcgctgagctggcagtggcaatgctatggtgagttgctgagctgtagtgatctggaggccgacagtagccgtgtctcttgtgccattctcttgagagcgtaagcgttgctgctgccaccttgtatttgatgcaggttggtacctatgtgataattgtaatcgagtttcgaggctgtaaatgaggctcaactgctatgcttatcccgtctgtctatgactggtatgtcaccaaccagcacttgtagctctacggctgagcgaaacatatacgattagatactagactgctgaaatgaatactggcacgcacggtatcattccatatcagacccgcaacggttgcaacttgtgatgatcagcttattcag

SEQ ID NO: 4323 - DNA, 4472 bp, Emericella nidulans
ataaaatgtgtgaagcgaaacaatacctctgaaaggtttttaagagagaagagaatagggagagagagtaaaggaggagagtgcccagcccaacgataaattcgaaaaggactctataaggtattaactcagatcttttctttaaaaggcattatttaaaaacctggattcaaatttactgaaataggccccggggtttaatgagactaactcagggggttaataatcaagccaggttgtcgatcctccattttcatacatacaacttgctaatattcggtgaaggaaataacaaggccttggtagctcgacgggcccccagtaaattattttacacctattacctctcagaaagcaagcaaagaacctccgatgtgtgaacacagccagcattttctggccaataatctgaatgctgatagcagcgataagaccttaggtcctattcaacagcccatcaagaactactaacgataagccagcagggctccttgggctttgactcagattcctcggtgactgagggtttccagcctggaacaaactccggcgcgtctccccggagctgaatgttctgagcaactggcggcccttccagttcgtatgcattctctccttcccaagggtgcgcgagtggagtttgaataccagcctctagatggggcggctggtaggtctaaggaagaaggcacttcagcactgaactggcacagcggagcgggatgttgtcttacctgttgagaaccgggaaatcgatattcgtccagaaacagtctagtctgaaattcttgatatccatgatgcaccggtctcctgaacgggccttcagagcctcgatctgccgcaaaaggcacgtgagggtagagcggctgcggaggtggaaagtcatagggcatggctggaggagtagtatttaatgatctcagcggtaggctgctcccagagttgccggtgggcccgccgtggcgagcatgccatccccaggcaggagcgggaggatgttgagcgtcgtgcgtatgatggtgatgatgataaggaggaattgaagaacggtgaggaaaggcttgaaggccaaagccataacgtgtattggggcgcccatcgaaagagtcaagctcttgatgctggttgaaggaagcggatgggttccgtgaagtgaagctcctctttctttgaaaggagccaaactgtgagctgctctaattaaatacaggtcagtgttgctacttgttgatcatgcaacttccggaacagggcgttgcatgaagatggctgctgcgcaggcccaagaatgggtagagacatactgagcttctctggtacctgtgagctttccccatgacgggctgatatggttgtcgcgtctgtttgactgctttggctttgatttgggcttgggcaaagtgaagaaagaggatgaggagcagggtgggagggtgctgttggtttcagttgctgtagaattacgctcaaataacgcaggcacgtttagacgttggcaatggaaattactaaccacgcatcggagaaaagacaacatggattaagcagaaccttcctgagaaggggtagcaatcattcttccggctttgttcctcttatccttcatggatacaagtggatatggacgcctcatcttgccatatggatgtggctgtcggaaagtgaaagtaacctcttaaatatggcctgcgtcattgttcatgtaggcttcgatcaagccgtatattgctcaagcaagccacacgcccctccaatcgctaatttatttattgaatgagttaaatgtggctcgttattaacagccaagccgtacatcctccatgtttatcgaaaaccacaacgtaaccataaagcttcctgacttctgcaccgttagatgcaggcaaacatcaagccccgcctaccacgctacatgttttgttcaatttacatacacttcccttgtttttttcttggtttgctatggtctttgtccatttgacttaggaataaaggtgaatataaggagtcaacagagaaaggaacccatctaagtccaattcaacaccaatccataagatcggttttcgttccggtttgccagcggctgctactttcgcagttcattgcgcaactgattaccgaatgtgtaccggattgaggaaacagatgcgaccgaggaatgactggtatgtcacagtgccacaatgccactcagcctagtcgtagtgtacggccaaagctgttaaagagtagatgttgaaagaacctttttctttctttctttttttttttttttttttttttcagctgcgcaaggatgagtcttcccccgcagagaattcaaagacaacggttgctgggcaggacgaaacaaaagaaaataaactcaaaacatggatcgagcgtatcaaccaattttgggtatattgaaatgagcgtaagctctatctgaatcagtaaactatctcttagggaggaggagagagagacaaaccctaaacttagtccatctcaatttgggactgcacttcagctagactcgtattaagggcttcctctgcaacttgtctctccaagagcttctcttttgctaaagtctcggtatccaaagcggccttctcaatgccttggtagtcagcgagctgttgttgcagactaagggcaagctaaggacagttagtaaaccaacataattgacgaccaagcagatgacttacgcgaagatgcctgtctctttcctgcgaggtaagtgcttcgccaacctttttgcaaagggtttccaagcaggcgcggaaggcgtccaggttcttcggttgtgtgcagccgatcgacagatccaagactcccaccgtccttccggatacagaagatggggactggattgctctcttctgagtagagagcatcaataagttaccggtggtgcgcctggacccatgggtcaaacgttgggggctgccagttgaagccgtacgcacatgagatctgcgtccatggccctgcagagtacctgaagcctgttccttcgagccggaatttgcctttatacgggttgaccttgtgggacgagcgaatgatggtatgtttccctcagaatcgcggtgtggaggcgcaagcagacggggaactgatggggttggagtagtaggcgactccgcgttcttagggttacgggagcttctgttccagcttactccactggagagtcgggtgtgcttcggcttcagtttaagacccttttcaagattgttatggagatgataatcttttgccgcactcccctcagtgctaggggcttggttttcggtcaaagtgattggtgcatcgacatctacctttctgacacgctccttttcagcagtgccgctccgagaacgaaatatattgcggaagtgcccagaagatggttgcttctcgactcaaaaagcctagacttgtcagggctctgactcagattctccacgtgcgaacggaaaggcgcgatatcattgaatgtgacgttccttcgcaaattcgtggccactgtagaagcttccccggtgacagcagagctggacgctgagccagaacagattgggatgttggttaaagcctgaagtgaagaggttcgaggaggatgtgggctcattgcactaactttaatggcagtcacaggcattggcgtgctctcaggttcagatttggtcgtgtctttaaactccgacgcgaccttcactggagtctctgactcagccatcttgctaggaacctggcgaattcctgtttctggatcagtgtggtaccgttctggtatcttcggcacaataggctcgtccacaggtcgcaagcttctcgaacttggtgaaaaaaggctactcaggctgggcttgttgactgtctttcgtgaaatggacatctctttcccactaatgtcccttttttgaatgctatcaagcggaagctgaggacggcaaagcttccgggtagacggagtacttccttgactattgccaccacttcctttggaatgtggtgtttccaccgattcgagggcagtgtctccgattttgttggtatcctttggggtgttgggcgtaagcttatccaggcgttgaaacaaagaaggggtagagggctgagcatcgactttttttgacgcttctccagacgctcctcccataatcacgtcttcggcagatgaagcgatttttagagtaggccctggggaacgatgacctggagttcctagcacccgtgtacggtgttcgccagtaaaaacagtcggcggcctctcgggatcgccgatatccctgaagtcccaactgctgacagtcgaagaagatgcggatggaggtgttagtccaggtttccgttccattccttcagttgactcatggactagagtggtctgctccgacggaggtcgaggacgaggtccacgaggcttctcaactagccgagcacctgaaaaacaagtctcactctgccttttctgtaaagtggcaccg

SEQ ID NO: 4324 - DNA, 3104 bp, Emericella nidulans
ggccgcccgcggagcttaatccaccgtcccgaagcatccacgatgtgtatgttcaactacgacaatgatgcggtcacctgggaggagctccccgttcatactccaaggaaattacactaactctttccttccttgaagctctccgcaaggccggatatttcaagtagaatatgcgcaggaggcagtgaaacagggttccgtcgtggttggactggtcaataagacacatgccgtgctggttggcctcaaggttcggaatcccatcaactccagtaaccatccccacggacgaaatgaaccactcctaacatcggaatgtgtctttagagaaacgccgaagagctctcctcatatcagaagaaaatcatcgaagtcgattcgcacatgggcgtcgctatcgccggtcttgcatcagacgcccgcgtgctctccaactacatgaagcaacagtgtctcggctcccgaatgacctacggccgccccatgcctgtgaaccgcattgtctctcagattgccgaccgtgctcaaacgaacacgcaacagtatggaaagcggccatacggtgttggtttgcttgttgctggggtggatgaagctggtcctcatctattcgagtttcagccttccggcatgactcaggagatgctggcctgcgctattggagcacggtcccaaatggcgcggacctacctggagcgcaacctagacaagcttcaggagtccagtcgggatgagctcatcacccatggcctaagagctcttaaggagactttgtctcaggacaaggagctgacagtagacaatacgtctgtcggtgtggtgggtcttgcggacactgggaaggttgagagtttcaagctctacgagggacaacagctcctaccgctcttcgaagcgctggaccagtcagacgcaagcgagacaaaggatgaagagaatatggaggtcgattcataaacatgaacttatgcacacttatgccatagacatgaaaattgccttacctggcatgggaataatacgacagaatttcattcctgcgacgcagtgtcactctccgtaatcaaggctttttaaacatgcctatttgcaagttctacctgcgctaatcatctatacaagcccagaatcgaacgcatccatctccgtttactcatcctcccatttcaactgatatcttccctcgctaacctgatactgcaccagcttcggccaaacttcctcaaccgtcttggcctccacgaggatgctcccattctccttagacacatatccctccctcactgagttcctcacccactccaacaagccatcccaatacccagcaacattcaacagcacaacccccaaatgatgaatccccaactgattccatgtcgtcatctccatcacctcctcgatagttccaaacccgccggcaagtgcaacaaagccacttcctggtcctccttcgcgcaccttttccgccataagccgtttccgcgtgtgcatgtctgccacgatcgtggtgacgccgtactccgacgacgggacgttaccgctctgcgcctcaccaacaacgcgctcggctactttccccgcgccaccagcggatgcggaggacgtcgagggtgtaccggtagtaccattaccgttctgtttataccccggttcgatgcttactagggcgcggggaatgatgccgtgcacagattcgggtcccgagagggaaactaacgtgcgtgcaatctcgcccatcaggccttttgtaccaccgccatagacgagttgtatattattttcgtggaaaatctgagccaggcgtcgagcggtttccatgtgtgcggggtttatgccctcgacggagccacagctgtaagtgtttttgttagcattttctctatgtttcaagtattgctctttagaggttcctaggaaatgggtctctatagcaaaagttgtaaggataaaaggataagtagagatagaaaacggcatggcgggggcggggtaatggttgattcccgacttacaagacacagacgacgggccgtttggtctcggcaattcccattgtatctaattggattcaagtgagtcagggaattgcgggaaaaagaatagagaaacgggctctatattgtggggatttggagttatatggacgtttctataccgctgtgacgttataaatgggggcggcggatcgtcaggccttacttaggtaggtaagcacagagtacaatgatgtaaagcatgaggggaatgcccagagcattgtaatagttatatagtgactgcctatttacccatctgtgccataatgcatggctttatatcacgaggtatacttcgcttacgctagggtgcaggaagtcattggcgggtatcacagaattcacgtacagttcaagctaactcgccggtttgctctttttcttccgcagcttgggctcctctgcagcactgtttttatccgataatttgcccggcgtgtcaaccttagctagcggcgttccaactcggcctcccgcgtttgtgcttgaaggttgtgactgcttcggggctgcgcctcgatctgcgtccccgggcctagacaggataaaggatcccggttctcccatcaaggggctctcgtccatgaactcgtctccataccgcgctacaaggctaaacgattctgcgagggatcgcatgtcataaactgccgggccagaactattctgtgatccagtgaaggactgtgacttgtttgtggcatcggcgtcgggcattggtgtgttctctttgcttgtttgcgactgaacgctcggatgactaacatctgttgatttgggcgccggtgggaggtatgtgtgcccgtgcgagggagtgaatttgggcaatgttgatgcagttttgagcaaactcgtaagagaggtcactgctgaaagcttgacggctattagctctgcaacaatagctgatcgtgaaacgctcaaggcaacaaggcatactattctgttccctatcacgctcgcagctgaaggggccatgtaaatgcagtccccgaccaaaaagaacgtagccagaaccacgacctcgtcctcaaacccggacctgtgccgccttgtcagatgtccgaa

SEQ ID NO: 4325 - DNA, 4173 bp, Emericella nidulans
gctacccgttctatggaattcatggtcttagtgaagatgtgtgatatttgagtacggtaaccgaccttttcaatacgccagtgcagccgtacttggggcaagagctcaaatttgaaagctggcccctttggggtccgcgttgtaatttgcagaggatgcttcgggtgcggcccctgtctaagtgccctggaacgggccgtcagagagggtgagaatcccgtcttcaaaattggctgtgagcaaatctgttgagaaacccctctctggggatataggtaggcctgtctcaaacctccttccggagcgttggagcttagtagactggcttgccgtatccttagggcaattcaaacccgcttcaccggacctgcctatccaagccacataggtgaaataaggatagtggttgccttgctcaatttcaggccgacatccatcgcgacttgaacgtggggataaagcgcaggcattagccaaggccgcaatagcaaacccaagggattcgggcatggtcagcaaagcgaacataaaatcttctaccacggccagaaagacctcagccgctctaactggggctgcaccagatcgatcgatcacggacagcgcttgctggcaacaaccagcatctcgtactcggccaatcccacatcctcaaagctcagctgcgaaaatggcgagtcccgaaaacaagcctcgtaatcagcccagtcggctcttggcccaagccacaggatcaatttagtccccagtccgtataactcaatgtatttggtgacgagcttcggttcacggggatagacaaacatccacgctatggcgtcagaagcacgtggaagaagatcccatgtcccgctaaccacatacatatcctgctcggcgatgtagaggttcacggaggagttgacctccacccctttaatgaggacattgggatgccgatatgcgagcagagcttctagaaggccggcgccgctgccaatggagagggtaaagtgtggggtggtggggagaagcgacgccaaacggttgacgagggggctggagagagctaaacagcagttggggaatgcagtgggactggaggaaagacgggatgagatttgggggaggtccatggtgaggtgagctgttaagtgtaagttcatgtggtgataggtgagctctggagtagtcttccagacttcgttaacgggcggaactgaaaattaattctggcgcgatccgcgtcttcgtcgcgtctcccgcgcccgtcgatcccatctttagcccaagcctcttctcattccttccctctccccagtccagcttgacctcgatctttacatttatcttggactttctttgacaatctccactcctgcactccaacatccccttactcaatactgcataccccgtactttgtacattcctccgaattctgcgaattccaactacaagacacagatttcttgctggacagtgtgcatttgcgcctggatataaccaccatggcttcaaccaaatctgacctctccaaacgccgccgtttccaaccacccattacaaccttcttcacaccatcgtctgatcctaacggctgccccccgccttcgaacctctcctacaaccattactcagccgtcaccaattcccccacacccgtcgtgccccccaaagtccaggcatcgcttctatctgtcggaatgcgcgtccgcaaagcaatcgccgatggatacaagacacatcaagcgaaggctgataaatacaccaccttttcatgtgatcataacaacaatacactcaaaacaataagcacaacaaccatttctactacaagctacaatgcgtcctccgcccgctcagaacttgctcctttctgcggcgtgagcaaatcgaatgaatatactaccactactcctcagccgctcccttccgcttactacgacaaccacatacccaggacggacgaagacgatgcgttttctctaccccctagcagccaagaatccctcgactccgctcttacgccagaacctgctttttcacaaaagaaacgctcccaccacgacttcgatttcgactcttacaaagacgactgcgaagaaataaacccgctagatcctgatcctgtaacaattatcagcggacgaacgatcctctccccaagatccacctatcaacgccgcactttggcagctcagaaatacaagccgatgcatacgatggatctcgatgattttgaggaagcaaccttcctacgccgaccggaagagcttaatgatatggatattgagggcgaaattcagatgagacgcatgtagtccatgatccgctctaccattgtgcattgtcagagacccctcgaatgtcgtcattgtttaaacactgctggttccagtgattgccagtttctgatttatgattgcagtgctgggacctgatggagaaggttgtcaaggcctttctcacagcgttttctgctttctttcctgttcattatctttcattgaaggcatatgtataatacccagattgttgtggcctggctttttgtgctaacactgtacttacgaatccgacatttctcatagaaatgaaagaatagcaaaactaattgtccatatttggcttccgtcctaggagacgagccctatgattcattgaaatgatcttaatgcatgaattgtttctatatagcatacaagcagaaagatttgaacattcgagccgagagacaagacgccaatattccgtcgtaacaggtaggtgtctagtcatttatagatatttccctcaaagagaccaaacgcccgcctctcgattctatgattacaactcatctttcttgttgtagtttggcttttcgtcttgtttattctcttcagtatccttagcttccttctcctgtaccggtttttcggccttgtctttcttgccattcttcttcgtggatttgtcgccagatgacttcctggctgctgctgcgcccatcttttcataaatgcgatttgagattctctcgaggcgcttgaggtgggcatcaatttctgccacagttaaagcgggatcgtccgtctcattcagcttttcttggttggcaagtcgggtttccagccatgaactagcggtttcatacgtctctgaaagacttgccaagtcagacggttgaaagacagagtatttcaagggcgcaggcgtcgtagcacttttggccgatgatgtttccgaagttgaagtgctgtaggcgtcattttccagatcaccagcatcggccgatactgaaggtgtcgatgaggatgtttccgattcactggtggtcgatgtgctagctgctgcgaggctggaagaataaatatcttcgtgttgctggatttgcttttccataacacttatcaccatttgggcattcttaagtgactcctgtaggagttgcacacgcgcaggacgaacagcgttctcctgttttctcttcaatgctggttcgacgatctccttcaatgacttcaatttctccttgaactctggtgtcttggcgtcttcactgtcgtaaatccaatcactggcagcggccactctttcagtgagggcggttaagtcatccgctttgagcacttttacaaactcttcctcctctgcgagatcccgactcctatagatatatgactccaactcattcagggctttttcgcgaagaatgcggtcacggtcggaggcgtcaaacgcagtgagacggctttggatgcgctcaagttcggctggagatggagcaggaacgccgagcgggaaccttgtgaaactgacggggattgtcacctgccttggtagatacgcagctttcttggagtcttttgcagggtccgaggtaatagcatcatccagtgacgatgtggaggccctgacctcattggcctccaaggtgacagactcattggggtgtcatcttctttgcaggatgctggacatgcttcttgaacctattccaagaacccttgacaactccacacagtttccaattaaaatctttcttaacaattacaacccctttagaaacctttttcaaaaggaaaacaaataccgggttcccccaaatagaggggggcccttttaaaaaaaaccccccgctattccccgggggaaaaattttttacccttgttgaaccccccaaattttttatttttggggtgcccacc

SEQ ID NO: 4326 - DNA, 2594 bp, Emericella nidulans
ccaatagatgtcagatatgttgtttacaactcaagcgtgcaggactcgggacacgaagggtaacggaagtgaggaagagaaggggttaaagcacagtaagtgggaaagcgaggggatgggcgtctaactgcacacaggacttgtatcctacgtcccattgcctgcgccaggagagtcggagtaggagcgaggatacttacttgaccgatcatgaaaacaggtacactgtgctcggtaacggtgaacccttgctgtgttctagagatcactccggccctgccctcaacgtctttaatgctggggacgaaccgaagcggacgaggcgcagtcgggatcgttgtggagttaggcgtcggcgttctctctctgtgccttccctgcagcaagtcacgatgtttcaactccaacgcagggcgcttatatcaacaaaagcgcaccacaattgagaagagtgaaggatataataaggctattgggacaagaagcacagacagcagagcagagagcgttcgatcggtgaccgattcgctactccttccacttcaagttgttcgacggtccctcacacgtgattgtttcagatctactcttgtaatgcctgaacggcaaggcatgcttatgtgcttttatccttgaaacatggagaccagctccgacagctaaggtgtagataataataagtgatgcatgccattaaccttgcagaagctgtctcatgaatgtaatttgtataaaatgtctatctgagctcttccacacaatttgttagtatatttgacggctacttttattacatacaaataatggatcttccagagacccgttcaagcaaatgcaaatgagagagggcagcctttaagacaatggttatcccttagccaggcttgcctatttaatgacgagactgtaagatgggtaccggcctcgtccaactattgtacaagagaccgctcctgcaaggagcttcatctctgaggaacaatgcggaacaaagtgcttatggacttgtccaggcattgctggttggacgaacaaactgcacagaggtcacgaaggaagtcaccgtgactgttgctactggacgtcccgttgctgaccaagaaggagcagtgctcaaagtactcgaaggagtctccactgctggtttcgtgggcgttacttcagaagagtcgccaggctgcaacgcaaatatcccgttgaattgctcaggaatggacgcactgttcagggactggtcatgctcgtactttgcgtcttgtctcatccggctgtctgagtgatcaagcacatccacgtccatgcaggtcgtatacatttcctgcttgccgttcggcaagccggggtcaacgccggcggcggtaggccaatcccaaatccaatagatggtgtatggcttaccggatggtgcgttgctaggtaaagcgatatctgcttgacaccacagatcgcctcccatatattggtctgcctcgtgcgggaactccttttgtcgtttctgagatatctcaccaccattaacttggtagcagcgcccgtcatcgtagtcccgctttgccagcaaaactccgcgcccatcgccaccggttccatcctcattccacaccttgtggacatccacaagcttttcgtcctgttttggctctgtcgttccgtaaacatagattgtaccgcgatttttgggcttccctatctgtgtttccggaagtgttacatggccattctcctgaaagcgaagggcaatggcggcgcctgcgctcgcctgtaatcgtgggcttccgtcagtttgaacttgtttccgctgagtgtccatgcagagataatcggtctcggtgacttccgctttgccatcaggtggcagtaggtaagtcattgcggtatcgctgaatgaaggactcgagcggaggatgtttccacgagggtatcctggagaaccgacaaaggtcccgtttaatgcaatgaccataagctgttccacccacgaatgggcgtacgctgatgtgaacagagaaacaaggagaaccagcctccagctaagagcatgcatattgttgatcaatcgaaatgacttgtagatcgctttcgcataagttttggaaatatcatggaaaactaacactgtccagcgtgctagttgaagaccactaaataagaagtcagtgtaaatctcatgtcagggggtatttctccagaaccctagttgcaaaagagctgcaggccttttatatgtccattgtcttggttgacggccgctgtattcactcgaagcttcttgtgtttcttagattgtttggacaatggctagaaatcacaaagaaccgcccaaaagaaagctggatccgtccagttagaaaccatagaagctctgtcgatgtggcgtcaatgagtaaatcaggcttgaataactggtcttgaaacagtaaatgttctagagtgatctttcacctatttatcccgcctctatcagcgtgagggaaataaaagagccagtgcccaaggaagtcagccatttaagacatcccaattggaattccaggttgatggaaaacaatgcttgaaacacatggacccagaatcgaggcgcttgatagccaata

SEQ ID NO: 4327 - DNA, 3346 bp, Emericella nidulans
tgactggtcattgctcgaggagctacagcgtgacaagaggacaacgaaggtccatgagacaaaaatcagcattccaatttgtgtagcgctgcagattgctctagtccgtctgctcgaatcttggggcatcacagcatcaggagtcgccagccactcatcaggtgagatttcagcggcttttgctgtgggggctctcacccatcatcaggccatagctatagcctacttccgcgccatcattgtagcagacggaacacagcgcgcaccgggatctgccaagggcgctatggcggcaatcgggttgggtgttggcacggtgcagccttacctcgacaggttgaccgagggcaaagctgtagttgcatgcgtcaacagccctcagagtgtcaccatctctggtgatgaagacgccattgatgaaattaccgacttgtgcaagcaggacggcgtgtttgctcgtcgtctcaaagtccaacaggcataccactcacatcatatggaccccttcgctgatacctaccgggagcgtcttcgaatcgaaatggaccggagtgtagttaaaggtgacaagcagaagctcaaggctgttttctcatccgcagtcactggcgggcggatcaccgacatcaaggagattgccagccccgatcactgggtcggtagtctgatacggccggtagagttcgttgacgccttgactgaactggttctcggggatcctgatgacccgacaggcaggagcgttgatgttcttctcgaggtcggccctcatacagccctgggaggcccaatccgcgagatcctgtcactgtccgagtttggaggcattgagcttccatactggggatgtctcgtacgcgacgagcacgcaggagacagtatgcgctccgccgcgatcaatctgttccgtgagggacaatcccttgccatggacaagatcaacttccccgtgcctgcatatgatggcgagggcccccaggtcttgaccaaccttccatcgtatccctggaatcacactatgcgccactggcaagagtccagagtcaaccgtgccattcgcgagcgcggccagcctcctcacgaactactcggcatgcccgtggctggcaatgaccccagcgcgtccgtatggcgtagggtattgcgtgtcaccgaaaccccatgcgtgcgcgatcatatggtccaaggcagtattgtgtacccaggcgctggttatatttgccttgcaatcgaggcagttaggcaattgactgatcaagacaagtcagtctcaggactccgcctgcgtgacatcaacttcttattcgcccttgttattccagacaacgcggatggcgtggagatccgaacaacactccagtctgtgcctgagcgtgagatcggggctcaaggctggtggcgctttgaggtctcgtcagtcacattggagaaccggtggacactgcacgctacaggcatggttggtatagaagagtcagctgtcctggagactgaacgtcgtcgtcgtccattgtcgatttacacccgccagccaaacccccaggacttgtttgccaatctcagggcacacagcgtctatcacggtccgctctttcaaaacaccaatcgaatcatccaggatggccgagaaccgcgatccatatgcgacatcacgatccgccacgaagcttcgtctgatacagacccggaggtggcagcacagaacagcctgttacacccaatcacgctcgatgctgtatttgtggccttttattccgccctccccagcgtcggagcgctacaggaagagcccaagctcccgcggtctgtcagagcgatgtggatatccagcaacatcagccaccagatcggccacacgctgcagtgcgacacttccctacttaatgatgacccccaacgcggaagggccgacattacagtattcgacggcaaaacggatgccacagtgctcaagattcagggcgtcgagctggcagctctgggaaggggcagctcagccagcacctcgacggaggtgtgcagcagggttgtctgggaaccagacctttcatttcgaaacccgctggctttcgagcagattaagaagcatctggcgtctacaaactctgatcaagaggcagatgtggtcagggacctacagcgcttgtgcattgcttatgcctctgatgcccttcgagagctgaccccgggggatgtggccggccttcaggaacaaccacatctggccaaatactacgcatttctacgtggattagtcaataaaactaccgaggagcctggaaagcctcagcagtccatggagagcgttgatgagaaggtggtctgccgtctcggacccctcctcccatctatccttcgtggtgagcgcagcgtggaagaagtcagaagcttaatggatgaatacaacaccaactcaaggcgccagttatcatccctcagacagctctctgctctactacaaacaattgcacacaaaagcccaggtgctcgcgtcctccagattgggagtagtactggcgccctcgccacacgtcgcatactggagacccttgacacgaacttggtggccagctggcacatcactgagccatcatcggaattattggataatgcgcgtgctcagcttgctgactgggccgatttgctccagttcgagcaactcgatattgagcagagtccattcaagaagaagtttatcccagagagctacgacgttgttgtatccttgcatgctctacacgctatcaaaaacccagccagtgcgctgggaaatgtacgtactctgctgaagccagggggaacgctgcttttggtggagacgactaagaatcaggttgatgtggatttcgtctttgctttacgtccaggctggttgcaggacaagaatccacttacctcctgggacgccgtgcttcaagatggaggcttcagtggtctcgacctcgagatatatgactcagagagcgatattcataccaacagcgtcatcatgtccactgtgcctgccaaggaccagaaggctgacctgagcaaggttaaagacagctttgcagttgtctccagcatcaagacacccccatcatcccccattgtcgatcagttgtgccagcgcattcaggccttgaccggtacagctacgacgcacctcgtcttggaaaagacgagcggcaacacatacaaggacaagatttgtgtttttattggcgagcttgaccggcccattctggcagacctcgatgcagtgcacctggaaggcctccgcgcaatggtcacgcaaaacagtggcctgctctgggtcacgactggtgggactgttaccccgaggctcccgaacgagcatgtgcac

SEQ ID NO: 4328 - DNA, 2397 bp, Emericella nidulans
tcttttgccgatacatctggcaactacggctcgatgaacttcagtccctttagcgactggtctgacatggcctcggcaagccagaatgcaatgagccaggctgctgttgcgcccaccctcttctattttgcgccaaaggacatctggatcttagcctaccaatggggcccaacctcgttctcctacaagacttccagtgacccgaccaacccgaacggatggtcaaccccgcagcctttgttctctggtacaatctccgactccgccacggggtgcatcgaccagacactcattggggatagctccaacatgtacctattcttcgcaggcgataacggcaagatatacagagccagcatgcctatcgacaacttcccgggggattttggcacggaatctgagatcatcatgagcgatacatccaacaacctctttgaagcagtacaagtctataccgtcgacggccaaaaccagtacttgatgattgttgaggccatcggcgccaacggacgctatttccgctcgttcacggccgacagtttggacggtgcgtggacagcgcaggcggccaccgagagccagcccttcgccggcaaggctaacagtggtgcaagctggaccaacgacatcagccacggcgatctcgttcgctccaaccctgaccagaccatgacgattgacccttgcaacctgcagctgctctaccaaggcagagaccccaacgccagtggtgactacaacctgcttccttgggttcctggtgtattgactctccagtaatgtctgcatgtccgggtagatagagaaaaacgctcgtggttttgcacagaggccggcctaagcttgttcgtgtgcttggcaatatgcccatgcttgcggtgtcgatatctatgattgaaagccattatctaagcgagtcgattctcgtactctattagtttagctaatgctaaatatctgttctatactcttggttaccctgattcagcagcaaccctcatgctacaccaaacactgcccaccatgcgtctcttccaacttgagtcatatgacacgatttcaacctattaatgtttcggataataggtactttgtggagttactccaggcttatcctgcttcctgtacctcacaactcgcggctcctcttcgccaggaatccttactaaccaagaatgacaagaaatgatgagctctaccggcacaaatatcctttgcgctacctgagtctctgtagcttggttatgatatcatcaaggtcgtctcgtagatttcagcacgtggtgagaggataccaagttgatcagctctaatacttgtgagtccaaggtaaaggtattcatgggacatctggcattgcgatgccactgtgagtttaagagggaattttcctgaggtgcaagataatcgccaccaacagggtgcattctggcgttgatgctagagtaatagcaacggtgaagacgcaagtctgactgctacctttctacagaagtattagagaccggattaaaaggtgttgtccagttccaatgtattgctcctgaaccctatcggacgcgccatccctaatcgaagtatattttaccaacagagagtgtgtacctagcaatgaatcagtcgaagctcaacagagtcaaaagtcctgtatacttgtgaggggacaatcaaagagacatttactggaatggtaatagatgactgcattgctacagcgtaggttgaaaagttactataactatatgcacaagagcaagcgaccataaaagacgcattgctgatcaccctgatggaacgaaatttaaagagtagcgggataggtgaagtaatgagggaggatgtctatgaaagcaatatttcttatgcagtttgttggagaaatgaaagtgcggctttggacggtaaagcttccatcttcgttggttcgtccgccagtgactcgatactctctcatgtctctctttagaggggctggaaggtagacaatttcctttgtcctagggggtgacgtaacggtcatttgtaaaagtccatcttgactgaacctccatctcaccccaatggcgccctgagggactgggtgtcttccttcagcccaagtcagatccaaggtttgtggctcagccttccaatcccggaaacctggtgtaataggcataattcccagcacataccggctgaggtctgcagtcggtcctgccgcccaagcatgacaaagtgtagtaccgagcccaagtccaggagttccatcctcgttcaggtcttcccagaaacatcctgtgtagtttacgttctgggggtttctcattggtgcccagatagttttaagcacgtataacacgcgttcactatctctggcctgaaaggcagccttcagatggcatccagatgcatggg

SEQ ID NO: 4329 - DNA, 3243 bp, Emericella nidulans
cttggcgcctagaaaacgactcttttgacggccaattatagagcggtctggggtggtgggcagggaggttgaaacatcaagccccctggtgcagacctgaaacgcccggcagttactgactggttcgaatccatgcaattgttcaggagagccgaagcagtggttctcagctggggtgtttgctggctctcaggcagcagcaaaagtgtaaagcccatagggattcagattctgcttgactgttcagaatttgagagaatgtcgttgtcttggagggctgaggcctaagctcaagtgcaggtgggtcaaacatggctttaactactcagagtacaccaacaccactctactcagattataattgtcttcattagtccagagacttgtatttgtggccgtccacgaaaagtctttgtggtctccagactctatcataggtctcattgctgacctacactcgtatgcgttctcgccggcggttcccactagccatcaaagctttgagctgcctcatgtccctttagagctcaacagactgcttcataacgacatcgattctcttctcgtcgatttcaccgacgctaaagcctagcgccgtgtcccatagcatgggttcctgcagaccagtgtcatcaacagtaaaggtacgagagtctgctgaggcgcaagtgcccgtcaggccgttccaggcaaggtatcaacacttgagtctgcgctcgacatggcgcaaaatattgtacaagatgggaatatggatttcaatccccgaaagctcgtttgtgggaaacggggcttgcatcgtcaggttctcaatcagtatggaataactattcaggccgtcgctaatttgtgcatagtgggtagtagacgccaattgtttacaaatgaaagcgtgggttattccacgagggagaccggctctgccaatgtggacgccgagcatgctcaggcgaacggtcttgcgaaaacttgtctgagaggtggcttcgccgaattggaaggcctcactatctatatcttactagtgtttgcgtctgataccgaacatacatgggagaagtatactgctgactttggtacgttgaggtggtggttttttgagacctttgacgcgccacttaccaactttcccaatgctagctgcaaagagaagcagagtactcgaacaaacaagagccgcacaggaaaatgtcagttgcctgcagtttctacttgatggagcttctttaactttccatggtctttgagcattgattttggcttgaggttctcgctgtaggcgttccaagggattatcctatccattgaagctaccgagcaaagccgtctgcgggggccccatagttgacatatggtcgtattggggctatcagccgttttcaatgtctttattgaaacttgtcggaaaaccctacggcccgctccgcgcattggttgacatctccatcttttggatctggattatcaagcggaacatactgctttacggtgactgcctacattgttgcggagtgtcctccgatagctggttgggatatagcattggcgctcttgagcaggatcgagcaggagctaatgaatcgtagtctcgtatgcattaacagcctatagtggacatacccatgtgcacttcttcatcattagcctcgccatgcaggaacgctcgcagcaagaaactggtaaagtttcgagatcgtgataagatctccttgattataataatttacaagactgtttcatcgacgtccattctggccacaacccgtgcaagcagcctagaaccgcactaacttgtaactgtgatatagcctgctaataccagaaagccattaacgggaatatatagctgctaagatacgtgcagcagcacccttgctctgtattctcacccgctggcagctgtaacttgtctaaagattcatcggctggattctacgatgcctctgttctacgggatatgttgaaaaagcaggccaagagtacaatcacctcagataacgtcacaagtaacctcagcaaccagcaatgcaggcgggagtttattgcaagtatacttatccaatcatagaccagcccgtttcgttatcttcacgtttatactcatggaatatgccaactgacctacctgaagcgtggaccacagcggctgaccatactcgttatccctgactgcctagagggggcagctatatggacgtcacttgaatgtataactattcactgcaagagatcttcagcaccacagacccagccatcatctggcttctacggagctcaagtcaccagccaaggcccatacccaagacaataccttcatgaatgtcgacctatctagcaaactgcagtggttcagcatttctttcgtgatcaacaagttcaagagacctttccacagccaagcaacattgcctttgttgatgtcggcggcatcggcaacgccctcactcgttgcgagacattgaggggagtttgcacaatctcttcgaagttgaagcagtcaagaatgccagattctactccttgtcgaatattgaggaatgcgtagtaataatttctaccgagcaacaacctattatggaatcagaatcaagcatctggttagcgacatgttgccatacggacacatcggcaatacggagattgatgctacgtgatgacgatgctggccccattggaaaagacggtgaaccaaggtatacaactagtggaaaaggttgggctgggggtttaaagaggtttataatgcgaaaaagacggttaggagaatgattgtgcgttcgtctagggagttaaggttgctactttatcatgcttccttaatagtgtttggctcaacatttgaagcctgttattggaagtttttagcccgtcatgtaactctagtttgtttattgtggttctaatgctcatatggtatcaacgcaaaggctcatgtatcagcgccagaaactccacgaaaatgcatcataacaatcaagaaattgcaaagcgaacagaatcactccgcatccggcagaacactatccgggtcttcaccgacgaaccgcccaacagccctgacaacttgcttgatcgccagggatgcagggctatccgggaaattctccacaaagctctcgccgtagtcacacgccatgccgaccctaggatccagaggcaccgcgcctagaaacggaatccccatcttctttgcaagtctcttaccgccacccgtcgtggctttacagcacgagcacactggcg

SEQ ID NO: 4330 - DNA, 3839 bp, Emericella nidulans
atccgagatctgggacgacattatcgacaatacttaattaaacgcctttcccttccccgaatttcctttcgagaatccttcctcgttctcaatcttgagctagcttgcagactgagctagttcctttctggtggttctttgtcttccacccaaatagtttggtctagtgtacaaccaatcgtgttggtgtatatccaccgtccgtcgtgggcttgtcttaagtactttgggaggttcttgtgcatgttttgcctcgttggtgttattacactcttttccattttgtcataaacagtgcattgtggacgctacggatatcaggtttaatggtacatgataaagtaaggataaaagaataaacagctttcttgacgaacaattatgtatcgtacctggtgcaaaatcgcttgaacaatccatgcagagatcagttatttttaaaccagatcgagcagtagctgtgaagtcatattgcttaggcgtcagcagtggaaaaaggcagtattttatagctgaagacgcatatctaaaatgtctgttcaatagataatcctgattaaaggccgaaaattgcagaaatcagcgctcgcagttgatatcgattcaaaaacagtcgggtatctctgtccaaagacgcatcttatgcaaaaagaatatgcgatagaaaacagaaaaacatgaaaaaaggagtcctcatcctgcctcaccgtatactttgtaataccgccattgtatagttaatcggatagtcgaacatgtttatgcgggaaaattcacgtttctatggaaattccgggtttcgcggcgatactagagctggcctttggtcccttttcttcttggtaactaattctcggtagcagtggtgttggccttagcgacggtggtatattcggcggcgaacctgctcttagaacggattctatggccgtagagatagaagagaaggggaatgggcatgaggacggcagctacgcaaccgaggagagttcccgtccagttgactccaatggcattaaactacagagttaacaggttagcgtcgccgtaccttgccagagagagtctgccttaccatataaggagcgaacaggggaaatcctgcaccagcaaaggaacggaggatactgtttgccgctaaagcagatgcggcgctggaatatcgttagacatatggtcacggtgcaacatgaaaggactcacaaaacaagataggtatcaatgatatagttgagacattgaaggaagatgcatagtaagccgaacccggtgagaattcctgataccgtaggaacgatccaatgtgtattgccggtatatccagtccagccgaaccagaaaagtccagcggcgaaagccatgctgccaatgatggctggtgggcatctccattcagggattgggatatcgccattcgcgctcaattttctgttgtaccagggttgcattgcaatgatgaagaaccctccaaggaactcgcccaggataaggccgaagtaaggtagcccaccaacacccttgttgaaaccgtggattcgctggaaaactataggatatgccgtcatgaaaaggtagagcaagccgtatagaaaggccatgtagatgcttagtaggagcaggactggctcactgaacaggattcgcacggggcggctgaaattcttcgcaatcaactcgcccaggtcaatctcgacttcctcttcgttcgcatggatgccccagttcttggttctccggcgcagctcttcggcctttctgatcaggacaattggagggtatgtctcatggacgaagaacaagtccaatacgaatgcagtggctcctaatatccccgcgagatattctgtccatcgccagcctaggtaactatccacgataaaacccccaatgaacggagcaaagagcgggcccgtaaagaccatcatggtaaatatcgtgattgcaagtccacggtgacgattgtcatagatgtcggaaaacacagctgccactacagcgataggacacgctccaaaaaatcctccaaaaaaacggcagatgatgacggtttggagattctcagccgtagcaacgccgaattggaaaaccgtgaacccaaaaatgccgataaggatgggcaatcggcggccaaacagctctgacaacggggagaagagggtaggaccaaatgcgaagccgagaacatataaagacatgcccagagtgccaacctcggttgatacattgaactttgcagacactacagaattcgcggaagaaaagatactacttgtgaatgtagaattaaatgtcgtgaatgctagcaatgccgagacaaggaacctaatatgctgtcaatcatttagtacctacggattgatgaataacttacttctttttagtaggccagttctgcgggtgtagagggtcgtcaggtccaacgaactctaccacatactcctctttgtctgggagcggaggcggatacggttttcctgctccaaactcgggcaaaggcttcctggattgtcgcggcctgagtgatccaactgtcgcgctgtgctgacttcgctgtgttgcgatccgactgagcgctgtaggatggcgctctagaccatacccaggttgagtctgcgcggtctgcattcgcgacatgcattcgacatcgtcatcgctcgatgaagtatcagaggatgaatatgaatcggtgcgatcaatttgactgtcactatccgaaatctgatcattggggaaggagtcatcattttcccccatcgccgtagtatgcatgacagatgaactcgtaaatcaactcgcagcagatcagttaagaacaagcgagagagcggtaggatagcataaaatgaacaaaaaaaaaaaacagcggctcatggctattcaatggttagttatacatactacttagtaggcagcttttcggatatgttgccgggcccaaagaaaaaattcacgttttagctttgcctttagggaattagccctcgactatctcctaatttctggtcaaaagggccacttagcgtctacttgggcaccatttcatagatcgaagatggagcccgagtctactagtaggaactacagggttcttatgtcaaccgctctcggttagattcgtgctgctgtcgagtaaatgtacctgggtacacaggagtacgtctttgggaacggtctaagagcaaatgccgatatcactgagcgataatcactgctggcgaggcactatcggctgtattagaccaccaagtaaccttttttcggattcggttcatatctacttgatgcggtcataacctgatcatcaattagctgcttttctggaggttgacgagatgtctgatgtcatttactgatattgaggtgaggtagggtggcttatctacgagtatcgccccgcgaatatatataatcacagatgcccaactattgtgtgccgctactccgtgccgttgcatcggcatggtcctaggagatgacactagccacattttgtcttcggaacgactgctacctcgttacggagcgagataccgtagcacatcttggaattcacacgcttgggaccagtagcacaattaacgtcttagggttgtgcatactcagcaggtttgtggttattatggtgtcctcaggttaagagagtgtttctgattagataaaaatgatagagaagccataacaacttctcgccacaagaaacgccgcttgcagtggctttatctagaatgtactcgagtagatggaagccaagaacttggcacaagtcttcttgaccaacaagaagcggggcgccagtgtctcaggtttgattggattgcatcgaaataaataatactaac

SEQ ID NO: 4331 - DNA, 4591 bp, Emericella nidulans
atccggcatccgcaggttccccgcgattatcgtcatcggatgggtattcaccaacatggggaccacgctgctcatcgttgactgacataatgaaagcgatttgaatccgcttcaactcattcctcacccgtctgttcccgtagtatattcaaagcagattctagctccgcgctttaagcgacggtgaagatcgtataaggaggaaggatgctaagacacgagaggtaaagaaatgaggaggacaaaagagtaacgtgaccgtcagtcatcacgagccaacatagagcgcaactgagactgatcaagagccggagaattggccgagcatcacgcgcggtatactagcggctggcctaacggagtatagcgaataatccgaggggacggagaccctggaaacagtggaggcgcagcaatgacggggaagtaccttggtgccgaccagtaagtcctcgtaggtgtgcaaagtacgcagagacaacagatgatgaagttgtacatgcactctagaagagtagtcgtgatgagcgcaagactaggaggggcttgcgacgtcgggccaatgcgaccgccttccagaagcggagacagttcgagcttcactcttccgatctctaggtccgctcttgctccctcgcataccgctctttcccccgctgctgcaattcatctcgccttgctaggtattggaatatattgttatatgccgcgggcttcgtgagcttcactatggcgtcacgcaggcctcgtcgcgccaacaacaaccatcacaatcagggcagcaatcagcacagcaaccagagtcacacccatgggtatttccaaggctccggttacgattcagactaccagtcctacatgtccgacccacagcagctgctcgatcaacagaatcgaagcatgccgtcggcccctccgcgtacgaacgaggagctcaacctttctgtcttacagagtcacgacccagccgtcaagtcgatccagtcaatcgcgccatttgcggtggtctacacattcagcccgtctacgcgacaatgggagaagaccggggtggagggcactctttttgtctgtcagcttgtagcgggtagcttgggagaggagcggtacagtgtgttcgtgctgaatcgacgggggttgaataacttcgatcttcctttgacggatggcgataacgtggagattacagaagaatatattattctcaaatctgactccaactccgatcccagtattgcccgtgctatcagtgatattcgcatttacgggctttgggtcttttctgagccccctccgagttctacgtcggaaacacgcagcatcaatgctcaggttatcgcgaatgcgcttcaatggctgggaaaagtcttaaattagctcgtgagcggctagagtctgcgcgccagaatggcctacatgctgtgcgacagctgcttcaggagccatcgatcctttgaatgaggtgcaagccagtgtaccaatgggtcgtcagatttctcttagggacttgtttggtcaggaaagagcgcaagacgactcttggagtgtgagagcgcatagtcagccggcacaaggacagccggcacccgctgctagtgaacagcaggatgttctgggagagctcttcaggagaagtggtctagtttaccgaactggtccgaactcatgatgagtgcactctacaataaatcacgattatagacgaccttgaatgctttgagctccgggcaggactcggctataggaaattagccgagtgtgccattggtcttacgccgcgcaaccggtgatttacgtcaatgatatctctatattctcaatgacagggttacgcgcagtctccttgttcggagttggtggttataggggtgcatatagaagtccagcctagtcagcggtccgcgggccggaactcagaaccagaacggataaggataatgcccactgtaaacgaactgctcgtgacgaacatgaccaacgacctcctacgactcttcgatccgtatctgacggggtctaccctccaaatacaccaatgaagatgtcctctttctataacgtcctgtgctctaatgtgctctcctgtaattgactaggtcatcctcttagtttaacacctcctgaaccatatcagccactttacgcgccatgatctcattgtgccctatattcaagagtcagtcagggaacaagtggcccggatagaaacatactcagacagaacgcatgtggcacagattcctcacacacaaccatcttcggtccatgcccagtccgcatcccacctcgcgcagcaaggatctcttccctcgtcttctccgcgacccaatggtcgttacgtccaaagtagaatagtagctggattggcggtttggacgtcaagtgtgcgtcgctcttatgcgtagcgcgcgacacaccccaaacatcatcactccatttatcagaggtgattgtcctcatctcatctgccgccatatgtctttcaccgcagcatcgtcagtagcttaaaacaaaaaaaaaaaaaaaaacaaaaaaaaaaaagaaaagggaatgaaaggaagggttagggagtaacatacaaagcctcccttacaccccgtcgacttttcaagaacctcgtcgtggcatcaaccgcatcctcaggcggcgagcgcatcacgcaccggactaggcttcgcagaagaccatcaggaaggactgtcgtcaggacccacgcgaagatggagaccatgagcgctagctgcgggattatgcggaggagaaactgttagccggttagcagagcagtcttacacctcggatgaaggacagatgggttagtatacagttaatttctgccccgatggggactttgcaatgtcaaggactgtggggaagagcattatgccaccagcgatttcgaagtcaactgcgacatcgtcatcgtcgctaggagtgctctgccgttcaagatgtcgtcgtagaatctccatcgcaatatacgtgccaaccgaatggccgataaggatgactttcggtttcggtgtctcagtctcagttgctgcatcagaaccaagatcatgatgctttgaaacggtgggatctgcgcgtaagcgccgcatattctcccttaatcgcctctgcacgaaacatatctgttcctcaaggtcgtagatttgccttccgtcttcgttttgaacagccccggtctcaagctcaaaacctgcgagactataacccacgatatgcactccgttatggcatgctagttggctggatgctatattcttgctgagcagggagaggaagacatggtaataggaaattagtcctggattgccagttataaagtagattgttatcggccagggacttgaagacgagggtgaggatgaacctgaacctacgcctagtgatggtattctgtggaagaaactgtctgcggcgatgtggggttcgggcagggtcatttcgatcctgattgtagagtggtagcgtcgtgggtgttgatgagactcggtggatgaactgaagatcggaaaacacagccaagagcggatcccgacagactcgacagatgacctacgcactgtagtatatatgaagtacgtgcctgtgtatacatcagaagtaacaagtacgggactagtgattacaacaacacaagtctatgcatttcaattttttttttttcgcgtttcagtatcttcgtctgactgtatgtaaatcccaaagctctacatctgaatcattgcccaatcctggtccgcatgaatcttagcaacacgcaaaatgtatcagtaccaacatgaacaagtaaacacgcacaaaaagaaaaaaacaagcatgaaaagaacacatgtataagttgaacccactcgcctggctccctgctatgatggtatattgacaatgataatgatgacaatgatcatgcctgttataaactgacaagaaatccacagccagcaacacagaaacaagtccagttggtacacagaataaacaagaacaatgcccattaccggcagctcacttttgggctccggcttgaaatggtcgttttgtacccgaggcgatgaggaggtaatgtcctccagggactgcaattgagcaggactgagctttgataatgagtaggtgacttgacgagagtcaagagccgggccagagccaccatgcgaatgagcgatccacgcgagtaccacgaaccaattgcaaaccgacatgccagttttctgataatgacctgaacgccgatgatgaatatgaagaacccgtgcgcgagagaaaaaagagtcgtatagttccataaaaagagggccaaataaggccaattcactgcaatatattgttctgttcaagaggtcgtcgcctctattatacaaggtcaaaccgcttcaagctgaagacgagctatagtcgagtgtcaacttgatgagttgagataatttaaacttcagcacaggctgtacaagtgctatatcagcataattttgtcgccctagccgcggaccaggtcaatggttcaaggtcacgcggtttcaaggtgtaaggtaagatggtaaccataaagggcactgttgtcaaaggtttccagaggtggaaaagg

SEQ ID NO: 4332 - DNA, 5127 bp, Emericella nidulans
tcggagcctcggttgaaaaggatatgcaagaggataaactgccttggcttgccgatatggcacagtggcctttacgtaggatgggccccagtcgctgtagtgcagcgctggaacgtcaaagcgaaaggccgctgcagggactatgcacaacggaagctggtcttttgcgtgcagatgatctgcatatatctcggaatggtgagcagcagtacgctaacgagttgagctgaataatagaggaaagagcgcggccaggtgactgctcggaagggcgctaatcaaccctagggagcttgggagcttgggagctggcgaagtctgaagagtcgtatcaatctaccgggcggctcttgagctcgtaagaagtgccagtcaaatcgagagtaagaacaagcgtgtgatcccttcaataatagtcttgtaatattatcagtacgtgcttactggccgccgctgcttgtcgcgcgataagactcgtatgaagttgttgccggggatcagagccaggatgtgaagtgacgtcaagggctgacaaagaagtattgcagaataacaacgcagcgacctagcactatcataggcaggcaatggtgggctccagactgagcgtagcaaatgcgagggtcgggaggtaaacagaccaggtgggggaacggtgcggggaagctggaaaggtgataatgcctgtctattcgcccggcgtaacctcaagactatgcggtatttcgaagctgaaacggtattctacaacaggatgcgaagttagccagcttgtcatatgacttcggtctgagatgaggaagcacaagaggagagggagggtgggaatgatgtgagtgggatttgatcgcgcgcccgagagtcaaagccgacgattcaaaagaagagaggcggcataccagtccgcttttggcgaaagcgaagatttaagactttggagggggggttatggaccaccctggatgccttgatgcacaggagactgctgttgagatggagcagactaaggcggcggtatccaaggttcaactccagactctcaggcggtggacgccttggcaggtagtggcctagtccaagaatagcagagacgacctggagtaggagagcatagcgcaacctatagacgtctgtgcagccacagcagatggtcgaaccaatgcatttgattggctgtctgcccaccatatctgagactattggacggatgaccaccgcctgctgatttaggcttccacgcacatctgacagtcattcagcagacttccactaccctccatttgcgatgatcgatgatcaatctaagcaagtcaagcgagatacactgtactggcctccagattctgaagattttctagtctatctatgcttttgctttcttcggctggctatcccgaccttacaagatcttcgctactcatgcaagccggcgactagcagctagtctgcttccaatgcataatgttgcatgcacatggagacggggaccggccatcgtctcgatgtggaagatcttatctctagacttcaatatcacatttagcccctcttccgggcctccacaactgcatagcacaaaaacggcggacggaagggatcgaccgccgcattccggagaatactccccagccccagcctgtctcagcacggtccattgaagacgatcactgctaccccgctgcagcttaagagggtctctggctatcagggtgtgacaatcctgagccaaaatccgcttatccgaactccgtcagaccctaccagattaatgttagcctgctggctgtcctgtttcttcaggttacacctgtgcgccttctaactctatattggctttcttgctcctgacaatgtgtgccgtttgcctgaacacttagcattatggtggagagcgacgggatccggaccaagtttcagacaatccgcctactactcggagtgcagtcttactcgggttataggctatgctccaagagatgtaatgggccccactgaagacgcaagatgaaaactccttgcagaaggcgctatacttggatcatccccgaaccttgacgggacggcgcgagcacgaatctacgggagttataggcaagtattggttgtggttgtagcgctttcttattctgtgttcaaacactcagaactttatatgagaagcattatcaatgtaacctcactgctcttgctgtttctcactatgggcataggagaccattctccgtctgttaccaaacgccgatgctttggcctatctaacccatactcgaggtcgcattcctcgggcttcggctgcatttttacattttagctatatttcagatcaacatttaacaggtaatgttcgaaccgtgctgacggaagatgccgactgaagcgacagtcagaatcagatctaatgccgtagccgtacgtatctcaactgcgccacaaactctgataggcagactgcagcctacacaatcctgcgggaggcgacaggcagcagtgcagtgtcacggaccgccttgtttgtgtgtgcttctactacactagactagttgggatacccctcacccatcgtcatcgtcctcgtatcccaccagcgagggttctcgggtacagcttccagctcctgtcaatcgcctagggcatagttagtttccagacaaatgatctgcatcctgagcccgtctagtatagactccgactatacgcgcccctagtctcccacatggcttccttccctgatatgcgcttggtctggtctggtatggccgcgttggtggtcagaaatcagaacttactgcttttgactttgatgtctcaattcttcgaaacctatgatgtcatttaagccggtttggaatattaccaagatcctcatgtgcatacctttctctatgattagcaatgctcacgctcgcgagtcatttgtaaagtgttggcaagcagtcaggatgatcagatggctctactttgcccgaccaggcagctaataccccccgccaacggacgcaaaccaggttttagaaccagaagagacaaaaagaaaaggggggagggggaggagggtgaaggggggttcggatggagttaagaagaaagagctgacacgatgtgagtcatgttctcgcctgaggaaagcagcaggtgacaaagatagtagtacctgcgcctgttcagtgggtgttcatgggatgtggtctgtttattctcctccgcggccagtgcatgtaccaccctccttgatttcgcaaacggtgtgaaggctagcgtaggtagcaggtctgctctgctctgctttagattcgaccaaccacgggcctcgtttgtttcgtcaacactttccactggtccatctccccctccatgttcgcatatcttgtctgcttgctagcttgcatcactgccacccccttcgccttgactctgaccaatttgcttttctttttgttcccttgcagggagggaggtgtggggaagtagcgtgcgtaaggagatttttgttattcatgatatagatagttagccctgtcaagcctcgcccactctgggatcgacgccatgcatgactttgcagcggtatgtactctatatcaaatgagaggctccgcagtgtggctgtcccgaaacgcttataaagggccccagcacccccgtcgcttccttctgcatgtcatctgttcttcgctttgttcgtctctgccctcgaccagacaaagaaagacggctatgctaccgtttccgcagcttctttgctcgttctgttggatctctataatatccgactcactcgattcgaactctgtgtctcttcaccagaggcaaccagtgaatacctattgttcccgggtatctggccagtgattgtaagtatactttgaaggcgcccaacgtgtccctcaagaggaaagactgaaacctcacatcgaggttcagaacctattttgttttattcctctacctgtctataaggtcaagctgctgctgagaaccttcccgccacgtgtgaggcacccgtcgggttaagattgtcgttccatgggtcatggctcaagcacacccgctttcattgaaatggaggagctgacattgttcacgaatatacagatacacggattctctgcgcctcaaatcttgaaatccggtaggttattttcttgttttgtcgtgtttcgtattcgttaagcactggcgccgggagaagagatgaggggaaaaccacccttgcatgggttctgaaaccctggatgattgcctcagggatgagacgggctatagctccgtaccaacatcccgcccatcatgtgctggaacttgacggggaaaaccgcttccatccatcgtcacttatccgaggaccatccaggagattgtattgcaaatcatcccagagtatattgccggggtttgcccgttcagcgcggggttagcagccagcgatcgtgcctttgagggaaacagttcgcgcggagcgcttattcgacgatccaatttgcccagcaggactgctccagggcccctgcgcggggatgacttcctggttggactgacggaagcggagatgcactgagatggacaacagagatatctacactgagtagattaaatcacgacctgccaggctgcgagcctgccaggattgctgcttcatcatgtccttggcgaggggttcgactcggagtatactgccgcagttgaccgcctgagcctcgatctccagtttcaggagtttcagcgtccatctccaattctccatcgaatctctgacaccgcctctctgctctggcaaatcgatcgtccctcccccacgctacttgaggatctccggccttttgcaacggtctactcagtatatattcacctgtcactgccagtcttgttgcttctcttggttcgcctctgccctcaacccgccttgtctcaccgaccctgtccgggagccttttcacattccagtgccaccccgcctcccttatttgcccttatcgaccctggcccgtccccacgccccagcttggcttcattgtctcctcgcttacggacacgcctcctcaactcttctcactgcattaccctagctttttaattataatcttcttatcttgttcttcatttcgtccacgacccatatgcatttctcct

SEQ ID NO: 4333 - DNA, 5211 bp, Emericella nidulans
agggaatttattacatacccccaggcactggtacactattcactctttagtagtccgtcagaaacttctattgatatgcaagctcaccaccattcccgcaagcgaaagcagatacgtgatccgcttcccatactgcagagccagaggctgccagaacagcagtccccagccggccagcaaaaacatgtaccctgttccttcattcagcgtgttgaccgagaccttggtctcttctgacagctgggtcaggaccgagtagacatttgcactagcaatgcccgcgaacagggtgtacctgcgacattcagaactgctgcactttacttgtcaggtagtcttaggttcttacgcgctgacgcagactgtagacaatagctttcgccgtggtgaccagtttagtggattatctgggtcgtcggaaggctcaggaaccaggacaatgtcgcggtcgccagaatcgagatggcgggttgtaaggacatggttttcatctatgagcgtaaaggtgccagggatggcatctcggtcaatgattggtgtctgcagcatgtttttctttagtttgaaaaacgtgctgatccaagaggatttggttcaagatagacagaaggaaagaagtcggaatataagcataacctttgcagggacgtatgtattcccctgataagcttcaagggtcatgcatgcatctccaattcgttatcaacgtcagctcaaggtgccccttgataagacgattgcaaggcctgtcattctgtttccccgcgagagtccattgggtgacctcagaagggtagactttcttgttctggctaggtgtcacaccccgtgcagagacgggacaccctcctctctttttgggatagaggaaggattggagagttagagttggagtagggttggagcggggagaagagtcacttccgaggtctaaatccttcaattctcacggtcccgaagcagaaagcgattgatcaaatagatatgttcagtataggtagtgtacaatttggtaataaatggaaccaacgggttatctagcaggcgcacaaaagacaaagaggaacggtaccgcgctatacttgattcaacccaccacgtcgtcatccggcagctccctgataacctctttaagcatttgaatcaactcgtcaatatcgggacggtcggcgggctcgacctgcaagcaccgacgcacgacctccttgacgggagagctgatagaagcggcactatcctgcttttgctgctcactagccttgcctttgcccttggtcgctccagatttttcatcgggaaacctccagtctccgccgagtacgcacatactcagactaccccctgtctcttcacttcgagcttcgaacgggctcttccccactaagcaggcgtagagtgtgcatcccaaagaccaaatatccactttagtgtcgatgatcgatcctgtcttgacgtcgaagagttctggcgctcggtacggcattgtactgtgctccgccgcagtatcttgaacgctagcgcgagtgagcgagaggtgatggcgattggactgggcgccagcgacccaagatccatcaggatcggactttgtccgtcgtcatctatcatgatatttcctgtttggtcagtcaagagaaccagctttaggagagtggtacctaccaggcttgatatctcggtgcgcgtaggggcgcaggtttccatcttcatatccttcctggctctgagtgacctcgtcatccatcagcggctcattttcagagtcctcttccccagcaggctgactaccccgccgctttcccttccccttccgcatctctacatcggcctatgcgccctctttcctcacacccttggccttgcgcgtggccccagacccgctcttgacgcggtactggtgcatcgcgcgcaatgcctgggcgactccaagcataagaaccctgagacgcttctcggggaatcgcgtctggttcacaaggtttgcgttaatcgcgtcctgtaggttccctcgttggtagtagggcagcagaatgtagaccgtcttggaaccggcctctccgccatcactgcgaaacttggatccagactctgttgagacgcagtggtcgattgaatgaatgatattcttctccgacgtaaataggctgtaagcctctacctccttgagggcctgcgacacggattcctggccgaacgggcatcggatcttcttgagtgcgaataactcggatgtggacttgtcttggacgaggtacacgtaggaaaagcctccctatcaaagaatccagtcagcgaaagtcacttaaatgggtataaaccctatacctcgccgaggagccgcagcagtttgaagctgcggttgttgatcttcagttgcggcgagctggggaagcagcacatgcaatctgtaaaattgtacaggagatcgaagaagtattgagccatgttgaaggtattgacagtcaattcagcatttcaaagagcttcaatgcatagacagataggttcaaaggtccaaagctatctctttgatgttgatgcagtaagaacgctggctccacatcgcaacaacggcacgggcggaaaggcggagagacaactggccccaagcaacaggctgccaacagccaagccgctcctaagccactcccactgggtgccattgtacgaagtacttccgtacaaagtacttgatactatgctctttgacggatgtcaatgctcaatatgcatatctcgagcttctgtagctgagtgcttgagtaatatggtcgttgttgctgttcgcccttgttgcggagtgcagaaatatataaaattacagctcgtccactacttccgcgcaatctaacaaaacccccgaacgaacatcgaatgcccatttatgttaagtttcgatgccgccggtaactggttggattcttgaaatacattgcctgctatgctttttccacgaggctgattcgatgtctcggctgattgaatatgaatgaatattaaagactgtccaacaatgcaagactgtctaacaatgagattataaatatatcaggagagctgttatcgggagatccatgatgcgataagggaggattgggttggcatgggggacccgatcgagtctgaaataggggaatgcggcccacagaactcttgacgggcagtatatagtgaagttccctgcgcctaagtctggtggcacaaacgtgtggtcatatgtaaagactgcaaactgcctgacagttcaaggttcctgattgcggggagaaatcgtggacatggaccatggttcgtgcgttgatcggactcttgaacagaagacagcttgaaagatacaggtacaaaataaaaatatatcagactaaggcttagtccttgcgctactcggtctagtcgcatgacgacactaaatttgatgctgcccgttgagacctcgagtctcagtcccctgcattgcctcctggctcctgacagctcatctgtggttaccttttgtttattattgctgttgggcatcgtcgaagtacagatttctccgaccagagcccaccagacgcgcttcagctccagaatgactgcccgttgatcgttcttattctcgtttcgtttcgttgttcattattgctgcctccactctttgccatcccttttcctcccctttcgttcactttctttccttcgggcagcccccctcctgttctttctttccttatttcaactctctcccccacacctgcctttcgatttccgatttttaacgatctctacagagatggcgcctctggacgaaatacaggtcggggacgtcgtcaacgtccccggcgggatgcacggtaccgtaaggttcgtcggtgtcgtcgccggcaagccgggcagatttgcgggtatcgagcttgctccggaacacgccaaacgggggaagaacagcggcgatgtggatggaaagaagtactttgcgaccgctatgccgggatcggggatctttgtgcccctcaacaacaataaatacgtgactcgacgcaccgtttccaatccgcccacgaccccatcgcgaccggttaatttcagcaaatccgtcggccctggcgtttctgtaccccgtcccccgcgcatgagacgcccttctttgcctagatcagagtccccccgagtgaccgcgccgccgaagctgagtctgtccgggctgcggacgccctccgctgcatcgaaaacacccaccaacgggttctcccgaagccccgtcaaggctccatcccgcgcgtccgaccgtccgccatctaggttcagtgttgaagatggcccgacatcggccaggacctcggattacgggcggaactctatgggtgcagagatatcggacctgaaagagcaggtcaaggcccttgagaagcaacttttggatcgtgaccaacagctagaggagcaggcaaatacactgtcagatttccagaggacattagaggagctggaaggatcagatgcgttgtcgatccgtgcccagctacgagagaagaatgaacgcattgcgcaactaaccatggagttcgacatgcaccgcgccgactttaggagtacactcgacaccttggaagtagcggcttcggagaccgagcgagtatacgagcagcggattgacgagcttatgcagcagaacaaggaactacaggatcgcggggaggatgttgaggctgttgcacgacaacttaagcaactggaggaactcgtctcagagctggaggaagggctagaagatgcacgccggggtgaagcggaggccagagcggaagtggaattcctacgcggtgaggtcgaacgtacgaaactggaattaaagaaggaaagggaaagctctggtttgtccagggagagtcgcatgagcccagacggacatttttcacgagaactcgagcagaaggatgatgaaatccgcgggttgaaagcgataatccattctctgagtaggggtgagcctgacttgcatgcgctgcagcagaacggatttggagcccggccagatcacaatgcggaccatgtggctgatctggagcagcgggtgcaagaatacgaaagggccaacgaacataagacataccgtatcgaggagcttgagcgcgagttgcagcaacttcaagccaacgaaaatggtcgcacccgcagttccaccgtcacgcagtcaaacgcgcagcacaaacccaccggctcagcagggaa

SEQ ID NO: 4334 - DNA, 1463 bp, Emericella nidulans
gattgacggacgtcttcggtgagggtaagtagcgacggtgtctctggtaggcattgtaagcgaaaattgcagccgatcgaaagctaggatatctcaagcgcagaagtgcggtctcttttagagagagcgcgaattgcgattgaaaagcccctttccgctctggacacgattgcgggagcccaccgtaggtaaaggaataagaagcaagggggttatgtctaatagaccggggtatcaagattgaaaaagaaattaagcaaaaagaaaaaggaaaaagaaacaaaacgaagtccaggggctgaaaaagttggctgaaagaagtgataatcaaggtatactagtgggtgagataagatgagcgatacaccactggataagaacaacaaccacagagaaggggaggaaacaagagacgagataagagaaaaatacggccaatagatacaaaagagagaagagggagatatatgaaagaaggagagaaaattggttaacgcccaaggtgagttgggatgaaaacaataataatcgacagggagaaggggcagaaattgaaaatctgggggcggtgagactttcgcctcttgggtctgtgccccagtggcgatctgaaggctcagaaatcgactgatgcaatccttggaacaaagattctggtgttattctaggattacacagagtatggaggcaatgcattgtttgttagcagtttgctatttgctagattgaaacttcctagccccaaatatgagttcatccctgaatgtccaagtaaaaaggcctaggccagcagacccatcgcaagtaacgatccacttccccagaaaatagcctccgatgctggagcacgagccgccgccttccgtcgaggcaacgaggaccttctggaccgagtgccttgggaggctaggacctcccatctcacaacgacaatcaatcacccaaataccttgtcataccccgtcatcgtaaaccggtagtggacgtctcccttcttcatccgttccatcgcctcctttaatccttcactgccaatttgcagttcttccacccagcctcttagccccttgtcagcggccagttgcagcatctccagcatctcacggcgacttccaagatggctcgcaccgatcagcacaccattggaaattagattttgcgccttgatcacttgtccttcctcttctggcaggcctacactgatccatcggccgtggacgtccatcatggagaggtacttctccaggtcgaaccccttggatgaattggcacagttgatgatcaggtcaaaagagcaccgatgaggcttttcccagccctcctctgcagtagcgatgtagccatcggtcctagcttgcgggcatctgctccttggcccgcgaccgggaaatcgcccaggtctctgctcccagagccttggcgaacataacaccaaagtgaccaattccactaggccgacgata

SEQ ID NO: 4335 - DNA, 5289 bp, Emericella nidulans
ccatcattcctacatatatctctccatgtcattaaatgctttacgagtgaaagaacatgaggatttccctcccagttcgctgtatccgtgcgacttgcggtagaaccccacaacttctcgcccgtctccctctgcctccaagccgccgcttcacgcagttgtcatgtccgcagcgtccaagtcagggccgtcagaaaggggttccgagaattggtgcagttatttttgcagcactcgctccaggcgcttttgtgaagattgcggaaacagaagatgacggtaaaaccggggaaagactgatgttggaggcttcgcgccaggagttcagagaagatgtccttgagaagacagaacaacgaatagggctcgggggccctgttgtagcttactggacatattatgtctacgacacaatagcgactggctttcgtttcgtccacctagtcatcatcttcctacctgtcatcctgacggcgcctacgatatggcttggaaggcgcatcaagaataacgacggggctcgcacaggcaccttgtggtggtatagttttcttgttagggccatggagcgcgcaggtcctgcttttatcaaggtaaatacttttgactatattattcaaaacctgctgacttcgtagcttgggcaatgggccgcatcacgtactgatattttccctcccgaaatgtgcgaaatcatgtcgtcattacactcgaatgctcccggccattcgttacatgaaacaaagcggataatagaaaaggcgttcagtggaatgccctttgaggatatcttcgaggaattcaacgaggaacctttgggagtgggcgccatcgcacaagtgtacaaggcgaagctcaagccgaatctggctaatcttgcagataaccagctaacctgtgagcctcagaacctaaggggcaagctcagaaaaaacgttgacgccttggtcaagagcacccccaggcgagttccgtcctcatacgttgcagtcaaagtactgcatcctcgcgttgagcgactaatccgcagggacctgcgtatcatgagtttctttgcttctttgcttaatgcggttccaaccatgcactggctgtcgttccctgatgaggttgctcagttcggtgagatgatgaagctacaactcgatctgcggattgaggccacaaacttgaaaatcttccgcgagaagttcagatcccgtaccacagcttggttcccgtatccgtatttggattatagcacccgcgaggtgcttattgaggaattcgcccagggcatacctctgtccacctttctggaaaagggaggaggtgtgtaccagcatgagattgcaaacgaaggcttggatgcttttctacatatgctcttgattgataattttgtgcatgcggaccttcatccagggaacatcatggttcgtttctatcagcctagcgagcttgatttgtctctccgcaagaagggccgcgcagatgaagcaccgactcttaaggaggtcgatgttgcagacgccatactcgcccggttgctgccacatgcagatgattcccaaaagtgggaaagggctctagaagagctcaacgcagaaggctaccgaccgcagctccttttcattgacacagggttagtacacagctgaatgacaccaaccgcgcgaacttcttagccctcttccgagctgtcgccgaattcgacggccaccgccctggtgaactcatggttgagcggtgtcgtcagccagaggaagtcatcgacccagacatattcgctttgagaatgcaaaatttagtcctcggcgtcaaatcacggacatttgcacttgggaacatcaagatcggcgatattcttagcgaagtgctatctatggtccggcgacaccacgtccgcttggaaggggactttgtcaacgtcgtcatctccattctcctcctcgaaggcattggccggagcatggatcctgatctcgatctctttaagaggttagcgccgatattccctgccttgctgctcgaaatcatcgagctgccacccgctcaaaaccccctcttttggtaatccgcagaactgactcacttttccagtgcccttcccatcttacggaaactcggttccaatgccactttcctaaagacaattcggtcgggcgacacctcaatgcttcgcgtctgggttggtcttgaagctcgtggcttacttagggcgagcattgagagtgtggagaattgtgtgaagtatgatttactgtcgcctaatgtctagatgcggcgggaataaagttcgagatacgctgcttatgtattatatatttattattctcctggtctcatttttgtggttatgtactataatgcctgtatatagctagagtcaaaagaccatgaatatgacgatatagattgataaactgataatacttgttccattccgaccactgccaagctttcttctagaaataaattaaaatagttcaagtacattcaacgtaccagacccgaaaacaagcaagaaagaaagggctaaagatgtctctttcaaaagccgacacagatgtcatcctgaataaggccaacatcgccctcgcccgcagccagcgccttgtcgcatcctggctccccgcaacgcctgcaacaggcgaaaacaatgcgaaaaccgacgccgagctgcaaaaagaagaagaggagatttttacagctgttcctgagacgtgcgtcgcatttgactatgtggctcctatgtacactgaagaaatttgctaactgactggaattgcagacttggtctcggagcgccgttgcctacgaaagccgcagatgggagctggaaccgcagggagctcgattcgaacgatgaactacggagacagctactcgggagaaattataaaagggttatggctgagaaagagaaggcacgacaaaagaccgctgatcctgcgtccaaaaatcatgcctcgaaaggagcgccaggtcataaccagcagggctcggctgtcggaaaaaacgaagatgtcgatgatgatgatgagggccgggcagcgtcaattagcaagaacgcatcgtcgagaaagagaaaggtcggggggagcgctgagcctacaacacggactgaaggtgcggatagcgaaacgaagtacaaggacagtgaggaagagaatacggccagctcacaagggcttagggccaaggggaggaaaaaagccacaagttttcttgatgagatcttggctgagcggtcaaagaagagaaagaagcgatgattgccttcgctgttttagagttcctgcaatataccctaatataccccaatgctatctttatgtcgaaactccgggactgtcacgccgtcagcgtacgtgtcaacccaataagacacgagagccaaagatcccgcattgcgtcaatgcccattttctgtcctcccaagtgagacaaagccaatgaagggaataaactctataagccggaattggcgtgagaatgcatatatgccagcatatatatgatgcctttgaccggcacctatactatgccccaagatggtaaacaggtttataaaacgagaaaatgagctggagagatagcaaaaaaggcaggtagctctcctgagcataaccgtggtatccaaaattccgcgcccaggattgtacaattatatcaagcccagatattacaagtgccacactccagaatgtaatgaatgtaaatgtgacaatgagctctttgtcccaactcacgaaaaatattgcgaagagtttccaaaagagagaaaaaaagccgactcactcgagtcgcttccgttttcgatcttccgcagcatgctgatcctcatcaggtctttcggcagtatcggcagggttgaggagcgaatgtacgttacttgccatgctcgaccggcgggtagcaggcaaagaggactcatgccgagggaatttgggaccgccaaatccccagccgttatctataggaccctgctggtcagaattcagcggcggggtggcatttcgcgagatgtcttgttggaggcggcgcggtgcgcccatttcgtactgtgctaatacatctcgtacttgttggtcactcgatgtcggtgtgcgaagcggtgatggcgaccaaggagatgggccctgtgaggacggctggttcagaggaaatggtgaaatacctggtggcggccatccatgttggcgtatatctgccgaggtatgtcgccgcgcaagatttgggccgggcggcgaggatgcggatgatagaggatgaggcactggtggctgcggagtaactatagacgggacctgagggcggctgtagttgggagaagagtttgctgctccaattgagccataacgacggggcgaggcggacaaatgagggggtacaggcggacgaatcatatttgatctcgatgtatccattatagatggccgtcgactatcatcttgcggcatttgtcgtggagacaacggagggcctgaatcgactgcgacgcttggtatgtgcaacagcctcatgtctggatgttcaaaagatcgagcactgtccaggtgcttctccaattccgtttgcatattggtcactgctatacgtcagttttggtcatcatgtactgggggatattcattcgttgtcgggattaaaggaattttaagggtttggtgcagatttgttgtgtgattggggttgggtatgggtttctggaaatggggatgtagtgagtgtcataatgtgtggattgttgtcttgtttagtgtacgtttaggtataggattgtgagaatggtgagaattatttataataatgggtgtgatgatagtatagtgtcgagggggggttgttatgtttatattaatgaatgggtttgattggtggaggaagtgggttatagttttggtaaagagtaggagaagtagttgttaatgaattgggatgtgttttgtgtgattttgatatgagaattggggggttagtagttatttgtgagtagggaattatgggttgaagtaggagtgtggtgaggtgttgaggaatgttagtggattatgggggagatgggatgtgggttagttggttgttagtagtgattacggagtgagaataggtagtactgagcggggtggaggttgaagtattagtgtagtgtgtgtacgatgtttgatggtttatagagttggattaggttagttatggtggtatgatgttagatgatttatagaagtgtggtgtgggtaagttgtggttaaaaggtattagtaatagttgaaggttgagggtgtaagcactccaccccccccc

SEQ ID NO: 4336 - DNA, 4437 bp, Emericella nidulans
  unsure (1)..(4437): unsure at all n locations
cccgggactgggatatgcagagtatgtctcctgtgttagcagttcttgagaaggctgacccgttttcaacctggaggtcatagattgtgtctggacaaagaggtgggatgtatatgcgcatattttgacctcacgcacaaatcactgtctgaattttgagatggcctttttcttctcctgtcagatttctgcctcataaatcccttgagacggccttcctctcctctacttttcaccccttccatctcagattccttcatcgtccgtactacgcgaccctgtggccctttcgctttggctttgcactttgccttgatctcgtttggctctacctctacggatcgcaaacaatgctgtacaagcttgaccgtggtacagcccgagaaagtgctgttgcaggagtagagtctgccgctcctgtcttcaagatgaagaaaactagagaggaactcaggctagctcgaaagctgctggagaagaacgcgttaacatgtaacgacaaagacgaggtggaagtggttggaagtgaggacgaagtaaaattcgctcatgaaaaggtcaaggccgatgtgaccgagcccgaagtactggacgagatcgagaaaaccgagattaccgagaacggcagggggacagaccatatcgatggcataacggggtttgcctcagacagcccagtgcttgaagacgacgatgatgaaactgcggatgacgatgtcatggaccgacgtcgttccgagcctcctgcatatgttgtcagtcatccgtgggccattgtcgactatcacctatatctctgctccgccgaaaggggtcaaactttggagactagacggaacggcacttatctgtttgacggcgctgattgccgccctctttcttatgaggagttcgcggaggaccgagctttggcatcacaatgctccccaggcgaccagcctcagctattgtttgcatcctgccgatagcggagcgacatcactttgcggatcggaacccttcctttggaggtcgacactacgtgctgggcttcgactatgactgcaagactctgtatgctcgtcatttcgactggtttcctcatgaccttagcgatatttggtgtgtttgggataatagcagcaatgtgtacacagtcaccgttcctgatctcatacacatcatggacaccagccttggcaaaggagagatccctgtcggaatgggaatcctcagttcaagccagtattgtttggctttggagtcggacgatgaccccggtcttgagataatcatcgctacactgtggtgccagtggctgctggactttagtgacatcctctttaagcaagaaacgggctccctccccgacttccaagcaaggcttgcctcctacgtcgagcagggccgtctgatccttcagcgggcgtcgtatagggcttggttcgccgtacgggacggttattcaaaggagcaatacaggagcaatgtgacaatcaaccagtacaccaacgacctttacacatttgagaagtcggagcaagatggcagtctgaagggacagccttgggtggcacccggccttgaaacctgcaatcagatccgccacaatgagcgcatgcagagaaagaagcgcgtaaaacagcggctagaggacttgttcgtggccccagagaccgaggctactcaggatcaggaaagtgtactccgaagcattcttgcaaagacagggcagggtgtggtggatttcagtaaagatgccccggctgatatccctaaaactccgtcgccaaaatctcgccacgatacttccaaacttccggaaagatcctattctgggtcgcctgtgatccttacccctgctaccgcgtcatgcaacgggtttgggtctactgcgtatcatcatgttccgctttgtatgcttttggaacgggctctggacctggcgcacacctacccggagctggacaatattgcaaaccgagaacggcttggagacttgttggcggacatgggcatcgaggttcaagaattcgtcgcgggattggataatcatggctggaagcccgatacgagttcgaaagaggacagtccttcctgtcttatccaatgtcctgcattcgactagccagcatacatgcaatccatttaggacgtttgggaacagtcagctggcgagttggtgatattctggcgttgcaggacagatttttgtatgagtagacttgatttctgtgtttgggtctggtgacattctctggagttggggcaggagcattttgtagatcagctagagtcctagtggaaggagcgattggcgacagtgataatactaatccatattctgtaataataatggtcattttatagtttcgtcatcatacactagtagcgtgtctgcacagctagctttcaaccagccacacaaatgactcgggagttccacggtggctgggctgtggcttgccagcccctcatctggctccatcccgagtccactctccaggcacaattcctctcaaaatgaattgatccattagcccaggagcaaaggcagggtcagctcagaatcgtcataatcgaattcaagatgtgtggtgaagataagtttcacagtctgctctgtatagtctagtagtggtagtaagactgaagagaagactgtcagccctactaagaggctgtggacactgcggactagtactagattactagtaggactgacttgtccttactcgttgaattgtcgatcaagcattctgtgggcgtagtgcacagctctttagcccagtaatgcgaggaattgtgctgcctattcatgtcaacgcaatattaatgaactgccttttgttggtccctgagagctgagctgatcccttcggatcttgcttgtggttcctccctttcagctccacagccaaatctcttaatctcccatcccccatcgatctcatcctcctgaatctaaccccagtcatcctcttcccttctcttgatctcttactcctgctgctaattgactcctggataccccttctcttaccttggtttctacggggtacttctaataatccccacgtgtttaatctccgtcgccgacggatctgcgctcgttcaacccttcctaataatggctgacacaagtaactcgagtcgtaccccgttattgctcctatacgctcttgtctaacaatccgatgtttctgcgacaggtgtccaccgaaatgctggcgtctcggaatccgaggcccaggttgacgtcacctgcgggccgctgctcaacttcaagaacatggatgttactccctcttcatccatctggcatgggagcgtcttgattgtcacaaagcccgggcagccgcagcctcgtctgtacttgcgccaagccggccctgtcacgcccgatcctgccctcaccgaagctgtcgcgaatactcaaggagtcaccattgacggcttgcgcctctacgaagacccccaaaaagcgttctggcgcttttccatcactctgcccctggaggactatgaggtgcgatggtcatacactattcccgggctccgctactccaatggtggcgaggttcattcgccctgggatttcgtcgtcccgtcgcgcactcaatcgatgcgcctcatgttccattcctgcaacggcttctccgtgggtaccgacatggacgcctggatcggccccaacttatggaaggatgtcctccgcgtacacgcaatgaaaccattccacgtcatgattggtggtggagatcagatctataacgatggtattcgtgttgacggtcccttgaaggaatggacttccatcgccaacccgcacaagaggcgcactcattctttcgataacaatctgcgcgcggcgtgcgacgactactactttgcgaattacgtacgatggtactctacggaaccattcaaggaggccaatgggganttcctcagatcaatatctgggacgaccacgatatcatcgacggatttggctcctacactgtttcatttcatgaagtgttctgttttccgcggtattggcggtgtcgctttcaagtactactgcttgtttcagcatcatattgcgcccccgaagtctacctacactaccgatgcgccgcaaaccatgcaggctgtcaatggtaccgcaggcgccgaccctcggcagttggaggataccttcgttctggaggaccaaacagaggacaacagctggattgttggcaagcgccccggcccgtatgttgaggaaaagagtcgaaatttgtacatgcgtcttggcaaacgcatggcatttattggtgtcgatgcgcgcacggagcgtacccgccatcaggtcaactattctgacacctatgaccttattttcttccggctggaacaagaggttgctgctgcaaatggcgatattaagcacctcatcgtgcttcttggtggtcctattggctacccacg

SEQ ID NO: 4337 - DNA, 10603 bp, Emericella nidulans
cggtgagtgcagggatccataaggctgcgtatgttagcctcaaggtatatccagcagaacttggtgacctactagtacgcgccgccatgaaaatacagtacaaccatatcagcatcattctccttcttcaactccgcatacttctgctcctctgacaattgcggctcaggcgcattcttgtcgacgcctctgcgatacccggtccactcggcctctaccggtccaacaccaggaatatcgtacttttcctcgccaactttcagctcttcgatcgcctttattaccgcatcatgaacatccatttccggctgcgagatcctcactttcgaaacccacagcgggccctttatccccgggtcatgcatcgctcccttctgttgtttgccaacggggacccgccggccggtgagaaacgaacggataatagcaactgtcatctcggtgcgaaggtcctgtttccctgagccggcggactggccaatgccgtggaggacggcagttcgtaggatgagagggatcctcggtaggagcgcccaaaggagagcgagggggttattgagggtgctcatgcttggcttttgcgaggcgccggaagggtatcacgaaggaaaaaagctagactttgtgcaaagaaacacggaagaaagagaagaaacagaaaatgggaagttgaggggttggagaggacaaggagggagtgcggagatcatttgcgatgagccgaggctcccctgcgtggcgcaaaacactgctatgggcgctactcaggtaccaaccagtccctctagatataatcgtatgggactactttcagagaaccttgaagacgagtcttgtccgtgatgcttgtccagctaatgttcatcgaatcgatgtggtggcgagattgccatctatataattgcgccatagcagaacacgagctaccgctctcattgtaggtttttgctgcttcctgcacctcaggactttttttacctttttttttttttttttttttttttttttcatatcgaggagctgttcagtatctttgttagagaggtgtatacctacttagattgcaaacattctgatctgcggctggagtatctgttgtatatcccctcgttggataaatggcaaatagcataatcctgtatacaagtccaaggaaatcgtactatacttatatcatatctttgaatgccccatttatgttcaagcagtctttcttccaacaacaaccccgaaccttatccccaggacctcccccgtgtcctcgaaatacttccgtaacttcgcaacctccgcctccaccttcctttttgcgtccgcctccatatcaccattttttatcaacagccgcttaacaacggcaccaaaagagtcagcctgccactcttgggcgcggagtttcagcgcctggctaaggtcgtgctgcgcgtacccagtattcctgacgtcagccaaaccggctttcttaaacacctctgcgagagacgcgggtgcgtcaagagctagactctgtgattcgatgaatcccagccacgtggacacgaggaacgaggagcgcgggtcagatagctcggtgctagacggggaagcgagaaaagagccgttcaggtccgtccactggatgaagccgcccggctctagtttgttctgttaggattggttccatctactgcaaagcatgcatgtgcataactaataaggtgaacaaaagaaatttgagatacgcactcaaaatctccaccagattcctcacagccgtctcgtactctttttccggaaatgccgtgacaagtagcctcacatgcactaggtcgtactttctatgatactcaggcgggaacggcttaaggatatcctggcacgagaacgagacgccctcaggtggggacccgggaaactgcgcagcggagatatcgaagccatggaaggtcttgggctcctgttgggtactctagagcttaggaggtcgcgggcttcgaggagccagattcttagcgtgaaaattagtatcataatgaaaacccggttgttactagctcacccagtcccagttctcacgtcagcgattgtggtgatattctctgaggggaatagatgggtcactcagtccgagctcggcttgaacgatcatctctgtgttggttgtttagtctgcctttgatcagtatgctagtttgttgattcgacagatgttggatgtagtacggcataccgggctgactccgcgctatcacgggcaagggggtaggtctctgaagcatcacccatggttattctgaattccagttgatatcgtatgctactttgatagggggttattcctgcaaggtcgattcggttgaacgaagccaaacagcaacctccaacccggggccctccacatctttatgtagcgggcggagtagagtatgacgggttagatcaggcgtaccgcgcgggtctcccatcttccctaaaccacaagtgcagtattgacgttgaagacttgacgatgatcatcgtgattagttacctatgaagtaggtattgcggacgggaacacctggaaaagatgccgataagcaactgtcaatttgccaactaagagtcccactgtggagtaaacactcgcgactggccaggtcggataactcgggttagtggtcaagcattattcatcatcttctgcattctagatttcttgattattcgatcttcatggataagcttccgatttccgggtagcctattctcagggtgcttggctaggcgcgtccagtctattatcaactactccacttcttgcgccgtttctattggagacgcatactccagaggttacattcaaaaggcaggggctaaaataagtcggtttgcggtatcggtcggactgtaagcgccggcgcctcaaaccgtcccagaagaagagaagttcgaactgccaaagaataatcaacgcactactcagccacacgcggcacatcatgcgtgacaaaagaactgaaccttctcgggctgaccttatcctcgtacagccgatcaatctcctccgtcgacaggcccgtcgtatcaggatcaaggaagtatgcgcctataacaagaagcactgtgatacctgcaaaggggaacgccgtgcgggcgcccaagtccccagagtcaacgttgtacatataaggcactgtgaatgtcatgacccaggtcgagagggtttgggccaagacgccgattgatagcgacttgacacgtagtctgttcgagtagatctcggcggcgatgggccagccgtcggcctgcattagacttgtttggatggagataagaatgttcctgttatcgctctgttagtagccgtagagttgcaaggaagggtggacatacatgagaaccgcaatggcccaggatggacccatgccacaggcgtagtagaggcagccgatgacgccgaggaaagccaggttgatgaggcagcccatgagaagcatccttcgccagctaaggaacttgccgataaagcctgttagtaggatgactatgatggctagagcgaacccgccgatggagatgtcaaatatgtgcactgatggcagcccgagtgtgagaaggaagtagatggactgtgacaggaaagcggcgccgccaaggttcgcggtgctgtagaggaacatgacagtaagtgttcgcttgagatttgatcctctgaggcagtcgagatatgagcccgcggagatgcgctgctgctcttgctcttcggagatggttttgacgaggtacgccaggcggtcgtcgatgctgaatttggagctgtagagcttcttcatgactttttccgctgcgtcaacgcggccggagttgatcaaatagacgggagacctaagatagtaagtatcaagcattctgactgttaaggcaaacgtactcgggagcaaacaagcatgtgaccgcaaagatcccacctacagcccactgtatagcaaaaacgttccggaaggcttgctcatcagtgttaggaacgaatatcctcacgatccccatcgccagtccctgcatgaagacaataaagacgacgagaatcgtctgaatcggcacgcggagtttcaagggcgcaacctgatattatcagcaccatttctagaaacccaacgtttcgacagctgcggaactcacctcggacgcatacgtcgtcccgattgccatcccagctccaagtgccaacccacaaaccatcttccccgcaaggagtgcacccctgcttttcgcataatatagaacaacagtgccaacaatagagagaattcctgccatgactcctggccacttccggccgaatctgtccgagatcatacccacgcagatggccccgacagcctgtagcaaggacgtcatcgacgtccacagcgacgtccagatcgatgggaggtacagtcctgactcgttatgatcaccgtagtacatcatgaatgcaggcatcgcaatcgtagaaccgttggagatctgatcgtatccaaacattgcgcctgcagcaaaggccacgctacctgggtatatttagctctgtcctcagagaatgacagactgaaacgtacaggccagcacggctcgaggatgcaacttcactgtagcccacagactcaactggcgctcttgctcctggatgagacggcctcgctcagcagcatcgtcagtgacattggttgccttctcgatgtgggccgcaacagcctcggtatctttgcctcccatgacgctatgtctgtgacttcgtctttttggttcaagtccataaggtacgaacaatcaaaggtcggttgtgtccagggcggctgcagactgatggggggagcatattaaagagctttaggatgccccacaaagccatgccgagggctcacgctccgcgtgagacagaccggtgaccgacaatagacttgtttggctggatagttctcttccagaagagatctttggggtagctgcgtgtaggtgtaagcgggctcaagggatatccggggaaagctgggggtcggataacccgtagtccataaatggcccaatggctgtcgacctcgaatcaggcccaagtccaccggtaccatttcaacatctcattttgaggaagccgtagcgacattaaatctgatttgttcgttcttcgggctgtctctcaccgagctcttttgcgtggcgagcttgtggagatctacattggcctgactcggacaacccgacttcgatggcatacctggtatattcgacacgatgattctggggaaacaagttgaactataccgcgcacatgggtggatgaaactagtgtaaacttagatttgtctgcatgtagggtcctgatggtacatatatcgtctagaggtcaaagctctgattttggtagaaacctgcggggtgccattgagtccatgaaggggaagtcgctcctttatatatatgcacacatgggctcaagcaagcaaagatacttcaacccttgctaggtcgagttgaggcagaaccacgtttcgcgtgtataggccggcctcgatatcaagaagcatggtcagcttcgttcctactcgagggtttatgcatctccatctggatgggcaatctcaccctcctttccctccccagtcgggttatccaacggactaagagcctcgcgataaacattcttctcctcccccttcaacccgaaccccgacggatcccttctgatcagaaaatgctgcaccttcgcgtctgaccccgtcatttgtctcactgtattttcccgcctctgattcaaaaacctcgtcgactgctcattcaattccttcaaccgatcctcatacccagtactaaccgtggtaatccacgaggcctgcactgcagcacccatgaagaacaatagtaccacaaacgtcacgaatgtcttatggtcaaccacggtttcctgcctcatttcgtgtcggttatgccacctctcccaatcctcccatgttgcgttggcgaaaatcgggtcatccggggctcgacgccggcgcgcaggtgccgggttgaacgcccagcccattcccgttgcatcgtatgctgcgcgcctatttgggtctgagaggatctcatgcgctgtcacgacgatgcggtaacgctggagccggacttcgggcgtgatgtctttgcatagagggtggtcgttgcagggccggtcagggtgatagatcttgactagctcgtagaagcggtgcttggagtacggagcacctcgtgcttggcctattacatcgtagggtgtgaatgtcggggttgatggccatgtgagatccttttctggggagtcaccatgggatgtggcatagagtcgacagtgggggtaggtgtagacgaaactcggcggggctggagatcggcttgccagcagcaacccgctataggatgtagtcttgatcttcctgagcattccgcatcgtcccaagggagaagtaatcaacttccccgggcgtttacatgagtgagtgagagcagatacaagcagtgggctgtttttgccgcagagactccgcgccccgaacatccgccgtccgggccggccccagactcatcacgtgggaccaagcttcatcttcgactgccatagctttgatcttcaacacaacattaccgctcctcaaaacatgcctacgccgagagaagacgacaacttggaccgccgacgccggcggtcgtccaactctcagagtcctgaccgcgaccgcgatcgtgacagtcgcagacggcggcaccgtcacgacgattacgactatgacaacagctcacgcagacaccatcagagctctcataagggtggtcctagaaggcgctcatcgcgcagcccttccagtcgaataagccatcggaaggaatacgaacgccgagatcctgagcgctcagggcgaacggatgcagacgaggaccggcgacggctacaccattcgccagatcttccagatcgcagacatcgagaccgtgatcaagaccgtgatcgagaacgcgatcgggcccgcgagcgtgatcgctatcgcgaacatagccacagacactcgcggcaacaccgaattcgctcaaagtcgcgatcttgctcgcccaaacgacactcaagaaccccttcgcgctctcgcgctcctgcccgcccgaaagcacccctcccctcacaaaaagacgcctacaacaccgaagttaccggcgaaggtccgccgccggagaaagagaaaccaaatttcgcaaacacgggccgtctcgccgcagaatctaacgctgtaactgtcaacggcgacaccgtcgttctgaaataccacgaaccccccgaggcgcgcaagccgccgcctaaagaatcctggcgcctctacgtcttcaagggtgaggatctgctggaaatggtggagctgaacgagcgaagttgctggcttatcggtcgtgagcggttagtcgttgacttcccgcttgaccatcctagctgctcgaagcagcatgcggctatacagttccggtttgtggagaaacgaaatgagtttggagatcgggttgggaaagttaagccatatcttattgacttagagagcgcgaatggatcaactgttaatggggatccagctccgccaggacggtatatggaattgcgggataaagatatgctgaagtttggaaatagttctcgagagtacgttctcatgctggacaagccgaacacataacattcacttcacttattagatttgaatgagaaacatcgcgattacttcatcaacggttggtcacatcatatcattgagtcgatcattagaaatacatgcatgataagcttaacgcttttctctcgatccctcacggtgataaccttcatgacttgaactccccggcaacctctttagccttgcccttggcctccccggcaacttcttcaccctttccctttgccttgcccgccaactcagccgcgtctcccttcaattcgcccgccttctccttagcttccttctgcgcctgaccagatccaacagcttccttgatcttgtttgcggcggcctctgtacatatagtcagtttaaatcttattatgaacgaatagccttcgacatccgccaaagtttccaaaaggctctttggggataatgcgtaccgccagtctcaattcccttcacggcggcatcagccaccttccggtcggctttcttgagagtggattttgtggcatcaatgggacctgacgagcggatggctgttgtgctaaggagtcgtgaggatgtgggtgtgatagtagagaggcgagtggccgcaggggtgcgagtagcgcgggcgaggaaagacattgtagtggtagttgtagtgcgtatagtttagtttgggatagcctgaacgactataacttaaattcgatttggcttgatggtttaagaatattgtattcaaaattaaacagatcaaggcgtatatataggtagtcgtggtagtggtgatgcttgatgtcatacatacggcgctggtgtcagtgtgacgtcgttataagctgagcaggcccatgaaaggatctacagccctatgtacggttaccagcacatgcttcgacagttcgtggagtcaagtttatctaaacttggaataaataaacctaacagacttagcattattgaggacctacgactggattatgaactcacttataaatccattaaagcatgatgaccgaggatgacccagcggggggcgttaaccaaaccctaagttatccgcgaactcccagaaatgctggtatcctgaacgcattttttcaagtgcaacgactgtcctatagccccggtaattcataacatgtcatattttcttcttgaaaaacaacaatgcatgcaatgcaatgcaatgtaaccagtatgtccataatgctctaagtatacaggacaaaatatgcataaaccaacacctcaatatgcaagcaagtcgacaatcttaacgttcccaaccaaaccatacctactccattgcttcactcatctatgctttttttttgattttttttttttcgatcgccctcgatcgcccgcgggttaaaagtccagccctaacccgggcgggtatggatgcgaaggtgtactcccactcctcgccctagcccgattcgcgctgcctattgaaaattcctttgcataagagcccgaagctgacgattcatgtgtcggaagtgggaataacgggccagaatgattctcgtggctgtagacgtgatacggcgattgcgactgcggctggggtttgtgaatatcatacttgtactgggggcttgaacgcaaacgtgcctggagatcgactctgtgtgtaccaaaatgaagagttggtgggggcggcggtggcattactgcgtgagggtcattattaggagttggtacgggaatatactgtctctggactactgctgcgtaagagttgtcggatggaaggttggaatatgggcgctgtacggtttgcatgctaggatcaggtacccaggccgctgggccagctagagcttgtggcgtggcgtgagatataaaatggtattgccctgctgacccagaaactgaggccgggtttagtgttggaggtggcgagatacgcgaggagtatcgccggctagttggctcagttgtccaggactggtgagatcttgatgatggcccacgggacattagttctgatgccggatccgaagacgggggtgacgctcctggcattattgcggagggatgcgggcctggaatagagctgagatttgtggcggatttgctgctgaaggctgggatggctgacccttgaaatcgccggcggggaactttgatctcaatgttgctttcgtaggggaggccgagagttggggtgctcagggacagatccgctgggacaatccgtctgccagtgtttggattgatagggtattgggagctgaggtctaaagcgttcagctgctgcaggagtccgtgatcgggctcgctgtaggttgagaagctcagcgggtcttgcttgtagtctgtagagactgagtacgatgacagtgactcttccgagccccggctctggattatcgagaacacagggcgttgcttgccgcctggggaggaggaggaccgacgatcttttgacgccgaaataggctctttagcagaagcgagtttcgaggcaacaaaggcataggtgggagcattttcctttgatgagtttgttgacacccgaggaacgctgtgctcgctggattgcgttgggcttgcttttttgacggccgagagggcttcagacgccgttctacgaggagtgcgctcgctcagggctccgccagataaactcctccacgcaggcgtcctctcgagaactggagcagcaggtacaggggcggcgggctcagagtttccaactcgaggaaatttaggcctccgttttgacttctgtccttgcctttgcttcaattttgctgccggcttggtccttgacgggttctcgaccacgtgccatccttcgtcgtcagtctgttggtgggggctagaaggtgatggttttggtcgttcagttgactgacttgcctgtgatcttgctggagatctggcccgtgtggattcatcgtcagtcaagtaccatctctcagaagccatcgtcattg

SEQ ID NO: 4338 - DNA, 3153 bp, Emericella nidulans
agggggggtttaaacgggcgcgccttaaaaagcggtttgcctttcaattgaaacaactttttttgttttcaaagcggggtttttccccgttaaaatcccgttgggggtgcaaacagaaaatatattttgcacctttggatccccatgcagaaaaaacccagttctttgtccccggggaaatttaccaacctatatgattccttaggtacttctttattgcctattttttgggaagcattgggcttattcaaaatcggggttcccgggtattaaaaaggcccatttctgatgaaccctttccccaacccttcttaaggtgttttaaacccacctaattgatggcatgggaccataattttacccggcacccaagctggaaaaatccgcggcatcgaacggtttcgcattcgggtgtcgaagctcagaaatatttggggtatgtatgtctgtctatccacaagccaaagcttggaaatggaatggcaacctggactctctgagatcaggttaagcgggctcgctcaaaacagaacagaggagaagcaacagcacgagacattcagagccagctcaacccgacttgactcaatataaatcaagcactagactcgcctttcctttccgcagaaagaagctcagaactgtccagatagacaattgtcagcgacgcttcaatcctcttgctcccgccaaagaggaagtagttcaggaatagaagagacgggatactcacattgttccctgcagcaccccaatagttttcttctgctcctctgtacgtttcctcagcgtagccaactctgatgctggtggaaaattccctgtcgcattctcattactccgactccgagacacaacctcttcatatgatatcgttcgctgttgaaatttaaatgggcccttcctgtttcatgtcagttctagtgtctcaaatattccatacctgcaggcatggggtatcaggacgtatgacgtcacatatcgtggccacgaggccggcgttccgagccggaacggaagcgtggggcgtggggggactagggctagacggtaggtacatactcagctagaaacccgcgtggtgtctgcggttgtgactgcgatagcgtgtggttcgaagtttgtgttgcataccgagccgggacagcgattgagaagggacggtggtgttgttgaagagcagagctcgaagacacagagcgctggagggtcgggcgggtagcgttaagggccatgatgacgttactaaaatctatactgtagacaagtgcgttgcaatttccacgccggcacgagtattagagataagagtgagttatattagccagtcgaagaatgtggtctagcttaagaaatcattgaagtattcaaatgaagagtgtttatataaccgctctcgaggtgtcgccattcacgtgattgcgtatccttcctgatgcggcggctatgatgcagtggagatgtagaggcgaaccagagcattttgggaagcacaggggaatgtctgatttgctggataacgcggaccagagtcctccgtttggccgtgcgggctactttccccagttcttccccgcattcgcctcccgacagggacactactgagtctgaggaccggggtttcttatggtggccatcagtaggcgcttattagtggataagagtggctgatatcatcaacatacagaacagcagactctgggcacagaattgtggaaagcttagcaggaacgtttcatgtataaatcatcaattgtacagtacggtgaaagtatatacatgttacagaccataccggaacccgctctgcaactcccttgcagccgcgatgtcaatgccctctctctccgcgatcttctccaataccttctgatccttctccgtcaagaccgcatcgacatcctcaaatcgttcctggcgcttattcaacgacttgagatggaagtacatgaagatcgccatgagccctccgatcacctggagagcaatgcaaacacccatggccgggcggtaatacggcccgtctgagtcgcggtaagtgaatggcgtccaaatactggccgagttgccgacggagttgatgaacgcgtacgcggcggcgcgctttgccggcggccggggaatggcacccgcaacccaggaatagacggtgccgttctgggcgaaaacgaagatcatgaggaagaaggagaagtaacggggtccgaaaccgtcagttgtcatgaagatgacgaacccgatgatggtgatggggatggggtaaacgaagaaccagaagcgcgattggtagcggtcggaaaggtgcgaatggatgagggagtagatgaccataaagatgtagggcggtgcgaccagaaggagggagatggttttattgtaccccagcgtgtcggtcagtgtcgggaaaaagttctggaacccgctggcgccggtgatggccatgtaggcgatagccagagcgtaggtcttgatgtctgcaaatgccatcttgaggcccttgacttggctccctttaccggctttgtcaacgtctgcctgagcagcttcaatcgcaagacgcttgacggccacgtgcttcatttcctcggggagcaggcgccagttttcagggaagtccgggagcacgacgcagaccactagaccaataaaacaggtgattgcgccttcgatgatgtacagccattgccaggcggacaggccgcgcgcgcctgccaggccatcgagaatgccggctgcgatgaggtttccgaaagcaccgctgagcaaggagccggaatagaaaatactcatccgcagagccagctccttcttggtgtaccatttagacaagtagaacagcactccagcaaagaatggagcctctaccagaccgaggatgaagcggcaggcgacgatcccggcgtagtttgtgacctggctggtgacggcggacaccagaccccaggcgacaatgaagaagccgagataaagcgacgggcggcccatgtagttcaggagcaggtttgaagggacttgcatgaggatatagccgacgaaaagaatcgacaaccctacttggtattgggtcccgaccagccgaggactcttggaggcctgcattttgcggcggtagttgttctgaccattagcaggcaaatttcagataaaagcccg

SEQ ID NO: 4339 - DNA, 3212 bp, Emericella nidulans
atggatgttttgatagcggcgattaggactgtatttcagcgcggagagctggtttgctgccacaggaaatgtcacgagagggtgcttgggatgtgaggagagaggatttggggcggttgtgacagagcgcggaagcggggggatgactgcggtgccgaaaggtgcgaaagcatcgcgggtcagaggttctggggtgatggatagagaaggagaagcgagaagcgtgggtggtggcattttctctaattgtaaggatgaattgttgtattgaaaaggaaacagtaatgaggtggtgagggatggtgttcatatacctaaggtagagtggagtcggttgttggagctgttcgggagtcgccgatggaagctccatcttctgtcaactacacgatacctactctcccagctacctgaaatcgtcatcaccagtcaaaataacggccgctggttctaccaaagggagagtcttcttattattgcagaacaaagggctatccaataaactgcagactagcacttctaacacaaccactttcaattgcccactgtcgtattcatatcctcccgcccaactgttctgctcctccttccatctgaccacatattatcgctgctcttgagatacaatatttcttttagagggggcaaagcaagcatatgaacttccgagagacttgagcgcagaaatattggtctggccgttctcagacgatccagtttcgacaggctctatgaaggactctccatcacatcccccgtcttcatacgcctcgtcagcactatccccagacagatcgggcggcggcccaaggatagagctggaaggttagttctccgggtaaccagagagctttctctatctcatggatgctgatggggcttttgctttgcgcaatattatcataaccttaccaagtgcgtcgatgccatgagtcaccgtgttaacattggctgcaaagatctcttatcactagcgagctatacaaatccacttaagcagatgcttagtggtccatgaaaggaaggtataacttggcagcaaaagggctccattgaggtcaccacgcggcactgagatgtcgatgcactgtgatttggcctcgcattatccaccgcctaattaatcaagtactgtgaaggtgccgcgaaagatgtcacttgaaaagctggtgtggaatgctcaccaaaattggtgttgggtagactactattgtacagagaggcagtgatagatgaagctgtaagggcagtgttatgtgatgacgcccaaccggtggttgaagagtagcggtgcctatctcctggtaccgcgagaacacatccacccaggtagtggtccggctaagatcgagttccagtaaggcattttgaaagggagatgtcaaatttatagtatatgtaagtttgtcgttatttacacacctgcgccgctgaaatcacttttatagaaccctagacctcaacactatccgcagtgaacctgaatcaaccgagaccgacacctttcccattcctaaacttccgcagtattcttctccttctcctttagtccagtcttagtctccacatgctccttgctaagttgcctcttcgtaatgaaaaagctcgcaacaaggcccactgcggcaagagcagtatacaaaatccagatatttcggatactccaagcaaatgccgtctcgacagcttctctctgcaaagagtccgtaatatcctttacagccagggcattcgccgccgcctccgcacctgtaaagtcctcttgcagggcactggacagcccagcgtcctctaggagatccctcttcagacccatgctattttggaagacaacgccgcccagcacgacggaaagcgccatggcgacattccgcacgaacccgaatgtcgcggttgctgttgcggtgtctttcgttgggatgttactttggagtgcgaggagtggcgggaagaagagcaggccacatccgaagccggaaatgatttggtagccgatgatcttcccaagcgatgtggaagtgctgtagtcaatgaagaggcctgttcctagcagcacgagggccatccccagccaaatgacctcttggtagcggccggtgcggtggatcacgatgccaactgcgaggctggtgaaggattcggttaggatgaaggggagaatgagcagacctgagtggaaaggggaggccgctttggcagactggaaatagagtgggaggtagtactccgcaccgagaaatgcctgttaatgttagcctggcagtttaaaacggagtagaattgttttagcattgactgacaaagccgtgtgtgaagtccaccaagaagcaagcaatatttgaacggcttgtgaagatgtggaggggcatgagcgggtatttcgccagacgcttctcgctgtagatgaatgcaacggacatcagggcgccgaacacgatcaagcaaatcactttagggctatcccaggggaaggtatcgccgccaaagtctaatccgaggagaatcatgacggagatggctagaatggacaagctgccaaaccagtctactgccttgattccttcgagcataggtgtcctgggattatggacatccaggaacaggatcagcagcacgaaagccgtaccgcatactggaagattaatccaaaagatccagcgccacgagatggactcggtgaagacaccaccaagcacaggaccgagagcaccagccaccgtccaggtacattccataagacccatgaacaggctacggagtctgcgttgcgtaagcaaaacgcaccgagctagaagtgtgttaatctcacctgacactgaacagatccgatatagttatgagaatgagctggataagcccacctccagcaacaccctgaaaactgcggcctacaatcaacattgccatatccaccgctgtggcgcatacaattgacgaaacgaagaacagcgcgacggccaatagcaggatcggtttccggccccagatgtcagacaggttggcccagatgttgccgctggcggcattggcgagtagataggccccgccaatccagacatatccgccgcctgaatgcaagtctgcagatatagtcggggtagccgtcgctacaatggtctgatccagggctgatatgaacaggctcactagaccctatacatgagtgacaagccctaatgtggtgtaactcggtctgggtgactaactgcagg

SEQ ID NO: 4340 - DNA, 3805 bp, Emericella nidulans
tcggccgaattaaccctactaaagggatcagtatctcgcacaggcttgtattcttcgcttttagtgctcgctctaagagcgtttgtgccccacaatcatcggcaatctgaatatcgaatcctttttggagtagaaggttaaccagccgaggattagccttagctctagccacggctaggacaagaggggaagcatagggcaacccgtcgatgtttggattgacatccagacaagcatgtagtagagtctcgataatttccagcccggctgactgtacagcgtatccgagcaccgtcgtgactgcccaatctccgtcgaattcaatgtcaactagtgcattcaaatcggctcctctatcaagcaagactttgatgatttcgatgttcccgccctttacagcctggctcaatggactggggccctgcagcccgctccgtgcgttgacatctgtatctggacccagtaattgcttgaagagctctgaatctttgagactataagcagcaaatgctaggcatgacggtgtggcatatgctccatgggagagtaattcatcaatggcttccaggctatggatctgaagtgcatatccaaggggcgaaatatcgttgctagatttgtcgagatctgcaccatgggacagaagaagttcaaggagctgcaaggctttgggatcccccgaaccaagagcaagcgtagcatattgcaagggagtgagtgacccctcgtcaacagtgtcaatatagccattggggctcataccggcctcgagcaacattctaacactctctatctccatctcccgcacggagctggcaaacagctgctctgctatggccccagctgttggttcttggcttgatacaaggaccttaagccgagctacgttgttccagctggataatcggaacatttccaacacccgctggtcgtgagatctcatgctaccaaaggttttcccatcgggcccatgagagaccaggttattcgacagcaagaacaactcaactcccaggatatcaattgttgattgcttggactcagcgaatcggctggccaagccgcgcagttgaccctcggactctgccggcataatgatgctcagtgccgtcgccgtgcgtgaacagctattcacgttcggtggatgggtcagtcggttccacggtacgaccgagcccaagcgtttcaacagttccatgttcggggcgtacgatgagacatttgtccctcggggtgaggttaccgccagggtagggctggttgaaagtagatctagagtgcagatatcagacatccacccgaaccaacaacttgcggacacgattctcaccgtaccttcatcttgcgtcggcggccgcaatagctttgagaaccgtagccacggaagagatagatcccagttaagccacatccctggtgttgctggggtacagacgacgataccctcgggggtacatggggagggagctaggagagaaccgcatcagcttatatcagaccagttgacattcgtggatggtgcctaccaccagcaagacgaagacgttccgttgtcgaaacatatgctttgccatacggagccttcttgcgcttcttggaagggtactcaacgccgtcgatgtagacttcgctctccttgtcgaacacttgttttcgtttctggatgcgtctctcaatgaagacagcatcagatgctgaaaccttttgattcttctggaaaccccactttccgaagtgttttgtgtactgcgcctttctaacctgtccttagtatggttgggggaatcaagaggcaagggacaagaggcaagctcacgttttgccgaagctgtacttggattccatatactccatcactgcagacaaggtcattccctctcgtatgtacagtcgatgcagctctggcttgtatgcttcccacagtgagtcttccatggcaggcgttgttatcggtgagcaaaggttgcccgtgggctgcgcgcagctgcccttatatggactgcggacgaggctgagtctccaatcttcctactttcaccttttgcagtctgcctcatgcattatggcttgctgccgcgcacgcttattggctgcgtccaaagttttcgcacactgtggagcccattgtctcctatcgcctggggctgtttgtccgccgcatcatctagtacctggtatcgttcctggttggccatttctcaaattctcactccactttaaggtcaagggagtatagagacataacgttgcggcgcctccctattgttaggatcacaatcaaggcttcattcgaagaacgcatacaattgtcgaagctcaattctataaaaccccattctccctccgtccagtaggcccggtcaacagacatccccccttcatctcgatctgcttgcaaatccttgaaattgcccagccagctgtcgcgatggaacatctaactaatgcttcccgtctgccaggtatcaatgccgaacagcagaatggtgtatattttgtttcgacacatccccaagcaacagccgctgccaattcgcaaattgtacccagcctctcaacccgggactgcccatacctccctgtcgaggattggttaaatccccatgggattgaactagagcaggcggctagggacacaccccttccaggccctgggaccagtaatcttcctagcaaagtttcctacgagatgctgccagaaatcggctacgctttgaccaatgcacctgagggcgacatccagaaacaagcaattcctaacccagccctaacttcctattgtccgaatgtcgacgcacttggcgagccactactgtaagcagacctcctccttctagggttcttcacgactgttacagccgggtctctaactctccctggcctagcagtctcgcgaatggggatgcgccgatttttcagtgcgagtggaaaggctgccgcagtaccactgtgttcgcccgcgaagcagatctgatacgccatttaaagtcagttcacatcgctcgcaacgcctacccctgtcccaactgcgagaagcgttttggtaggaaagaccacctaaagacacatcagaaaacgcatcgtcaaaaataaacctcagttgtcttccatttcgttcttcttctttttctttttccctctttccgctcatcttcttgattttttttctttttcatgtttgctcggcggacgacgtacgtcacctacgccctttttacaactcagcctcgtttttgctactgcctgtttttgtttcaaaggggttgtcttttcggtggatcggcagtcaattgggcagtcagacatgaccaaaatcactatacaagtagatcttatacactaatcaacgtgcgtggagtcccccacttagtacccgagccactggcaagcgcccttgtagtcacataccccgactttttttatttattgtttgtacactgccaaactgtttaaaaggcatttcattttcaaacctaaaaattttgtctggccatttttattgcacctttccagtccaacaagtcccaggcttccccactttgccgctttttcctgggacaagtggccccattcttccctttttccataagccctcttcaggacggccactgcagtaaaccgtctgagagtgctcctacttccggccctgtgccaaaacgcgagtttggttcccatgccgggcgccctgaacctttttaagccttaaggggctctcccttttttaaaaaataatttccccgggaggagggggttttcttttttcctctttttactccacacccttgcttttttttctcccccccct

SEQ ID NO: 4341 - DNA, 3686 bp, Emericella nidulans
gtaaaccaccccctagctttaaggatgctccatgaccacacgtctgaaaacttacttttatctaactgggcaggccacagtccgtggacgttgtcttgcgattgcggatcggagtcttccgattgaaccctgccagggaatgacgggccctgagattttagcttatagagacccggtgatcggctattagtggttggttacctgcctgaagtcagcaatgggcagacagcaccgcatgtattggtacccgtctttctgctttgtccgtgcgaagtgcacacttttcaagcttgacattcagaatctagatcaagccaccaccaatatttcgattggtacggagccataatgtgacggactttcgctatgggttcagacgggtcatggtatcgcacagattatccaaacagtcactgcatccgcatgacaggtgttcggccggggtcaaacccggtcgttctgagattatactgtcataacttgatctagataatactagcgaaaggacatgcgttgcattgattgccccctttttgaaaggaagagagcatagtctctcatgctgacaacttctagtcacccgatctgatcctatctgatcgaaatttgccaagatgtctactgacaagatcacgttcttgactaactggtacagcttgctttatatttttgtttccctgcgagaatagtgctaaggtgtcgttttgcttaggcacgcgaccccgtaccacgcccccctgtacctcgcccaaagcaagggattcttcaaggaggaaggtctcaaggttgctctactcgagcccaacgacccatccgatgtcaccgagatcatcggcagtggcaaggttgacatgggcttcaaggccatgattcacactcttgctgtatgacaatcgccatggttcaatgaacatgactaacctgctgcaggccaaagcccgcaacttccccgtgacatctattggctccctcctcgacgagccgttcactggagttgtctacctgaaggacagcggaatcaccgaagacttccgctccctgaagggcaagaggattggctacgtcggcgaattcggcaagatccaaattgacgaactcaccaagtactacggcatgactgccgatgactacaccgccgttcgctgcggtatgaacgtgacaaaggctatcatcaacggcaccatcgacgccggtatcggcctcgagaatgtgcaaatggtcgagctcgccgagtggctcgcgtcgcagaaccgtccccgtacagacgtgcagatgctccgcattgaccagctcgctgagctaggatgctgctgcttctgctcgatcctgtacattgccaatgatgcttttattgccgcgaaccctgaaaaggttaagaagttcatgaacgccgttaagcgtgccactgactatgtccttgctgagccggcgaaggcgtacgaggagtacgttgacatgaagcccatcatgggaactcctgtcaacagaaagatctttgagcgctcgtttgcgtactttagccgcgacttgaagaacgttcagcgcgactggaacaaggttacgaactacggcaagcggttgggaatcttggatgccgagttcgtgccgaactacacgaacgagtacctttcttggactctggacaaggattcgactgatccgctcggtgatcagaagcggatggccaaattgcaggagcaggttgctgctgaaggcggttttcaccggctggaggtggcttctgcctagaagctttagtatgaaggctgcctaagtcgatcagccagcaagcagtgcatagtttgtcgtagtcactctttaagtcaataattatcatgattatgcttttgattcaaacttccattcggcatatagggatcaccatctcgtatagtgagcagctgttctagtttagatccattgagtcattggacacagcctcagctgcctatttcatgacaaggtgtccaaatgataggcatcaccattcaagctgatatagaccctcgctatagcatatttaactttaatagcgatatccaatagtcctgtccaaattacaacgacataatgaccactctcctctccctcccaacagaactcctcctctccatctttgacctcctacctcctccatcaaaacatgttttctctctatcctgccgctacctgaactataccttcgcacctctctgcccttccctagacacaaaagcaatattctccctccgctcagccctagcccgcgacggcatctccttcaaagaccacgcctactgcgctgggtgtcgcactatccacaggcacaaatactttgatacggacgaactctcccactccccagtcatccgcaaatgtacagctacccggaaaagcctctacatcgagcccgaacaattccttagctaccaagacgcaactaaccaggactattggttgccacggccatattctagcaatagcaaaccgccgcggctgaactcaggctccatcgtccggtttggacgcaaggaaccaataaatgaccgggaattcgccgtctgcgcctcgtacgagatcctgtcactccccgacattggttccgactcaaccccgaatgagaagggctccgacttcgatcttagagtaagcagggccgaaattgcgcggatcctgcgcgggttcgacattcccacatgtccgcatacgaggctaggtgataacttagttatcaaaagttattgcgagtctgtttccagatcgaggaataggaacgatacgccttcaattgaggaattgagggaggaatatcgccgcaagatgggacagaaagaatttgatgatgctactgcagattatatcctcaggatatggaaggatgacaaggcgaatgcttgctgccagttccctgggtgcaagacgaccttccggtgggaatgtcggtcgagcccgagaaaagacggatggaagacaatccttctccatgtaaagcgatatttgggctatctacccgcgccatcggatctgcactggatggcgcagcttgttacggtgcccgatgaagaccagcttaaaaagtattggaatgaatgcttcgaatggagggatgtgaacttagcaatcgaagaggtaaggtataaacgactgcttctggctagagaccagagcgggaagatggaattgggaagagcagaagaggttgaattcgagctgctgcggagggagaatgattatatgaggcatccgcatcgcaagaggcatatggggtctgtacttgggaaactaggggctggggagacatcgcatacgaggctttcgcttctgatgccgagatatcgtcaggcggaggaagaagtagagggggacctatataggccgctgcattcggctgagactcttgaaatcttggaaaaggaagactttaaaaataagtacaagagcatgcgcggattcggctcttatcagacgatgtggattgagaacctctttcgatctgcgcgcagtggttgattgaagatggactgaggcttagtgagaatgggacatcctttcctgatagtgagtccagtcgcaggcctggaaagttggcacatgctggacaaaaccccaatcttactcagattagatttgtagttagcagccagtaggagccaagataacctacataccgtgcttctagggctcataccctgaatcatgatatcagc

SEQ ID NO: 4342 - DNA, 3538 bp, Emericella nidulans
tttatctttagcactatcttgacattgcattaaggaggaaactaaaattccggaagtcacaggaagggcatgaaatgggtctcatttggctgtatatacaccgaagcattcactaggacgaatatctggactgtatactaggaagtgcaacggggtcagaccgaaagaggcgtctcagaaagaagcagctcaggaacaccatattgcttggcagactcagtaaacatcttcctctctgcgtccgcgtacgggatgccctctcttcggcgctgcaggcacagccgctgctctggctcgccagggaataggacttcggagaaccccggcgccgggataaccccatgcaccctctgcactaatgtgtccatgcgtgcctttaagtcgtcgacactgaagcacacatctggcttgatcgcaatgaagcaatggccggcatcctgcggcttcgcatccttgtaccgatcgccaacctgcccgccgaaccccgcgactgtcaaaacactggacatgatatccatcaagatagcaattccagagcctaaccctttggtccgccgatcagagccatacttccgttgaggcgacattggcgtctgtagtcgggttcccatttgcgtctagggcccagccaagcgggatggactcgccgcgcccgcagcccggcggattttccccttggcaactacagaaggggctatatcgaggatatacggaacttccctgttggaaggggcccccgccgcgaatggcgcgatgccaaggggggtctcttttcctccaaatggaggcatctgcttcgccgagctggtgaagacaagggagatcatgttggcctgcaatgcctggagcacgtaggttgccgccataccaaagtggttagagtgattgacactgaccattccaatgccatatatctcagcccgcttgatcgcttcggccatgccgcgagtggcaacaacgaacccgaagccgttgtcaccgtcgaggatgggcaacgactggcgttttttcggttagcttgaagtgtggtcgttcattgactcgaccaatactgttccactaattcgatcttgggaggcggcagtcgatctagcgcatacctttttgctgtattgcaatgcccagcccctgccgctctttcacccagacaattttgtgaccacttttccaaaccgaccgtttgaggttgtatacggagtgttggcaatggcattcagattcactgataaagcctttgaagcgccctaaaacggctctcctccaggtgccagagagtgcaggcaagccgcccatcagttagccatgtctgacgtatcaactgcgcttatagaactgtcaacaattcagactttgtgccttctcgccctcactgattttaacgctaggtctccaacacagagactgtctctctccggctcctctcaatgatgctgaatctgttagcaaatagatggcgatattgtccaatgtcgtgtacatgggctctgactctgacgcttgcccgatcggctctgctggaccgcgaatccccgtggggtccactttatgaatcagcagacggttgaggaacgacggagatgctactggagcattgttttgtttcatcagctcattgggaagtctgtcataagtcctgggcctgtatttctccagtcctcgaagctccctttccctgccagtgcgtcgtcgcctccaccgatcgcactccgtttcaaaggtcagactgtggctgaatgcgagggcccgagtgagaagcacggtatatgctccgttgtcattcaactaagcgaagtctggagtatggcacagtcctacatccgcaaccgtggaggtgcagcgaacgggtccgggggttgccctccatggcattcatcgtccaaatactgacaggcaattaagatcggagacgcaatgattattatccgaggcctatcttgatggtttccaaagggaacaccgattctgtatcttgtctcaaatatagctaggacaactcagccattcattctgttgataagtgactcctcattgaattgagttaggattggctctctttgattattgcctgggaccccaaacccctacaatactcaacgacttagaaccggttatgaacctgggcgataatctgcccccagcgcacagatatcgttttatagacctgtcaagagtcgattttgaggagctgcaacgctcccgcgcttactgggctccttagctgctcagccgcttctatatcatacgaccctgtgcatcctcaaccaccctatcctcatcatgcttcagatccaggaaaaccgagtcgtttccgaggttttcctgcagcaggccactcttactcgtagccatcttcagtccagaccaagccctcattatttgcatcccagtggaattcaagccgttctctttcgcgcatatcttcggggatcgtcaagcgaatccgaaaccaatgcgtggaccagctgggaccgaacgatgccccgatgtgcgtcggctggaactcattagaggtggcttcttcaaagcttggccgttgcaagtcagggacagagtagacagaaatcttgacgtgatcttcgtcagaatttgtggcctcgaataatttcctgtcaacatttgcaatagcgtcagtggagacgatttaggtaatgcggggaagcttgcacttgaagtagtttacaaggaccgatcagcctttaaaggacataccctattaagttctgattttgatactggcctctggatgtaaactgatttagacggtcagtgtagatgctcctaatgcgttgcccgacggggccatcaggggcgcgaggtagagagctgggagtctgtcggagaacgtctccacccatggttgcgggtccgaactggtaaactatagctgaagcacagacactgaatttcaaatactttagaaatgaagggatgatcgaaaactagagggtttttggaaagagacaagagaagacgattcgagagcggaacgcaagaggttggagcagggattcaggaacaggtgacgttgttggttgcatgcggagaaggcagaagctggggcggcaagctgactacgatacgcagagttgagccccgtacaacgccgtgatatattacgcttgcaacaggataggtattttgtatagattcctttcggcgactgttcacaagaaattgttctctagtgttgggaaacagtccttcgcatatgtatctctgcgtctctatatactcatacattgagcattttcgcttattcaagcttagtgggcctgccaagaaacgcccgtcctaaacccatgtgatctgaaatcaacacgccatctcactctcatctcaggaccggtgcctgtcatctctgaaatagcacatgcaattgacggagggtagagagctctgaggcctggcctgtggcttgctgccaagtacgatacgggtgcttaccttaagccttccgattccccaagccaggctcaacccgtcccagtttcagcaagtcctttaagacgcaagaagacaggtacatcccagtcacaat

SEQ ID NO: 4343 - DNA, 5935 bp, Emericella nidulans
atcctctagatctaccaaacaactatgttccgattctgccaggaacctcagagacagctcgagaccgcgacccccgggaccgtgactcttcaggtggccgcagacacaccctccttcctcgccccaatgaaatgacaataaacccggaagtcgcaacgtcaaagacatcccacctcttcacaggacagcccccccttcctcttgacggccggatgtggatgttctgcgacatcacggaccccctccttcaaggcatcctcaatccaccaaatgattcgggaaccgaccaacctccacctgggttcctaagagatgaatgtgacatagcgacagatgggtggtatgggaacggcacgatggcgaaaatgaaaaccatcatgcggcataagatcctggcaatgtatgaaggtcgcactcccgctaaggacgaagagtacgcgcccattctgagctttcccgaccatgcgagcccagaaacgggtcttaggggtttttggcttgatcccgagtttgcgacgtcgatggcgacagcgttggccactgaggtgagaagtatgattaaggcggcgcccgcgtggagggaaatggccacggcgaggacgctagcaaagaaaggggacagtgcaaaagtacagggagccaagggggctgacgaagaagaggaagacgaagagggaattgagggggaaggagaggccgcggatgagagtgaaggcgaggaagaggcgattgagcaggcggagataatggaggcggcggcgaaggctgtgcatgcggctgcaaagagggatgaagaggatgagattgaaaacgacattgacgaggtggacgaggagaatgaaatggattgatgttgctacatattacgcggcattgcgctacaagggacgaaagatgactagtaatgcgattatggactatttacctcgtgaacaacatcagacgtgacacatttgagccaattaggtgcgctgacaaggacacagccattgccagaagcgaaaagaaaaaaaaacaataaataaatccaaacgccaaaacacgaaggtccaaaagaaagacagaattgggtatcaacaagcaatatactccgactacaccaaaggagtcccagctccgactccattactcaacacgaagactgaagcagggcccaaaataatcaagaaaaagagtggcatctaggttgagtcgccgatagtttcctcaaccgccttcactggactagcctcaagcacagactcaatcgacgacatactcgagagcctactccgactagcgttctttttgtcgacaggcgcctcctcatcctcatcatcgtcatacacaacagcgtacgaaaaggcatggcagtcctcaccataaaagtcagcggcattgagctcgcctaatggagagcgaggctcatccaccgtgtcagatttaggcaccgctaccgcaggggactcctgttgggagcgagggagagagattcccaggtcagcgggcgggatattctcctttccgcggtgatctgactgactttcgtccttcccctcgtcgtcagaaatgtctagaacacaggtcgaatgctgcatgaggttggtcatttcttcctgctcagagtcgacgtagatctcgaacgaccaagatgcaggcatcttcggggcaggagctggctggctcttttgcttgggcttgccggtagacaaaacagccgcaagtgagaagggacggccgatgcccttgcgggcagactctggacggctcttggagatcgttgcacggcgggaaaacggcttggtagctttcaattggggcgaccggccggctggtttgaggggtgcggatttgggtgtcaactgcgtggtctttttaggtgttgatggtgcaaccgagtcctcgaagattgtgaaccccagggaagaggactttgtcggcttcattgggctcttggtcggtgcaaggtcgtcctcatcgtcggccgcgcgcttacgtttcgtagacttcagcgtgggtttcggtgccgttgggtcgatattttccgaatcgaattcagcgagaggttgcttcctgcctaagaacatattgcctttaaggccggaatagagttgagcgcctaaagtggtttgtttacgttgatctggcccataccattttgcttgttgaggacgttcattttggagcggaggatggaccgcattcgaggggcatccagaggagcgaaaggttgtcgtacagaggcaggagacatagtgagtgcagccatgttgataaactgtgatacgaagagagagacactgatggacgtgggctgaaggaatggtgactctggatttgttttggtcgcggcaggaggagcgagagtggggtgtgattggcggtcggcttatagtgaggaagtgagaggaagtgacagctctattgacagtgcactgtctggattctatgaaactgtacagtgaagaaaacgagatccgataaatgagagacaggacctgctagtagtgaacggagcagagtattgttgagtattgttcgagagtgaggtccagtcagttgatatagagagcagggcgcgaggagtcaagacgcagcaagggctgagcacgctatggagaattcctgcacggtcaagacgattctgatttatcccacaaagaggcactcgtgctaagtttaagggaggcgaaacatgcagagactggtttcaagaggaatggtatgaagtcagcctggatgctggaattcgcccatataagtactcggcacctggttggaatggaggaggagaagcgcgtccaattcgtgtctcccagctgcggactaattagtgacaggctgactcgagtagtatcttcatatcgtcaatcctgaatctgcaaggcatcgcatccaccgagacccaattattgcttgccttcccctcacttcatcgacacaggcgcgtcccgtggtattttatcgttacgtgtgaatacacgggattcacgcgctcaaagcggcgctttggctggtattaccagcgcgttacatctactccgtcatcttgtttcttcgctatacaagtcgacatagagagtataatcttgctatatcttgcttcacatccgttaccatttccttcatcagccattatagctgtcgaccaagtgctccataaccaaaaatcttgttagagtgtttctctttgtacaaccactcgcattctgtacagttaccggtgtaaactgtcctcgtgctggtccggtctgacgagacgactcgccgtcactccatcccttcaacgcgtcccccacatgtcaagtcaagcctcgtcgcgtcgatgctcttcagctcaacttaattatgcttggattagcaggcaaggttcccagcgaaccacgtaccccgccatcccagcctgcgcaagccagtttcatgaacggactccttggccagtttatctcagcttccagagcccgtcagaggcaattaacaattgcgtcttctctagtaccatcataaccgacttcaaacctaatattatcacatctcggctcatttaagtcccctagccagcgcacgcgacggcctgagctgggtcggcgcttccaggccagcctgtgccctgtggcttgtgtttcatcgtgctcgcgccgcgcgcgaagctgaaaccaatccaatgctctgcgatgctatgctaggccatgccatgccatgctaaatcaagcctatctacgtggataatcgaggctaattactcgatttactcgcggtttatctatgcacgcttcctgggccgtgcttatagctttacgtacgtagttgagatacgtactccgtagctggagtcgcactcgcaccgcagaccagggttgaattcgcaattcagcgcttaagttcagaagcgtgaatgcccaagaggattacatcgcatgcacttcacgagtgcaagtcgtagcgcatgcgttcgttgtgtttaagcgcttgcttaggagctattttcgcatttggcgatggcgttactactctggctctacttcgcgccaaatgaaacgtagactgggacatgataagtgcattgccaatgtgaacattaagatgaattggtctatttctattctctatattgggtccatggccgtaaattacactgctccttgacgtagagttgctagatctcattttcccacggaatactatccatcgcaccctgcctttctacgcctcttgccgaagccctcgtggccacacccatcgcctcatccatgacatttttgtacctatgcttcttctcctcagcgtcaaggtccttcccagcctttccttcccggcgccttccctcacgccatcttgcagcctgaactgcataggctcccacgaaagtatcgcccgccgccgtcgtatcaagcaccctgctcactttcgcagcagggacctcattcacgacccggtcccctagagtatccggatccgcagcactataccacacccccttcgcccccagcgtaacaatcacatatcttacgccgaggctatggaagtaccgcgcaaccttctccttcccgtcctgcgcgctttcaatgcccggaacgcgcagcagcacgtcctcgtccggtgtcatgagctcagcctccgtctcgttcatgataaggtggtcaacgcccttgtacacatcctccggtaagcctccaggcggcgcaggcgcagggttaaacatcacgtccgggccagcatcaatccccctcttcccatccgcgcgctgctgttccttccaccgcgcgatctcgcggagaatcgcgaccgtcgtctcggtgggaatctcgccctgcatgacaatgacatccggagctggctccgcaagcgccatgccaacaactgacgggtcggcctgcatccccgagtaatttgcgcccggcgaaaacaagatcctgttctcgccgccggcggatgagtccacaattataacggccacacctgtatatgcgtcttccacaaccttcacgcgtgacgtatcgacaccggatttctccagggtgggcttgagaagtgcggaaaagtggccgtctagtcctcccactgcgccaaccatttcgacgttcacgtcgccagtgtttatgcttgtcgagaaagaggaggattgcggctgcgaacgcgagagtcgcccacacgcaacggcttggtttgcgcctttcccgcctgcacttgtgaaatatgaagaagaggtgattgtttcgcccgcgtctgggaagcgtggcgttacggagaccatgtcggcgtttagagagccgatgacgcggatcgtaggaggcattttgactttatcgattaagatatattcgaaatcgattgtagaaatgacaagtatctaaaggtaaaggtagaatggcaaaaagaaagttactggtgaggttggtaagtgtcaaggtgggatgcaagctgtgaaatgcgggatggctccaattacatagtggggtcgtcgtctagaggcggatatagacggtatgataacgcggggtgggacaatttcttttcagcataaacgcaacctgtaggctaccatgaaagtggatgctctcagtctgctaggtctatcgaagcattggcatatccagtagctcttccatcgcttcaaatggtgctatgccagacaatgcttaaatatattatggaaccacatactacctctttgaaacggaaatcaatgactttgctcggatctttataaaggactgcaatattattgtttagtttattttgttattaggatatgttgtcagcttatgagcctgcaaagtgcgatttcatgtcatgaattatctatcatcaagtatctgatatcatcgaaatcaaccaacgccagacccttaaccccgctgtgcgtaaaccaaagtatcgttccgatgctgtatagaaacatacaattaactataaacccaagagaagcctatacaccctgccggtatacctgtga

SEQ ID NO: 4344 - DNA, 2048 bp, Emericella nidulans
  unsure (1)..(2048): unsure at all n locations
tttgggccatttgtaaattagggaagaacctacactatgttcatttgggccactgctccaacatcaacgatagtgcagtgattcaattggtcaaatcttgcaaccgaatccgatacatcgatcttgcatgttgcagccgcctgacggacaggagtgtacagcaactggcaactcttccgaaactaaggagaattggcctggtcaaatgccagttgattacagatgctagtatattagcacttgcgcggccggcccaggatcactcggtgccatgcagcagcctggaaagagtgcatttgagttattgcgtcaacctcaccatggttgtaagttttgtcgcgtccttgtttctggttaaattcgtgattgtctgacttaagtatagggcatccatgctttactcaacagctgtcctcgtctgacgcacctaagccttaccggagtcgcagcattcttgcgggaggaactaacggtattttgccgtgaggctccccccggagttcaccgacagcagcgnnaggttttctgtgttttcagcggtaaaggcgtcaaccgctttcgcaaccattctgaaccgagaagctgcaccccacgggatgcgaacgaggccaccatgtacgatgatgaagaagaactggatgaagacgagggccaagtgactggcctcatgcatgccgctgcgattaacgatgacgactacattaacatcacacctcctcatgcttgatacccctacaaactgcttccagcgtgtgactttttcgtcggtattgtttctcatccgttctctagcatgatttatctttcccaagtctgttcagcatgtcttattatcatggttgttatctctatttctggttggattttagccggaacaagcatcgccttcttcaactggcgctttcctgttatctggttattgcattggtagcggttacacggggtctcctatcttacttattatcatttgtcagccgtgagtatattgttgacgatggcacatatgaagattctatactggaaactggctggccaccgacaagtggttgcaagtagacatccatcggtatcccatttcaattcaattatagatttgctgcatagcaatatattgtagcaattttgagaatattccgtgtttggtgcagtcctatcgttggtgtaccgtcgggtcccgtgcggccaccgcagcttaccgcctctgtcttgtctcgtcttctccgcaccttgctcaagctcaagctctctctgtctagagacttcgtccgccaggctcaggctcccgaacccggagtcaagacgatggaccaaactaaaccacctcggaggaatccattagctttcactccttggcccgtcacgctgatcaccgcagtcgtgtatctagctttcgtaatcccgctgctagtcattcaccatgtcgttccatccgcacccacctcgagtcccgatggtctgaatattaccgaagcttggaacgaccttcaagtcctcactgcaggctaccgcccgtataactcccgccagaacgacaaaattcatgattggttgctgcaccgcatcaacgagatcctgggcgcagcgccacccgcgactactgacgaaaagaaacctgacgttttcgtcttcgacgacacgcgctcaaacctgacattcgcccgcgacaatcttgctgtatactttgaagggaccaatatacttgtgtatatccgcggcgaagatgacgaccaggaacaatggtgggagttgccggagggaagtccgaagggcaaaggaggtgtactggtgaacgcccactacgacagtgtctggacgggttacggtgctacagatgatggggttggttggttgtgactttgtctgcagctggtcaaatacttcacgactccgaaaaatgcgccccgaaagggactggtgggtgttgtttaacaatggcgaggaagaatttctgaacggcgcccgggtatatagccaggcatccgtatcgagggttccggatacattccttaattggagggcgtcggccctggcagacgcgcggggctttc

SEQ ID NO: 4345 - DNA, 1301 bp, Emericella nidulans
gaagtgcgttttggtctcgcatctaaaaaataagagggttgggtgtaatagtgtgtggggcaagtggtatatactgaatctaataaagcctgaatatcaaagaattgtttgggaaatgtattagaaagaagggcccccacgaaattgaatcactactttaccaagctcgaatgatcccaacagaataaattcatgatgctgtcgagactgttgatgtagcgaccaagaataactaaatgagtgcatagacgcgcggcaagcgcttaagcccggaagctcttgtcccgttccccagagatcatccactggaactcaagaccgaccaatctctcaattgtccccgaaacatcaaagaacatcgtccatccatctcgtcaacgacaggcattcactcgatataccgagttcgaaaccggcgcctattatatcattgtatcgctagcgaatctgttcgagttccatcagtgtcgtctgccccagatatccttgcagagttcaaaacgcagttcgcaatagcgaatctcatcgtcaaacgccgttaccgaagcttgcactccgacaaatactcaccgatccttaatagttgtcagaagccgatattcttcttaaggtagagcgtcatcaccgatcttgcgcaccacgcgttccaccgtttcctttcttcgttcttcgctcctctaaaaccgcgcatcacaatatttacatacattcgacggacatgggctgactctcatgatgcgcctgccaacggtcacggtggatagcaaatctaggactattacatatcgacttataaccggcgttcgggacacagattcaaggattcgggaaatacacgtttgaagccatcggccaccgcgacattggcgtgacgcaatacctactggataatttcacgcggagctaagctttatctaccgctcctccgccgtttgcggtagtatggccactcctgcgaacccgttcgctgcgcttcatcaaggtcagacagacggagcggcgacctcaacaggacgcggacgcggacgtggtgggcagtttagaggcgctgcgtcttctcagccaagaggggcgtcagctatccagcccaggggcggcaacctcaatgcctccaacgcccgcggccgtgggcgcggacgaggagcttcttcggcaagagctgcccgtggttccagaggcgcgggcgcgacaagcaatacatggcgtgcgaacaagacggaacaacaatcaacgtctacatcgtcgacctcttcccccttttcacaactgaagcaaaatcagccaccccgtccccagccaat

SEQ ID NO: 4346 - DNA, 3342 bp, Emericella nidulans
caactgcaactatactcttggtaatactagcccatgttcctgcgagaatatctcgtcggagacaagctaaatatcatctaaaatcgcactccgtcctcggcaatattcgctagtccgagggaactataccctgtgtacagagtgcacaggccatgtatagagttaaccagcgcaatagcttgcagaagattcctgctaactagatgttgcaaagctgaacactcgtatcggcaaatgcaagcatatgtcaccaaaccttctgctgtatggcttacagacctttgaactggttgtccaagcaatgtgctaatttgccgattggttctcgcggtaatgaacatagacacctcattgtattcttgaatggtgcagatgaatgcttcctggtcctgaaggcctcgagctttacttttgaacttaaaggatgcgcacatgtgattatgatcacaacagatactccgtacggacccatctgcaaagctaacggctgacataaacatgctcgatctaattatgttcgaaatctcgtccaaggcccgcacaattgtggtatatgctaaaacaaggcgcatgatgagctgcaaatgtatgtagcccatcttaaattcagttatatttttcggatttgcagctgacatagagaccagtccacgagcattcaccaaaaaaggaatcttgaagaatatactcctgctggagaactctaagaaatagaatatacatgtatattctacagacctggaccagtgactgatacttgaagactgtcacaggatgcgccggatccatgtattggacaaccgaggctagcatttgtttagcgtattgccaagccgtggatcggtgggtgaagaaagaaataaagggcaagagtgctccaagagagaggattgagttctgtccaatctctctgttatactatgctcaatcatcatggaaacaggcacaactttccagcttccccccttcccagccccgcagctgctcctcttctctctaacccttcctcgtcctttccgaacacagaatgcggtcctatggcggcacagtaattttcaagatatcatcctctgctgccttcctggtggggcccttgctcaccacatcgagtgaatggtcgccgtaccggctcgctatcaccgttggtctcgtcttctctctgatcggtgactactttctcctaccaagtcacaaggatttcaaacaagaacaatcacaaaacgataccaccagcaagagagaccaaaaccaagatgtctcagtttcctttcaagctggcgttgttgcatttgccgccgcccatattgcctatatctacgcttttctgcagacagcacaaacaatagcctggccaacatttgtcaccacctttgcggcaacagtcgcttttgcaaaatggctcggtgtgatctatccacctacatcttcatcagtagcgagcaatttcctcggcctgaaaatctcgagagacatgaaaccccttgtcctcgtctatgcactgatcataagctcgatgtttgcggttgctacttctatatcgaactcttctatgatatcccaacgagcggctggcgctgcaatgtttgtggtcagtgatgtctttgttgctgccagtgcgtttgggaccacgtctgttggcagccgaggattggtgaggatcgccgtcggttacggtttgtatttttgggggcaaatggttattgcaggtaccgtggagggactgtgagtttcattgtaacgctggccgcgctttgatattccccgcaggagttcaaatatgcggtctgcgcgtgtctacaaagtggcgtaaggctcttcaacaattcatggtatatacatatcttgggaggttttacttcatttcccactctatttagagcgatgcctggctcgagtcgcaatgctaagtgttatatcggatggattcacagacccctggcaacagaagcaaacaaagaagtagtaacccaggtcgatatcccctattacgtatatctgcgtagcaggataggtcattttgtatttcaacgaggccttcactaccagtgcaagacactgctggggtggaaatttaaactacattaggcactaaacctagtgtaaggaacgatattatcctggctaaagcttagtttgctgagagtgagacgtcaaccgatcctcgagccttgattctgcttgttcaggctcccaggttgcatggccgcgcccagaagcttgagcgcaggtcagtcatactctaatactgggtatatgtgtaaatctctgcacaacaacatctgatcctcccacattccggcacgtccctgttgtctgtatactattatcggctgtcggcatagtaaacaggccgagtccaggggataataatgaataatgctgggctagagaatcacttcgattctctaagcgacgcttcaccattggttatctcggcagagatggcacttcttagatgacgatataagggctcgatggtgaggagcctgtagcattgtagtattggtgtagctcgattccatggtggtggctgacgatttcgccgcttacaagaggaatcgcgcaagttcaaccatatctaccatgatcatattactgaagaatttggatgtcctcacgcaccccccaggtatcgcggaaacgctagctatatggacttgatatggaaagattagacgatcgaatctgatcatagtgacctttctggtccaggaaatcacccagacatatacctaggattctaatccaacttgcactttagcaagcctactatagaggcctgacatgcaacgaacgacagggcgctgtgagatctatggataactatgcctattgcgtacaggtaataattcctacggactaatggtacaagctactgattgagaatagatatgaattaagctaccagcaaggcgaatatacttcgaacagcggactggtaaagaagggtgaccaaggcttttatcacaccattgtatagtgatatagtagcgaatatagtgtagaacgggttgattagaatcattgcgagaatgcttgcggagctggaataggacgggtccgtttctcaacgaacaacgactagcaggatgacgcggggccatcagctataagtaatccctttgctgagctagccgagcgaagggaagtgtatgatgcggctggtcgaatgaaggtaaattgccaatgcaagcttttaaaggcaccattctctcacacagaaccgctgtgcccatcccaccatatgcgatccaccagtctacgagcgtctattctgaagctcccactcataggaagcaagcaggaacggaccaacaccacgggtgtcattcggaaccactg

SEQ ID NO: 4347 - DNA, 6859 bp, Emericella nidulans
aatacccgtattcgcggtgatttatctcttctggcgctcatgttacaatgctgggattggatggttacttcacaaccagtctcaccacaagactcttgtccgatgggctgaaaagtctcagatctttgtgaacccagctacgggcaagaacccctatccccagttataccatttgatcaagcgcgactgagagatcaaaatctccaaggactattccttcgaggaggcgccgcttgagtataacacctggcttgtctttagacgccttgtggacctgatcttgatgtgcgactttgcctcttactgcctctttgcaatagcctgtagtcgccaccctgctaacgaaagcgtgctgatgactgtcattcgatggacatccggcatcgctttagtcctgttcaatctctgggtcaaactagacgcgcaccgggtagtcaaagactatgcttggtactggggtgatttcttctacctcatcgaccaagagttgacctttgacggggtttttgagatggcaccccatcccatgtattccgttgggtatgccggatactacggtatttcgctgatggcggcaagctataaagtgctgttcatctctattatcgcccatgcagcccaattcgcgttcctcgtgttggttgagaacccacatattgacaaaacgtacaatcctcctccacctcggaaacgtactatcacagagcatgacgcagcgtctcagcgatcgcagtctccggatactccaaacgcgccatccgtgtccgaagaaaatgtccccaacgcgacaacattcagcagcccacctccggcagttcacaacctactcgggttccacaatctagacctgcatagaatcacggatacttcttctatcctcgtccagttcctcatgttttctctgactgttctgacgccttcgacgccctggtatcagttccttttcgtggctaatgcggccatctggaggctctggtactcagtcggcatcggctatcttctcaacagacagtccaattgtaaatcgtggacccggcactttgtcaagtacggcgaaacgcctcatgaggcatggaaccaatggaaaggcacgtatcacctaagtatggttatgtgctacgctagcttcatttctgctgtatggaagatgtacaccctgccgtccaactggggctatggtcttgccatcctgcgtcacgtgcttggagctgggcttatctcgctgcaaatctggacctcagtgagcatttacgagtcactcggcgagtttggctggttttacggggacttctttttcgatgaatcccctaagttgacctacaatggcatctatcgcttcctcaacaatcctgagcgcgtcttagggctcgcaggagtttggggtgcggttctcataacggccagcggaacagtcgcatttctcgcctttttgagccatatccttagcctgggcttcattcagttcgtggagcgaccccacatgcagaaactgtatggccgaagcttgcgtcaggatgcaggtctcgtgaaaagcctgaagcggtccttgccgccgtcgctcagacaactgcatggaagcgtggacaagatatttgacgaatcatacgaatttattgaagaaatcatcgatactgcgcgaccaaaactcgccgcaggtaaatacattcgttcgagacacaacggcacttttccagaaatatcctgcccgtgtcaccatctcacgcattgatgccgacttagccggatacgacctacgagattactcgcttactgttgaagcaagccagttgcctctagacgaaggtgaccttagcaaagagggtgataacgctcgcacacctctcgatcgccgcggtgacttggaaaacctggttttcccatacggcacaccagtaaaggtcaagtggactgcaccgctcaaccatagcaagaaggattggattggtctttacaaggtcaccgacaatacttctagagaggtgacccgcgtatcttcacaaggaagatgggtggccgtcaacgagggcttctacgataacctcacctgcgagcggggcatcctcatcagcgatgtggtcgtatccacgtcccaaggcgataacggggagaagcatgatatcgcaactggcgaggttgttttctctggcgacaagcttttctggactcaaggtgtatttgaattccgctaccaccacaatggtaagcacaatgtcatggccatttcacgaccatttgaagtccggatcccccgcttcgaagaggaagatcacttcgacatgtcccaaacggcagtcgaaacgagccttctgcctgtgatccagaactgctttgaccgggatccggaaatcgcacctgaaactccggaagagcagtacggtagtttggttgagcgagatggtaaatttgccaaacgggttgtttttgctgttcatcaaatgtgcgtaccatcatcctctcgtatactaaacgatactaacatgcttaaccctaggttcggcgtcgaattcgcccctgaggtcgtccgctcagatggcaacgtccgcaacctcgcctggaggatctgcaacgcaaagagggtcttggtaagccgttccccagcttctatgaactttctttggtccctctcaaatccaacaaaatggtttagcgttccgcatcgttaatatcgtctgttcgcaatacctaggccccatacagtatgtctcgagatggcgctacgacaccaactgaaagcaaagagtgaccgattattggaatgataaaactgaaccacgaaaagcaaccatagacggatatgggttagacgtggaataggcagttatcggggctcataactattatctttatcctgcttttcttcgttgaagaggaaaaaggacttgaagacaggccctatgcatgtattgattagaggttcaggctgcatgaaataaaacggccttcatggcggtgtgtgtgtagatgccagctttaccatgtacatattggttatattgctacacaaaaaagtacgaaacacgttctattgcttgaacctagactagtaccatccgtcagatcaattttgaccgcaacaacctatgaccgggctcgaagtagatactagctaaagcagcaatacccatcatacaattaacccgtagggaccagaagcaaacttcagaatcggggaatcatcgtagaatgaaatagaaatagcaggttgttccgaggtagaggataggtcgtaagggacgcccgcacatacctagttcgaaactgttatgatttctttttatgatagagatcatgagaagtggcctgaaggcaagaggctgcctaaaattgtcatttctgtgacgcttaaggcaggttagttactgtagtgttgcgggctgaatgagtggtctaagagcatgttcgcgctaaatggtatactgctatttacgacaatgtccatgggaagagatcgtctcgtcccgacaaacgatgatatatactacttagaatgaacaaaaccctggttaaaaaaaaaaactaaattcctgatcttgacttaacacgctagcattctgtaagactctaagagaggttagccatatgttcctcctcttatcatgaaacaactgtgtggggcatgatcaatcagaaggaaggcaacggaaatatccacatggttttgcgcattcagaacaggtctgtgagtttacatccgaaaatatttcatcatttgatcatgattcatgaggttgaggacagagcaatgaagacgaccaaactggtgtaaaggtgtactcacactatatatttgggatttcaataggccgttccaatgatacactgggcactgtcagcctcctggccagagaatatagttcgtgacgcaatatcctcgccatcgcacttgcatcaagtgtagtcaggcaagccggttaattcatcccatcccctgccagactcggtcaagaagcaagtcacccaagacggacaacgagcttcaggacaaagctggcacaagtcaagcaagcaatagctgaattgaacaatgcgagaaacgacgatatgagcccaccctcctacactccacaaccatcctcccaagttcccatgcttcttgacgaaacgagtgacaactaggtccggtattagggaggcggagagatagatcgtcggatccaaatgcaaaatcaaatcaacatatgcaggctcgaagggcggttcctcaaagaggatcattgaatggattgactagttgtcatcataaaaggcgttgcaggcggtggatatgagatttcactagatccctaccttttacgcaacaactttccatactgtcctgtttcttctagttgtcagtacttgttaagcgcaacgttgagcaagtgacaaggcagagataagagaatgcatcaggagtttttggtatggtatttgtttttcttcaagaagtttgcagaagcagaactgaaaaaaatttgtctcatcatgcaagtgatagtgccagcgagggtgaagaatcttcttacctatagagatgtcgccgagaacctcttcgaaccacctatcctaccttttgcagttgtcagcagaattcgatgcaaatactgttgactgtattgctcgagcagtgcatatcagatggtgatgcatgtttgttcaaggcccatttgtttgtcgccagaactacgatttttggaatcggtttcctcatataagcagggagatgaaaaaaaatagaaggaactcacagtacatggttagtagaaaataatatgaattgatagatcgcggtagcaaagctgtaaagctgccttcatttttgaaggtagagctgttgggagcttgtgtgggaagaaaaggaaaaataagtcggaaaaaaaattgcttaagaaggtcgagctaaccgccgactccacacatggcaaacggtgcaaacagcctcaaaattggagattccgcttcgagtggactgcttcgacagctcggtcaacttaattattctcatacgatcgctatcggtcgctcaaggaactgcgggtgctgagacatgtgtaatgactgacagacgaagaatcaacgggccgcctggcggcacgcggcctccaatcttcgcttcctccatcaagccaaccgccactgcaactgcggcagagcgaccacaacgacaacggcagccaaatgagctgcgaaagatctgtatgtcactgcttctcttgctcttggtatttgaaacttacatattctaactagttcttaaaaccggcctgatcccttccgcctctgggtcgtcatatcttgaatttgaaccctcagcatctctttccgctgcgcggcatcgcctaaattcattacgcctccctcttcttccttgaagctcgcatgcacagtccatggccctaaacctctacctcgatctgcgaccttctctcccaacctcgtcctcaccacgcacgtcaaatatgccccgtttgccgcccgcaagcgcaaagggcatatccgcgatgctagcgagcgcgatctaggcgtacacctcgaaacagcgctcagaggcgttatcgtcgcagagagatggccgaagagtggacttgatatcactattaccattctcgaagccgaggatgaccggtggtggggagacgcaccagactcccatgatgccgcatggggaatgatgaatgttctagctggatgtattacggctgcttctgcggctattgctgacgcaagaattgactgccttgaccttgtcgccggaggtgtagctgccgttgtcgtggacaaactcgctgatggaaacggaaattcctgtgctagactcatgcttgatactgacccagcagagcatcagtcgatactgtcggcatgtgtggttgcctatatgcctgggcaagatgaaatcacggaactttggctgaaaggggacaattcgaagtcggctgttgggacaacagatcagaatctcagccacgacgccttgatagatggtgctgtggttgccgcgcgaggtgcacactctgttcttgcagaggctgtgcgggaatctgcgatgcggtatgctggacagtcaagtggttcttcataatgcagtatggtcatatcgttacgtactcaatcacttaaaaagcctatgaattcggtgatacactcctctataaacggcagctttcccattgatactggagtgccactagcaaacctttgcgacgcatgctacgatacatataaccctacagtctcgttacccataggcttgctacctgggcgtgtttccctagtaatctcctctggttggcatgaatataatgtatctctggacccctcttctccgtatatcactgaaagtcgaacacgcgcagattcctcacgaactctttattcgcactgaggtctatgaaaaataatgccttcttccccctgtccccagtcctatgttatctgtactgacttgaaggaccgaacagaattgctctcttcccaggaagcgttggcttgaacaagaaaggcagtcagggacctggcaagagaacaatccaccccttttaacaaccagagatttgaacgtggactatgccagcacaatgactgaacacaaagagccattgatggaaaatagaaacagctaagtagtatatatctcacatctaggcaaagacacagtgcagaaccgtcagtgattacaaaaagaatgaagcctgactgttacgaagccctcgttgcctacttgctcggcgttactatgctcttccacactcctctcatacatcataacacggttctctctttcaccccaagctattggtctactcaccttcattcagcttatctcctctcttcatcgtttcctgggctctttcaaatctacatctgcatttccgtctac

SEQ ID NO: 4348 - DNA, 1255 bp, Emericella nidulans
gaaagcttccgacgattggcgatgataccggcagtcacaggggaaccgttgtttccaccccaaccgaccaacatcagaccaaccttgccaaccttacggtcaaccttgaagtgataggtggccgccttaggagtagcgataagcttgccttcggcagagcgagtgacatcggtggtatggtaagcataagtactcttgatttccgtctcggtgtactcgacgttgggcgagttgacggtaaacagaggggcgcgagcagtttgggcggacccgttcacggcgccattggcagcaacatccaagtttgcgtggggagccattgtgtcagaatctcagcgagaattcagaaacaagtgttgacaaggctgtggaggatgttcgattgacacagtgattatttagtgggtgtacactatattggctggtgctccgccacgggtggatgagcgccggccgttgaacgggtggtgccgcctagagaacaaaagagtcagcaggcaatcttcttgggacagtacaaggtgcagtagggtcaagatagcataggcttgcccttaatggctccattctggggaacacggggaatgtggaactcacgagttaagaagtgtggagaaaattttgacggtgtttggcgatcacgcctcggaagagagtgtgatcagaagaccttagagaaaagcagcgaaacgagcttgaaactgaggtcaatggtgtgtttggggggtggaaaagaagggaagggggaggactaggagggacaatttatagcgggacactcgactccgggtcacgtttatcttatccgcccacagtccgcccgcatcgccgaaccggccagcacaggccagcgttccttctcgctccgattccaggcaacatacatagccaatcacggggggatcgagccattgagtcccggctctttagggcggggcatagcaaacgagaaaggattgagacttgcggtgaggatcgaggggtaaatagcaccctctcgaatcttgacgccttgctatcgctccacttgtcactgcacgtaccatgtgtatcgaacgataaatgaatgacctctaggctccggaaacgaatatgaactttgtcggctttactatcatagacatcctcggagcctccgcctaacgtgtttagccctcctgaacgagaccctcatgcgtgtccggttgtcctcgaatatctctggtctagcgggtcactcatgatctagctactctctcaacgcgaatacgtgact

SEQ ID NO: 4349 - DNA, 861 bp, Emericella nidulans
atcgcaaagcgagtcatggtttcaatggtttgaattcaccccgtatgaatttttctgcgaggaactcaacgctggaatacctacttgggcccttgggagacatttcaatggtggaaagaacgaggtacctgctgggacggctcccattcctgagctccatgtcggcagtttgatgggagtatggggcagcgcgttttgccaacgctctcgcattactacaaggaaatccgtccacttcttaggggcatcgccgggtttggaggtattgattctctaattcagggcaagtctaaagacctcatccgcgtccatcccattgatccggcaacgataccaaactatgtgctagggatgaaggaccagctgcctccatcctgtccagaatccatctttcaaagccaacatctgcgacttatggatgcaggaatgagcaacaacctcccaatatacccattgctccgacccggtcgagacgttgatattatcatcgccttcgataactcggccgacatcaagcaagaaaattggctatctgttgtggacggctatgcacgtcaacggggcatcaagggctggcctattggagccggctggccagagcagccgacactctgaaagagacagaacagagcctgcgcgaaccagaaaacatttccgaagaagccctaaacagaagagtctcagaagcccaacagtcctctactcatgagcatgctcactcttcatcagtcaccactaaacaaaccacaaccaatccagacttccaaccttctcccgcagacacagacctagactactgtaacgtctgggtcggcaccatgcaagagagactctccgacaaagaacacccccttctaaacg

SEQ ID NO: 4350 - DNA, 2129 bp, Emericella nidulans
cgaccatgatccgccagatcattctgccaaaggcaaagctggtgaacatgcaatccagggccagaatatggaaggcaaatcgaataagtccacaagagatcaagtgagccaggctgatatcaagggcgaaagtagggaggacttgatgaatcctgagcccatgagcagcgataataaatcactgaaactatcgacggagaaaaacctttcaagggagcaggaggaacaggcccccaaaaaagaagaacccaaaccactaaatgcagagaccgtgcaacaaattcccaagcatacatcgagagtcgttcaggcgtaccgcatgaacgaatgggccaagcatctaacgaatgctgatgtgcctgacccagagcccatccaacagttcgaagaccaggaccccgaccaaaccgaagaagcggccgcaccagtcaacgtgtcagagttgctgcaaacgccactgaatgcgcagccacttccagctgtcgaatcccggagagatacaaacgagagccatcacgcacatgactcccgtacgggttcgcagaagacgaaaaaacgatctagctcacccaaacggctctctggacaatctgctgggtcagggcatttatcccagaatttgcactctgcagtgcaaccactaggcatcattgccacaccgtcctcagtcacgctgctgccacccgccgaacagggcctcaatgagagcgagaaagccaaaccacgctggaaggggccgacgcctctcatggccgtgcgggaggacatgatgcgtagtcgcctgtcatcactctccctcccaaccgacccatatgcgcgccgtagcactggtcaatcccccaccgatttctcatcgcggtatcgttcgggctcgaccttcgcgatacccgaactggacgacgatgatgttcccctgtctcagcgccgggcaatgctccacgaacaagcgaccccggtttcaccaacgaacgccgcgccgtcgagggcaaactccccagctgtcctggcagcttggcgggagtttgtcagggaagacctcgggaagcgcgatccgctaaaactttcccaatcaacgtccctgataccgggggctcgcagcgcgtcaccgttcggccagccggggcaacgtaacactccttccgtcagtctcggtgacaagatcgctgaggggatgcagcggggtgatatgagcgacctacatcgagaggcacttcggcggatgaagccaaagccaaccaaagtgtcaaccggcttgtatagagttctctgaacatgcatggagttttactttaataccttgagttacggttcctggagttcttggagttgttgatgttagcgctgaaatatgcatttccgtctgtgcctacttcatacttaatctctgtttgtacctgtcgatcattagattccttagtgacataatcatcccatgaccataactattgaggccttgaccaagttatctgcaatttcgggatcggcggatcgccatccctttgaagaggcagtgaagtcattcaggatcgaaggaaaagctaagtttagtaaagttggagccttgcttgcacactatttgggctattagagtagtgaggcgtcccggtctggtccgggggctggtctggctggcgatgtttcgatttaaaagcttcagaaacttccaaggttctaatccatgattcgttctttataaaactcggctgtgccccagcgcccctggtctgacacttctttccttttccttctacgccgtcgccgtcatcttgtagtagaccgacctgatgtatcgattccatatcatccttcgttgacttctcctctagcacaaaccgtcattcctttaagagaaaaataactaatattgcatgagacctctctcttctcttcataccatctttcttcgtgatctgagttcctgatcgatcaatcaattttgtggatgtcgagcgcagatcgattcttgtccctagccagtgcgccccttttctcccgccgccggccaatcacagccgcccctgcttcctctcacttcctcactctcaacttcctccagaccagacggcacacaccactggctcctctctctgccaccagcctcccatcgccggcaaaaacggtccagtcac

SEQ ID NO: 4351 - DNA, 3702 bp, Emericella nidulans
ttgaagacttttgctcactgctgtatcttctgaaacgctggtataggattgagaggtgtattcgtgctcaacgatgaccccacggcgcctaaaggctcaggcagcaagtaaatccgattcgggttagccccgtgccgctatcgctgggatagccactctgcccgcctttgaggtccaggtacctaccctaggctgataacctgtgtctacgctgccaaagctacttcatcaaccctctgtcgccagaatgaatcgattatttggcacgaagaatgcagcacccaagccgacgctggagggcgccatttctaatgtatgttagtactcgttttgcacaaagatcacgccgcccccacattatcttccttcatctgcctctccccgctttctcatctttggctaataatgcttccaggtcgataaccgcatcgccagtatagatgtcaaactcgcctccctgaacacggagctttcctcatatcagtccaaaatctccaaaatgcgcgatggcccaggcaaaaacgcgctcaaacagaaggcactgaaggttctccaacgccgaaagcagtacgaagcgcagcgggagcagctctcccagcagtcctggaatatggaacaagcagggatgatgcaggacaatctgaagaacgtcatgacgacagtcgacgcgatgaagacaactacaaagactctgaagaaacagtatgggaatatcgacattgacaagatcgagcggatgcaggatgagatggcagacctgatggagattggaaatgagattaacgagagtatctcccgagcgtatgacgtacctgaggatgtggatgaggcagagcttgacgcggagctggaggctttgggcgaagatagcctgttcgagagctcgatgggtgaaagcgccgtccctagcttcatgcaggatgaggtggcaccgccacaattcatcgatgaacctccagagcaaacaaaggtcaaggaacctgctaccgggttgggctgatgctggagctatctttcttctgtctatattgcaggagcttcggagtttgggttcttatcagcttaggttatggcagctcatatgctttcaaaactaatattctactacatcctctatagtagtgccgtctttcgaattagcgtattatgcaattgttatgctaacagtattctttggctctctgcccaagatggacctcgggccccctcaagctctcgaccgccaaacatgtccttatgatgcatctgctccccaaatactctaggtcttcttgattaacctccctctgaacaaacgctcccaataaaacatagaaacgtctcaaaagatattgatccggcatatcgaagctaaaatctacataagctgaagagctgtggactcacgattacattgctcgtccctgagacaagcgaaccctagccttctctccagaagatcctgactacaaagagatctattattggggtcgtttgaacccaggtatgagcaattcaacctcccaaagaggaagtaggctctagtccctgggtgcggcagaggcgttgacgtcctcatgggctttcgagactatgcctaacaattgaatatggcagcagtgcgattgataattataagggaaagaagcagggttgagcaggagtaccttgtaagagatgcgagtgtcgatagggaacggctacctggatgcaaggagacttctttacggcttactgggtggaggaccaggcatagaagaccaatctgacttcatataccattacatggtatgtcggcatctccatctgcccatagcgtcaggcttctgtgtgatgcaagggctaattgccatcggttcttctgcgcactgtaatgctctctgcgtcctgtttgggttctacaataaacacgctatcggtttcatcgttgcaggagaatctctctgtctcgagtttttcaggcacaaggaccccttgcagccgggctgcctttgtctcgccccggaggcatacgtggaccacctcagtcaccttggggaggatatcgaatacgacccgagggagcgctgtaagagcaatttgctccgtgagcgcagcgagttaggtctaaaacgagtcagaattggcagccaacgaagagatacgattatggagcgaaccaagagggaaaatatacttgattgcatgtctatttgctggtgccggttgaatggattaaattatgaccatagcaaatactgagacgaggataagaatggtatatggatacccaatgctcaatcctggcaaaagcgtacttttattcctgtcgcccagagctcacgggcatgaccttttagttctctggccgtcgaaatgctctcccgggtaggtaattttctcttttaacttcgctccgctaacacatcctctatattctttataaatgtatcctttcgttctcgacaagggctcctcgaaatcaacctgagcaagtccaattaaagcgtaatgaccacatctgcatctctgttattgagcgcgccagagtaggggtcacctcaactatgctctgctccacgttcctaacctgttttcgaatatgaaacgccacaatgagtactatcccaatcgtcctgatacggtaaaggaatataagacaaacctatcgggggccttcttggaaaacgaagcttcccgcacgggcaacagaaatctgacgttgcaaggctcaagacttattccgggtctgggaaaacagctactctcatacttcttcaagatgggtgcaaagggttttgatgaaactgcagacaagactcgacagtataagcattgcttttttctaggcatccccagttttacgtgcaccatagctaacgttcacacgcatttagacaacgaatacgacaacgggacatgagatgtgattatgttcggcccacgcaaccccagaaacaagaaagaatgttggggtaatcaacaacatacgggtccttgactacgttcacgaagagcgatccggccttggattgtgcagcgtcgaactgtactacacaacatatgccgagattggatcagagctatccctcctgttctctatcaaaaaaacctatattccgaagataccgtggactacgaacgcaaatatgcgtagaaagatgatgtgactctcctggttatacaggatgccaaggacttgtaaatgagtcccgcgtgacgcacgtctcacgttcaaagggagatttatcccggcatcgcttgctgtgctcactggcccttctgatacgaatggacgcatcacatcaagacaaaagttcgaccccgtcgtctatggcatggccatagacgggtatggattttatcatcgagaagggcacccgggtggttcatcccatactccaactcgtctctggccatcattagtctcagtggaagacgaacgaattctgaagcgtcgacactaagagacttaatatacactcagccgcgaccgtcaaaaattcttggagtcgccaccaaagttgcctactggtcatgtcgcttgcccaccgggataaagtatgccgttgaatattaatggtgggatttgcccagatgtcgggcatgcgcctgtcactcaagtggcagggctgaaccgaaaacagtcagttggcgtgcaagcagactatttgtagcttaatccggaccatctcttggcgttgttttacgtatctcttacttaggcttaggtagctaactgat

SEQ ID NO: 4352 - DNA, 3545 bp, Emericella nidulans
accaaaaaccgccatcggaaccagaaaagcgacagaggcccctgtctggacacaagaagtccacgtcgaatgatcgttggatgtctacttactcccgtgccggtgtaccgactgcttcatgtgaagcttgctcacttccgattgctgggaaggtcgtcaccgctgccgggacacgttttcatccagagtgcttcacttgttaccactgtcatactgcccttgaatgtgtggcattttaccaggagccggaggcatagcggaatgaacgactcgcagatccttccgcagatgaagacgcccattctttgaggttctattgtcaccttgactttcacgaattgttcagtccgagatgcaaaagctgcaagacaccaatcgaaggagaagtggtcgttgcctgtggggcagaatggcatgtcggtcacttcttctgcgccgagtgtggtgatgtacgtaccgtgactcccgaatgaggacttctgctaatctctaacagcctttcaactcgcaaactccttttgtggagaaagacggctatgcctggtgcctgaactgccactctcgcagaactgcacctcagtgtgcaggatgtaagaagcctgtccttgacgatatcgtgatcactgctgtaggcggaaaatggcacgaaaactgtttcgtctgccatgaatgcggcaacgggttcggcccagatggccggtacttcgtcaaggaaggtgagcccagacggacggccaaaggccgaatcattggagggccggttcagctggctgtgtgtgagcgatgcgaaggcattcgtctgaagtcgtctcctagggcctgattgtggctttggtagtaggtgatctctatattatgactaacgctaggttaagctgctgttcgtgccattattgggtattcgcaacgccgaacagatttatcattgcttgttatgtcttttctgtcttatttacattatgcatggcaagcgactattttataacgatctaatgaaattggctgggcttttttttttgggctttcaaattatgctgatatcggtagcgaaatgtacggtctattgcagtatagaaaaaaaacctcaacttgaaaagcctctgataacccaaaactcctaagggaaagcctcccgcaatcgtcacgactctcaaacccattccgggttactcttcctcctaaaaacagccacgtacttatttcccccattcctcgcaaccttctttccctcttctgtggcctctttcataacccgaacacactcgtctttttcaatgtcctcctcgctcactcgctcaaacaattccgctgacccctctctcttccccactgattcttgcacctcctcctgaccttcaccctgcttttgagcctgctcagcctcaacatcgtacccaaagtgccttagaatccagtaatggtactcctccacatccgtgatcgtatacagcaagcctcccggtcgaagcgcatacgcatactccgcatttagcgtctcgctgacaatcctcgccttatgcttccgcgccttgaaatgaggatctggaaaacagatgaagatcttggatagttgaccgcgcgcgaagaaatttgggaggaatttcatcgtgttggcgcgaatcgctgtgatgttttggtatccgcctgggattagggtcgacggaaagatctcggagtcatcgactgagggatcgttggcggtgggggtctcggggaccggaaacggggattggtagaggaaaacggctgatgattatgcagcgtaagatagttggagttgaagtttgagcgcctgttggtggcgaagggctttaatccggtttgtcaaataatcccgttacttggacacgaatttccattccttttagactcgttagcttcgggccgccaccttcctgttgtcgccctgaggatatattcataccaaccataagtgtatccggcaaaacgggcgcaagcccaacgagcaacccgccgaatccacacccaatatcaacaacctccacatccttgatcagcttccttgtgccagcgagattcgtctgcgaggggtccggattcacgaatgccgggaaatgtgtcgcccagtccatgtgtgccgggctgagaggactgaaccaaacgttagttgaaccttcatcccaaacgcacatgattgcggtaatagaaagagacaattgtgggagagacgaactacttcaacaaatgatctgagaacggatttgcatgggcgcgctgtctgtagtattttttctggggcagtttcagggctgcgagtgcggcttcgccagattccgcagaggtcacggcggcgaccttgttgcggtagacctcgcgcttttgtttctttgcggtggcgcccatgatataagggttgtgtacttccgttcgttggcgttgtggattggagtacttgttcaaggtgaaggcggaattttcttcgctgcgggagcggacgtcactttggcggagcggagctggctggtcttccccgcatcgcatctcagcctcctacgattccttaagatcgactgtctttgctttcgctgaccgctgagggtcctccaaaatggcggcaactatcccctcgcaatccttccacttcccgccaaactactcctttccaccattcttctcccttcaaccgaacgccaacacccgcgccgtacaactccagaggtggtcatccctgattcaatcgtggtgtcggcaccaccgcatctacaaaatcaaccttgttgaagcaattgcctcgccgttatttcggaacacgacgctgaagaagcagctggggctgagcgatgcgcggaccgtgctggattggatgggtaaaggggaggaggagggtggtggagggcgacgagcggagtgggttgacgggaccaagaatattgcgtggatatggtggaggcggccggaagaatgggcaggggttattgccgactgggtatggctgcctttttctcgagactgagatttgaaggctgatgagtttgtgctgcagattgagaacacagggcagaagaatgtcgtcttacggtttatgagttgattgaaggggaggctaccatttctcagggtatgtcgtcaagactggtggacaaaagaatggtactaatagtgtagaatggaatgggatggaccccgaggtgatgatgaaatccttgaacgtccttgtcaagcagggaaaagcacaggtcttcggcaaagaaggggaagagggagtgaaattcttctaaagccgccaaacaagctctcgattcaaatgctagagtcgccaatgttacaaaatcgccaactattctgcaaagattatgggagatacaccgtacaaaactccagacaggacattccatgaccacatgcaggtatcgtaagtgaaatatcaaacactacccaatcaccaacttactcctcagactgctcaatcattccttcgctgagctcataatcctcagcaacacgcaactcctgagacatggccatatcgagaagccagtccacccggacgatgcgcgggtcttgcccatatcgtgaccaattcc

SEQ ID NO: 4353 - DNA, 3026 bp, Emericella nidulans
tagcgtttcagaaacaatgtgcctgtatttggatccatgggagggccatcaggctgtactggaaacgatggcggcggctcaacattgttagcaggttgcgtcccgttgagcaggtggaacggaatactatcagctttgccccgctcaagttgcattgagttgctttgactttcggagcctgcagaagacggagacgccggttttacttctgctgcagacggtgacttgacctttgatcgggcggcagctgcaattgccgtctttgctggagggaagtccaggtcgagattccatactttagcagtatggtcagcggagcaggttgctaggtgcttgacgtcaggcgaaaggaggacacgagtcaggtagtccttgtgggcttgaaaggtgcaaattgggacaattcgagtcacttcggcctcttggatcatgcgccagatatacacatttccctaatcaatcagcatagttaggaaaacattgcaaggtcaaaataccttcttattaccagcacaaagtaaggatccgtcgctggctgacgctgacgctatgcacggcaacgtcgtcctccggaatcaactgatgtgtgcagacactctctccaagatcccatacccgaacaatgccagcacggtcaccgctgatgagctcgccctggtttggatgtatgactacgtcattcaccggggctttgtgtgcgtagttgcgctggaggcttcctgtcctggtgtcccagacctttactgtgccgtcttcagagctagtcaccatccactttccttcgcagtgaaatgctacgccagtaatgttgtttgtgtgaccttcgaatgtcataacaggatttggattcgtggacttgatgtcgtataatttcacattgttgtgaccggcagccgccagatatcgcttgtctggtgtgatgcagagacggtttacctgggagtcggggtgctggatagtccgcgagcagattcccgatagagcctcccagaacctatcaggtatcaggatactgtcccgtgcttgttgagaatagactcaccgaatggtatggtcatagccggctgacatccagtcatggtcaattcaactactcttaaaacactcatcctgcagaaaatatcactcaccagtacaaagtatgacactcatatttgctatccaatctgagcgctgctaaatagaagacaagtctgacggtccctgctgacaacaggagtgttgcgaaagactgcttgaaatcctgccggttttatgcccgagggcccgtgagcggtcagttgagcggtgtattaaagtacattttcacgacggcactagcacctaaacatttcttgtgcccgtttcattttcctcttaccatctgagttgacttggttctatttatcatatgtccactttctgactcgacacgatcacgtctctggcaggcctggttcaaagtgcccaccagacgtcagagttgagtcgttgagacaggtagggtgactgagtcgtggttcgaagaagaaaacgcgtggcttgagttatcctgccttgtcaggttgggaaatgagtagaggcgcggttgaaggtaactctacctcccttcgtcctgatcctcaagagcaagctcttatggattctcatctgtacatgaatgaactggggcttacacctttccccgggttccagctgcggggcgattccctacagggcaaagagcaagaatgttccgttgaacatgcacttgtcgatgccggcagacgcggtgaaatagatcaggcgggcggtgaggccgttgctgagatttccggcgtaccacggacgggtctcgatgagatcaacgcaggagcgaatgctacagttaatgacatgaattattcgtacgaccctctgttcgattctacggttccggagcttgattttgttttctcccgcaaacgaagcgcagaagaattgtcagatatttcctccgagaaacggcagcgacagcatgcagaatcccccgatcaaacgccttctcttacgaccaactcgacgcatgaatcacatgcatctttcttcgacactttcgacagtctatttggaggcgggatcgaattacccttagtactacccgacgaacctctacctgatttcagggagataccccaggctccgtctagcctgcatagaacaagcgaattcacaaaggagggattctctttggatgagcaagacattcttgccaccaccacacgtgaatttttgcaggtgcggaaagagcctgagtataaatctccttatcctgtctcgggaggaccgctaggctatcttccttcaaatcctgcgcttcacgtaacatgcgttgccgtgggggacgagaagatgcttaatgaaatccagagtctgcgggctcagctataccggacgacacgtgagcgtgaccagtataagaagtcacttttgcaatatgcggaactggacggttctggaaagtcaccggaacagttactccgtgaagaaaatgcgatgcttcggcgtgtatcaacacgacaccaatcccgagtggaagaatacaagaaggaagcagccgcgtggagaaacaaacttcacgaggtcagtacactatacaataatctcctgtatgaaatcgaagttacaaagcggcttcccgctatttccttggttccagccgagtacaagccacaccaatatggacaacaaatcgtgccgctaccttctatgcaaagtgcgggtgctggcaacagtcagcctgctggatctccaacacggccactagggcaacaaatcgatgccgtcacgatagatttgacccctaagtcgtcgtttccgcaaacatccacgaactctatgcctgcgcaggttacacatgcttacaaccagccatctggtccgccagcacgacaacctaaacaaacgcctgaagctattatgatagatctgaccgaggaagatgaaccgctgcctactcctccacctgagccagaaggtgcggcgctcaagtcgttgcgcagcaagaagtatggttggctaaacgatac

SEQ ID NO: 4354 - DNA, 3271 bp, Emericella nidulans
ggaaacaggtccccttttcaatcccgtttaagggtatacaaattcatcattagatatagcataatctaagccccttacctactagcttcgtttatttcttcttcccacctccaactttggccttgaagctgccttcaaagccaggccggggcttgctcccacccttgcccccggcagcgcctttcttgccacctccagacttgcccttttcttctctgcgtttgcgcaggttctcttcacgcttctgttgcttcatgtctttaccccgtttgacggtttcaagacgctccttccactcgcgctcggagcgcttcttggcggattccttgcgcttaagggctttctttagtagcgaggtgtcgtcccggactcgttcgccatgtgcgcgtttctttgcattgagccacatgtctttctcttcgatatcggcgcgcttctcctcgtcaagggctgcaagacgcgctttcttggcctcagcggctttgagggctgaagcgggatcgcgcgggccgtgtgctttaggtttctcacgtagttcagatagggaagggtcggcaatttggccatcagagaagacgacacggccgaaggcgtagttccctgaccctactgagtcggcgggggatcggggggatgcgaggagtgagccggagccccccggcgagaaacggcggttcatggcttcgtctttggctttttgctcttcttccttcgccttttgacggaggagcttcttgtgtgcttttcgctgttcagccttttgtcgacgcgcttcaatgagctcttgtcgatttcgagccggcttgccgttcaggccatccgcttgacgagctgcgcggagttcgtctagtcgcttttgtaacctttgtctcagctcttcaggtgtgggtttgagtggtttgggttcggaggaggaaggattggcggtgttggatggaggaacgatggatgatatagaagagctgcccgattggggattggatgtgtcgaatgccggggaattaggggcagaggatgtggagttctcttcttcgttaaactcgagggaaagcttttcggcagcagcatcttcctcaccgtcaacatcagaatcttcggcctttgaggattgaggtttctcagcagtctttgagttggcagcatcgtttgtgggctcttcagcccgtttgtcttctccttgagtttttttggcggcttcttttgcctttttcttctctttttgaatctgcttcttctgagctttcttctcctccttcagttttctgcgggcctccgcctcttctgcctttttaccagcctcttcaggactctcagaagcctcgtcttgtttctgcttcttggccacggcgtcgcccctcttcaacccctctctcggctgttctgagcctagttcgccgtcatcggatgaatctgcgtcttcgtcctcaacctcttcgtctccacccctcttacgtttgcgcgccttctcatccatcacgtcttttgctgtcttggccgagtcggggtcgagtttcgcccgcttcgcttcgcgcgcctgttccttcgtctgctttttccgcttccattggtcctatccagataattgaatcaatataattcgatcatgaaatcgtggatggggcggtaaagccagaggaaaacggaaaacaatccctgcttttgcagcaaagggtaagatattgaggtaggacgtacgctgccatcttccccgtaatagaatttcgccggaattagagaaagcagtccatcaaaggcctgtgcatggcttcgcagccgttcctgatagcaagaaaaaagttccgtcaacctcgttgctccgagaagcgcatcgagaggattgattaattctctcatactaccgtgtaaggtatcatacctcaatatcagccatactgctctttgttccaacaactggaccgggacgttgaactagtctgtactctgtatcgagtcggtcggtcgaaggagcgaaaacgcgatatgcccgcttgaaaaaaactgggtgggcttgaaatcttggcatttgcttctccactcggctgcgaggttcttcaccgcccagggccgaatagtggatttcattgtattcttctactcaatacagtggtgacatgtgaatgggtgagcagtgcgtaataatgtctcattattactcaacctgcctgtgcttacattttgcgtcaaaatatgctttctagtttcctaagggcaaccaggtttcaggttgtccctctaacttggtgcgtaccccaaggtttccactacccaagtgactcttaggtgtaggcacagtggaggcatatcatcatttcattttgggccaatgttcaagcttttgcggtatcaacagacacctaaatacaagcagtcatgctgagcgttctaaacaatctggctctggtatctaattcaaaattatgccaagttgtcaatagaaaagtacgaaacagcccgaaatttttccagaactcttttaagcagtaccgttggcttttgacttgacggcgcgcctggcacggacggcatcggcgaggtcctccaacacagtgacggtggtctcccagtcaatgcaggcatcggtgatactgacacccttcttgagaccggagggaccctcagggggaaccttctggttaccctcgttgatgttggattcaatcatgacaccaatgatggcatcctggccctcacggagttggtcagcgacctccttggcaacgagaggctggttacggtggtttttcttggagttgccatgtgagcagtcaaccatgagaacctcacgctgcttcttgccgcgaagggcttcgcgggccccctggatgctctcgcggtcgtaatttgtgcccttgtttcctccacgcataatcacgaagccgtgagggttaccggcggtcttggtaatggccgcaagaccttgcttggtgacaccaaggaagcggtgggggtgggcagcagcgccgatcgcgtcaatggcaacggtcaggttgccgtcagtgccattcttgtaaccgatggggaaactgagaccggaggcaagctcacggtgcagttgcgactcggtggtgcgggcaccaatggcaccgagggaaatcaggtcagccatgtactgcggggagatggtgtcgagcatctcgctggcaataggcatgcccatgcctgtgaggtcggcgtagagcttgcgggacacgcggagacccttgttgatctggtaggactcgtcaatatcagggtcgttgatcagacctttccatccaactgttgtgcgggg

SEQ ID NO: 4355 - DNA, 1589 bp, Emericella nidulans
gctatgattgggggctcttagcagatgctcaagatagggctcgatatcaactgcagtcggccttctcacatgccggtctagtgcctccaagcggtctcgaagacgggaactcatctcggtcattgaatctttcccagctggcccttccagtttatcgcaactccacagggacactgcggggagactgggtgcgtcgcaagctggatactaatcgcccttccctcaatacgacggccattgtcctcgagcatgagtacttcacgcatgaattcggtcagaacattaccggcaacagcggagaattctatctgaatgtccacgagggaggcggagaggaactaaaattgccccaaggccatgttcgcgagattagagcaaccttgtccgtggagactgatgattactggggccacacctggtatatctcgttatatggggtccattttcccgaaactggcggcactgttctgacgacgacgagtgagaagtttcggggtgtcttcagtctaccgcacttgacaatgacagttgactcttacaatatttcgcaccaactccttctcaaatccctttcagacaccatcgcagagaagcagaatcgcccccctacacttttcccttggtcttcgcttgtgggaacggatcaggtggaattcccgtctccaaaatgtgaacatatcgtgtacctgcaacaacatccggtagctatagaaggctacttggcagaccaggtggttattgaccaaatagaacaggaattgaggttcccaatgggcgcacccatcccttcgccaccttcaatggtcatgtccggagttgtgtactctcctgactgtggatacatcctcgagactaaaggagctcctgactttcctccaacagacgggctgtatctccagggtcctaaggtagaggagtatgcgaaatacgctgctcgcctcgtatttttgatctctgctgtgtttattggacagattatgttgcttatgcgacagatcaaagacgcctctactccttcaactcgcagtcggattagtttctatacaattgctctcatggcgtatggtgacgcattcgtgctagtcttcatcctactggagctctatccagctgtttcgtttctggtcatgacgacgctggcgttttttgcctttctttctgtcagctacattgggatgaaattcatgatagaaatatgggctattcaagcccctgaacggagagaacaggagcgtcggtcaagccccccagcatcatctacacgatctagcggactaccgcttcctgctacggcaactggtgttagagactccggggctacgccaatcatcatcttgacgcccgatcaagatccccctgccgaagaggaagaaggcacaccaacaccaaatcgttctacagtgccaacggcacaagaaacccggagtgatattggcgcaatgtatgcgcgattttacttcgtcctcttcgtgatgcttgttgtctcaatttggtcattcctctggcccaaccgattgggtgcttggtatgctcgagcactggcattcacgtatctctctttctgggtaccgcaaatatatcgcaacgtc

SEQ ID NO: 4356 - DNA, 3688 bp, Emericella nidulans
cctctactcagaaccagtcaaatggcgctcctgaaggctctcgtgatcgcaaaggcaaacaagaaagacgagtgccttcgactgaaaactctgtttatgcaagacggtggtagactggctactggaacggggagtttgggttagtgtaacgatgaatggaaatagaacggcgtgaatgttggatgggaagggatgcattgggagagtttctgcatattaggtttcgggactgccgtttttctctggactggagtttggcactgtatatttcttactattatcggctgcatttacctactccgtagcaaaggtgacatatttggtcaaatttagatacatgtcatattctgagcacagtcattccttgatggactgataggcagaggctgacagtgacagcggagtctgagcgtggatggatggcctgtcagctagtagtggagataacggtaggactccccaaggcgatggatatgaagctttagcccctgaaagcgaattggggatttgaaaaggcttctagaagtctcaaagaaggcgagcgacacgtaagatcgaacactgggaggaaagggaaaaagaaagcatgccgccacaagttacagcagaaggctcgactcaggcggtgtttttagacatgtctcatgtgaaggaggatcgaatgattgatgaaggcgcgacagtcgactggtcagaaggttgcgaggagatgaaacgcgatctgcagctctcagcctgcgaacgaaatgaatgaaaaacgtggcggccacgagctgtggtcggccatggaagccctgcaaaggtcacagtcaccttttgcagggaaaatcaatagtcaatccagtaacactggatgcaaagtgagcaagagtctcataactgatccattcgctgacttggccttgtttgccccaaaatcttgactttttcgggtgcttggctgggagtgtctatctctatccacatcacagactgctagactagtagcggcccgcctccatcaacttccccgtcgccagtcgacgaactctccttttcaaccacatctcgtttcgccctcacttcagttttctgccccttcccaaaccccgtcctcccgacaatccctctactagttctctttctctcttggctccgccgtttctccattccggtacgtacgtcaccctcgctctccagccataccttcgccggcgccgtttttcccctgcccgctccgtcggggtctcctgcacacgcccgtctgtgaactcaaacggttctttgttcagatgagagacctccaatattagcctctaacttgttatgtctaggcctggatgcggtgaatcttcagttaaaccccgccgtccgctgctccttccgcatctccgttcttttcccccggtctccgtccgtcaatcacgagcaaccccgaccgcaacccgtccgcttcagcaattcgtaccacaattcggatggaagctgtcgcaggtaacgcgaaacgacgaatctagctctgttgtataccgctttctagatgggaaactcccaggggagacaggtcgcctccgacaatgagggtaggtgtataccccggcagaccgaagctatgcaataggcattggcctgcacatctcgcatgagagggatggcgaggtttggctgacactggggcagtgaacttgaatcagtttcggctacttcgagttgtcgggaaaggtgctttcggcaaagtccgtatagtggagaaaaaggatacgggcttaacttttgctttgaagtatattcggaaagaggaaggtgcgtacttctctagacgaattttttttattctttttatcatcgctgaccggttattctcgctgcagttgtccgctcggaaagtgtacggaatattattcgagaacggcgaatgctggaacatctcaaccatccctttctttgtaatttgcgatacagcttccaggatatagagtacatgtgtgtttttacctccggtgatattcgaaccgttgctgactttacaagctacattgtggtcgatttaatgaatggtggtgatctgcgattccatatctcgcgaaaatgctttacagaagaagcagtgaggttttggctcgctgagcttggttgcgctctgagatacattcactcgcagggcatcattcatcgagatgtcaagccggacaatgtgctactagactcggaaggacacgttcaccttgcagactttgtaagttctccacatgatgtctagatatggactggctctgactcgcggcagaacgtggcgtccgactttagacctggaaagcctctcacgagtaagtcaggtacactcgcatatctcgctccggaagtgtacgagggaggaggatatttttttgaagtcgattggtggtcattgggggttacattttacgaatgcatctacaacaagagaccctttgaaggccggtctcaagacaccctcagcgagaacatcaaaagggcccaaccgaagtactacgttaccaacgccgccgtatccattccgggttgcgcgccatgtcggccttgatggagaaggaccgaagcaaacggattggcgcggttagttttgagagctttacctcacatcagtttttcgcagacatcgactttgaggcactagaacgaaaagaagtgcccccggtattccggccatccagcgacaagacgaacttcgatgctacgtatgacctggaggagctactcttggaggaagctccgctcgaagctagagcgcgaaggcagaaaccaagagctgagctgagggaggatgcgactgcgaaggagattcgcgaagatgaacttcaccgactgattgaaacaatgtttgagccctttgattacacagccgtaacctaccgcggaaatgctgctgaagcaattgcgtctgttgcgaatcctgaagattgtatccaaactgcagcttcatcaacgcattcacgacactactctcaacctgattctacgcgaggctcacctgcacgcgcggaaggatcgccgtctcgcttgacgctaccagacaatcagtcttcaattggtgtggctctagagggcacaactagccagcctctgagtcctgcgtcacagacacctcctcccgctacagctcccaacttcgctcgccctttcgtcccaccggcagcagcacgggctcgaccaacggctcgcaagaccagcaaggggggtggtgtgcaaatggttctcgaggaagcgggcagctggagtgagcttgccgatcagagtgccacccttcccgccgaagggttcgatgctagcggcaaaggaaagtctactaatagtggtatgctttccttcctgagccgcaagaagggacgtgacaggagtccgaagccgcaggaacctggtgttctgggcaaggaaggtgcacgacaaatcatcagctgatttatacgcgggatgcattcttccttaatcatcacattcgtattggtgattacttgtgcatttcgaagtcaccaatagagtccgctgagaacggaccaaggcgtgcacgggctagttggcgaatatctcggtcaagaccactggtgaccagcaatactcttcgacaatccttctcgactacatgcagcaatatggcgctgacgactatgataactctggcgtcctaaaccaattcatggccaggcagcagtggtatatcgaacccgagagt

SEQ ID NO: 4357 - DNA, 4120 bp, Emericella nidulans
taaacttattgccgtgccagaaaagctaatgcttttgttgatagaccgcgagtattaacaggagaggaagaataagaagtggaggcggcaaaactatcggcggcagtggcagcaggctccgtcgcctgggtcccgttattcgagacggacaagagagatggcaacgattcaaagcccagctccttgtagaacgccaacgagtaagagtcgctacggatctcggtgaccgtaaaatccacaacttcgctggaccggaggatgtttccctgagcatccagtgcttcagcccagagatagcggtagtgggcctcattctccgcgatcttcaacctggtttcgaaccccgtccggtgcgaagttgctagcacaagcccgttggcgttatccccttcgttattatttgtgccgcgaatcgcccagctcgccacctctgtcgcaccgttccagctggcatagaccaccagtgccccgttagcgtcctgcctcactgcgatggccggatcccaccacggaatagccacccagtccatcttatacgcgcggtagttgtccaatgcatctggtatatcatcgctatgccatggggagaactgcacgtccagcaccgtctcgccggcggagttgtgctccgtaaacgtcggacaccgccccagccgatgaagacgcttcttagattgctgtctgacggtgccagaggctgtacgctgccctgactctgcgcttgcaggttagtcggatggaggaactgctgcaggagctgtgcagttggcggcgtggcagtggtattgatggcaatgtgcaggccgcgcgaacagttggttctgcactcgccgtgggtcgtaaccttgacgtgattgtcgaaaagggtcagctgtgtctcattcgtgccggggacaaagcgggcgtgatgctgccaggcaaatgtgagtaggggttgcccaggaacagccgcggattcttcgatgaagtcgttgtggttgccacccagggtccagataatggagccggtttgcccgtcaatcaggtagattgaatgtgtatggcggacggagatgagatagttgcctgcttgagtctggcattgtcagacttcgttctttctcccccagggacccagtgagatattaggtgcatatataccttttcaatgctattgatatgatacgcatcccatccactccccatgggctcaaacgagtctagaggattgatgtgatctagcgcccgccaatcaaagagcacctcattggtctcaagatcgatttcctggaagacggcgtccaggatatcgagctccagctcatctggcagcacatagtgccatccatacttctcgctcaagacattcccacgaactcggatgtggttgacaccagtcaccaacgccgttccgttccctgtaaaggcaaactcatgcagatcggcatgatcgttgatattctgcgccgacaccttgtagacgagacggtaggtctcatcgtatgcaagaccatatccatcgcctatcccgtcgcccttgtcgcccgcccaaaaggtcaggtacttcctgccgagattctcctggatccgcgtgccgaagacgttgttgaatgttcggtttatatagactgcgctgaggtcatgcgcggctagaatcagcggcgacgagagtggcgaggactcgttaccgtcgtgccggaggaagatgtgtgagcctgcaggcgagatcgcatcggggctccagacgttgacttggaggagaggcgcatattcgctgctggactggaactcgagatgtgggcgatgccccatttcgccgtcattgtatcgctggtagttggtcgagacggagtctcctcgcactcccactccccgcagctgcgcgaatactagagcactccagcatccccagaagaaccaacgggtcattttcagggatgaatgcgccagggctgctgcatcgctgtctggaagatacgaaacacacagagagagactagatcattaatattggggatgacaaggtccggctctctcggtttggtgcgcacgcctgggagccggacgacataagttgcgtatgtctccgtttcgtgggaacagtcgcaaacaaaaacacacactccgtatccaagcccagtgcttgagcagtggatcaacgaatgatccattgattctctctcaaagtggggagctgttggcactattttgccgcgcgtcgtaatggagatacgtaagtagcagaatggatcccgccccacgtatctaaccctacaaagtagttcttccatcgtacctttcaagtggaacagtagagcagaaggcgcgacatggcctcgtccggagcgggagaagcatcatctcgtggctgacggctgggcatcgtgggtcgattcgcaatgcaccaaggcagaatagtgagatactcgagcgacctaaatcgttcgagtctctccgattcatggcttgacttgactaactctgacaaagttggactagaagcccggtggggagagcgtggtgcggcttgtctatctaccaggattctataagaccgtcagagagcgattcgagtcagtgccagtcagggcaggtcaaccttacaagaaaataggtacgcggttttctattgttaccctcgaccatgtacggtacccggtgagcatgtgccctgagttcgggcacaacagcatgtcgtgctcgtagcatgcaccatgcttagtctttcttcctagtgtcgtcaagactcatcctgcatgcaaggcctcatatttccgcaccttggcttacgaggtagtcaagactgagggagctctggagctaggcagcggtcctgcagattcagggggatgacttaattctggtagtcgtctaaccagataacagccggcacattgtcggctgctctactcatcagtggtgccgtcaacaacataaaagttatgtagctatctcaccttaccataggagcggaggccagagacccttcatagctgtgcagctccatagaggtgagaaagcaactgcctcaactttgcagcattatactacagggtgacagggcagagatgaccgatataggggcaaccgccaaaattccagaccggtaaggcagtggtacgaacagacgttagaagaacttggtattgcaaatctaggtgacgacattgcacttatatcacaggctttcgctatttttagttcgaaaatatcaccctcctcgagtctcccggcccatcagcagctgggatggccgtggagtctgtgtctacctcacagccaatcttctgaagagaacttaacgatgtcttaatatcgagatgcgcgactagagatgtagcccttggcagttgagcaattgccgacagctggtgttgaaccggctcctcgcgcttcctctttccagccccttcattcgccccgggaagcgacaggttgggattgccgggagacttgtccctaaattgaggataaccagacaaacggcgggcgagctcatcacatccacccggtatttaatgccgaaagcttgtctcgaatccatcatttcctgagagtacgataggaacactgattatattctttacaaaaactcccctccaatatacaattctaaatcatgaagcgtttcctccttctgatatacccagaatagcctaatcgtaccctgctcttgccctgtcctgtctatgctaccttacttcttcatatcatgtccatgtcaacatagttattcatttcagagcacccaatgcacagaaccagctagagtcttaagaccgccctacaagattgccgcacccctcaagtgctcgcctacgtaactggcatggcccagaactttctaaaaagaaataggcaggccaagaagacataccaaatagccataccaaaaagccatatgagaaagccattacaatagcacacatgcccgtgaccttcttctagcagttgttgacttgccacaatgcccagcaaacacgacagtcacactgggctgagtgtgatgcctattaaaagttgatttacctaaattcgaccgcttcagtgtcaatatctaaacatgtcaacagtctgagcttggcaaaatggttactgacggagggtataaacatcttgatatccggctttgatatagata

SEQ ID NO: 4358 - DNA, 3571 bp, Emericella nidulans
  unsure (1)..(3571): unsure at all n locations
gtataggcctccacatgaagttgcaccgaagaacgaaacgcagagggaggagttccctacacggaacctaggttttagatactcacatcctgtcgctccctcccacagcacggttggtgtccggggtgttgtcgagggctccacgttccatgatcttgcgacgctggctggagatagcaccaggcttggcggcaccagaggtagttagaggcatagtcgcaccctggcgacgtgcctgctcctcggcctccttgtccttcttggcgtcggacatcatcgcagcgttcttctggtacttgtaaacggtccagtcaaaaacgtagtcgtattggaacgattcgcggacaaacaaatcacggaatatcttgcggaggtaggagtagtccggcttgtcgtcgaaacgcaaggagcgagtgtagttgaggtagatggagaactcatttgggaatccacggcagagaacctcagtgggggtcgtcatctttttctccataatacggtcgtacttctgcttcttggtagcagctttaagaccttgccaggggagggtgccacggcagaagtacagcataacgtaacctagggactccatgtcatcccggcgggactgctccacacccagatgggtgttgatactggcgtagcgggccgttccggtcaagttcttgttctcgcggtagggaatgtggaagtgcgtcttcgggtcgcggtacttcttggccagaccgaaatcaatgacgttgacctggtttccgcgcttaccgatacccatcaggaagttgtcgggcttgatatcacggtggatgaaggacttcgcgtggatgtactcaatacgggagataagttggtcggcaaggagaagcacggtcttgagggaaaatttccggttgcaaaagttgaagagatcctccaaactgggtccgaggagatcgatcaccatggcgttgtaatcacattcagtaccgaaccagcgaacaaatggaataccaacccccccggcgagagacttgtagacacgggcttcatattcgagttgaggatgtttagccttgacgctttcgagcttgatggcaatttcctcgccagaaatgatgttggtacctttacacaggttagtaatatcctcacatccgaccatccgctgacaaacgcaccgagatagatgtcaccgaaactaccgcttccgatcttacggccaatgcggtatttattaccgacacgcaaatcctgagtcgagttagttttcatcagatattgccactcagctctgacaggggaaaaaactcaccatggtcgtcatcttgctagaatacaagctcaaagagctgctggaaaatgtggcaagttagaatatttcgactgggtgtcgatcgacaagtgagtaggaaatggacaagagaaaaggtgcaacagtcaaggcttttgttgggaagtcaggcagacaagtcacaacaaagagaggctgagccttctgatttgaagagacttggcaagaaggtagcaaggctagaacctcctaggaaggcgttggaggccgacagaataatgggagaccatgaagagaaggaagggtaccagggggtgataataagatatacataccttgataaaggaaacgacgttgataggaaagggtgagatagtgtggatgtccccgaccgaaaaggcggcgagggaaaaaggggatttcagctgagccttggggcggctaagaacacgaaaaacgaggcgaaaagactgccaaagcagtgagagagaggaaaatgcaaatgtgagaagaatagtcaaaagttgaagaaacaaggacagagcccttgctatcgggggaaggtgggaggggaggaaggagatcgaggaaagaggagagaaaagagaagagtgctgaggtgaggtgaggtgagggaatttggagggcgggagcagatggctagtactgtagcagtattcaccccctctctactctgagtatggctttgatacctacgcccccaacaccattaacccagtctttccactcaatatttcattctaatcacactattatctctactattcacatcggacatctgcataacagcataatgataagatcactttttcacctccatcaaccaagtgcagcgtgcggcaaagtacagaggtggtggtggcgtcgcgggaaacccgccatgtcaaaaggcgtgatgacctccagccgagccagtcgcgaatgcagtacccggctgggatctcagcacctgatccagacgccaaatcatactatctcaggctcctgctctgtagagacgccgtactccattctctgtacctccccgcaagtatcaaaatcagctgacccctcatcacctgctatgtatactcttgagtactcttcgtattgtaaataatacaatctgatacaccgcattactcagatacatcttagcgctttgtgcccaacaccaacctcgcctttatcaaccctggcaccacgtctcaaagattgactgacacgatttataaataacccaatagccatgcatacccagttcatgaggagacgaacccatgccggtcctaccctgaaacccaatgacctggtagatctgtcgcggtggcttggtaaggccagagctttgcagactcaccgctggtctgctgctgaaatgatggacgttgatcccacttgaatggctccatctctggttcggcttactacattcatgtctatcttcataccaggactaattgaagtagtatagcgtgaggctggcgctgtcaccgtatctttctgcattcttagtttgctctgttaaatcggctagggtgtaagctctatatttaggcacgtaaaaccaagcagcaaactgctcataacagtccttgagacgcgctacaactgtaagcaagtctgctctccagactaagagctcatgccccgtgcatatttcagcaagaatattcaggtacctagtagaaagccgcggccccatacgtacgtcacccgcagcaactacaaaatggacgccgaatgcgtggccattccagattgaaataagttatcgaatatggcccgcgacataaaaaagaaaaaggctggcgtggggtgaggaattggactaccggtaatggcgtgttgggcagtggtccaggcagctacaaagaagctggactccagcagaaaacgttcattgtcaccgctaatcaaccaaatggaccagacagggcatcgtcaattcgaacaaagtaataatagcacattccgggcaaggaaaaatatgaaatgggtataaagaagaatgatgagggaaatggaaagagggaacattgcaaacacaggcagaaaacatatagatgacaagccttagctcatcacacagtaatacaaagtagtaaaattaacaaagacacagggatttgcagcagatgaataggtcgcaagaggctcaaagaccaatcaacgtgattagacatcatgatttaaactcccaatcaaatatagacangtcatgactgctccccgagctccttagatcatattcgctgccgctagcccttcagcagcagtgcgaggcttgccttctacggagag

SEQ ID NO: 4359 - DNA, 1999 bp, Emericella nidulans
atacaaatcctgaggcttatgctgttggaggggacgattcttttttggtcgaagaaacgcccggcccaatcactgagcaaatatctccacaggagaaagagccgagttccatggaagctaccccagaaatcgttcctaagaggattgaattaaccgaagcccaggaacccgcttcgactcaggcagaggtgaatcaagaggttctcacagagactggactctccaagaaagccaagaagaaaaagaagaaggcggccaagtccattgaacggagtcaagacgctgctgtcgagtcagccaccgctttagatcagactttgaaggacacgcaggagtctatcgtggacaaagaaccaggcgctctcgaaacaggagccgtggtcgtctctgaagataagccagttgaagagccagctgtgttaacggaagatgtttcttctgggcgtggagttgctgacctctctgagcctgtcgaaaccgggtccgtagcagaacagccagctgaagtcctgcagcggcgcaccccagacctagaagagcaaaacagataccctaccgctgacggtgcggttcgtcccattgaagctgaagctgagactgcccacgagtccaacgagccgaaacaagaagagaaagatgagctcccgcagccacagacagaggatatcccgctctctcgtaaagccagtaagaagaagaagaaaaataagcgcaagagcactgctgaagcagaacctctgcctgaagcagctagtgcatctttgcctgaaacgtcagagcaagctgggcttggtcctgaagcatctgtcttaggcgatgaaaagtccaattcagaagcgcaggaagtgaatttccgcgacgacatcgacatcttaacggatgccgttgagggcgaaagggggcccaatcctaagcccgaaacaaagcccaaagacgctaccaccccactcgaaacaagcggtcaagtaccaccgcccgacgacaacaaacaagtacccgaagcaggtaccgaacaacaggcaaccgacgcccaagccgtcgatactcaggtggcgattaaagacgaaacagttccaagtcacctagtggagatttcagaaaccaatgacggccaaccacatgtgcctgaaaaagcgactatcgagctcgacgctggggggcccgcgtcaactgggaagaagagcaagaagaagaacaaaaagaagcagggcgtatcttcagtattcgaagaggccttgtcctccgaagttgctggtgcccccggaaccgattttcaagacccaacaccggtcatagaaagctcccctgatgtcgttgttgagactgacgagcttgttggttctgaaggaattccagtagtagcaactcaagatcctgttgaggagacgtcgcgcgacgtagagcttccggccgaagccgatggtgctctccccgaagacctggctgacttcgaggctgccccagtgacagatgttcagagaaaggctgagaagaagcgccaatcccttgcgcctgatgtgccggaaccagagacgcaaacctgcgagtttgatacggagaaaaagttgcttgatgtccctgcccaggatgatcagcagacacccgagacccccgaaccagaggttgagcagacggatgcgataacgccagctctggagagcccggtagatgagattaaagaacttcctgtgcaagccgatgagcaagtcgcagaaaaggatggtgagcagattgacgacgaagcacccgcaattcatgtccccactgtggtgggcgagccaataactacagaggccgttgagcccgaactagaactttcacaggacagagctacggacctcgccattgagggactcgacacaaccaaggcacagtcgactctagaattgcaagaggataagactgccgagaaagagacccctgatgtggcagagcagccaactgaacctgctcgtcaggacgtcgccacttgagggcaatacaacagtgactgagccga

SEQ ID NO: 4360 - DNA, 4218 bp, Emericella nidulans
ctgtgtctacggcaattgttatagcagttctcgacaggttccgcaggcgaagaacccgataagacaatcggcgtgctggaaggggtagttaatgaaaaatcactgggttcgttctagttagattcgcaatacagtcgtttaatgctgttggaatgtgaaggaagatgttgggaggggggttctgcttcagccatattgacttctatttttaagaccgccgcgttattcctaagctttgtatttctaagctcttcccaaggttcatgattcagcagagtctgaactggtctttctcttcctaacctattgttggattctttgctctttgatgtgtccggctttgcaaataggtttcgcggttgcttctttcactttataatccaaacttttattatagccttcttgttgacttatattgacatttttaatctttgctaaacctacatcttgcaatatttttctttccttctgccacgcggtcagcttgcgggcataatactcattccttccaatctccccttttacaactacgcttacaaccccagctgtgagtaataaaaattatctatcaattcactcgcatgatttcgcattcttgagactgttcactcttctctttgctgtatttcgacgggttcaacgagctctcttgagatgatgcggagttctgtagggctccattaaatgcttaagagatccatattcattgtctgtggcttttcattcttcttaatgggacagtactatcttgtcgatagagaggtactacgctgacgagatctgagagatgaaccgacccaacccgggttcgattcaaatagtatctaggcgaacaagggataaatagacggttgaaaaatactatatgttcaagtaattgcaaactgcagatataccaagtctttaccacatcagagtattccttgattgttttctctttctgggttggtttttatgactaagattagtctacgtgataagatatatccgctatagtatatgacagacgagtttgataaaaaatggctcagtgggtatagagaatgtacagagaagacaacgactaacggcgggatagcgtgcgtttctaagggagactcttcgttgaccttgatgggtttactagcattgagaagttggatgtctctgagcttcgtcacgatacgacgtcgggcaactccattaccaacggacaaggacaatgatgtgttctattccttttgaaggcctgcaaaggccctgctacaactcaagtacatggcaaggtctccgaaagataagtaccggaggaattgaaacgacggatcttctatccgatgactcaaatagggttgaagaggttaaaggtgacacattctccctcgagagccttctactaacaaatcaacatgctgtatgcggctgaatcagtgcaatccttcgcagatgagaactaaccggctgcaagacagtgtgacgtacgaaagatagacggaagaaactagcttatgtaggcgtagtacgaaaggtccagttctaccagattaaagagacattgaatttgggcccgttacggtctggggaggccagggtacgcagggcagtttggcaaggcaatccttactgaggaacaaggctacacctactatcccacgtaccgcaagcactcccgacatcatagacaacgaccgtaagagcagccttaggcggcgcgaatccacccttgcaaacttgtagcaacgaccccattgacttactagctacgaatcaaaccaaaaacgaaacgcgggcacaaccgcgcactgtccattgaaattcccttagccaacaatttcttgcaaggcattgaaccctggcaccgagagattggcccggctcttcccataccctaacttacttgtatcaatctgtacatattttgtatatagtaagtgaataagcagcgtaaatatgcttactgggcaaccagttaatgacagtctggttactaagcgttcactgctgccgaatatatagcttgcggaaatgcaggtgacctgatagcagcctgatagcatgcgaacccaatcccaagctatattctacttcctcaccctcacgacttgttcatcatggaggataatgctttagagagcgctgttcccagcgctgaaggatgccggacagcgtacgaaaagggttccgcatctggtcaagcctttataggcgtgctatctggctttccctacacctgcttccagttccagcaagcacttctacaccagccttatttcccggatgacctggatctggagcttacttatgataatatctctgtctctgggtcatcaatctggttaagatcgcaagaaaagttcagaagccctgctacatacctccgctggaacgacatcttcatatcccagtctcaattagaacttcgattcctatcagtgcctctgcagacctgggccagagtcttcataattggttcaaaaacgagagaacccacctcactgtgctggtatttccatggagctatattttctctgcgcgttgggctggacttatgcccaaagccacactcgcatatacggatagcaaggcatacgacagcgacaaacccgaagaagacgattctgctatggtaaatataggtgtcggtgacgatgacgcagtgagatggtggctgctattatggctccaatagaaggctgggaagcctacatagccattggtaaagataaatttcgatctccctggtcaatatctcttccggcagacctcgacctttcctatcgcaaaaacccactattcgccctcagatacagccgtattagctgcgactgcctttcgtttcctaaacgattactgtgccctgcatgacgttgtagatcaggcctatgcagcactgtcaatcgtgttacttcttccactcttgcgcgacagtggagaaaacattgttttgccgagaccaaaattcaggtacaaataaaggcataaactgagatcatcaagatgaaatgtgcagcttaatcttgtttgggtacgggagactcattacctggacaaacttctcaccttgagctgcaatactagagggatacgttccctgttgtcaagtgtcttttacgagcctggcatagcttgcaatattgtaagcccatggctgcaagccatgtttgctgttgtgaactgttttaaggacaaccgcattctcgcctacatgctgatgagttgagtcccgcacctcgcctttttatggctgtggggagcaatagtgggtatccacaaaagagtgctgcaggacggtcgatttggcctgatccccacagagccacatgctgcaatgtggtcgagaaccatacagtcattcatgcaagaacctgttcatccagcagcagataatcatatcctgcgttctgacgaatgtcgacttctgtatcttgccaggaggagcatcatactcactggcctgtgtgtcaatggaaactggttggtgccaccgctcttaaagtcactgaaattaacgtccggctgcatgcaaactgtattgagcatggtcctcaatttgcaggcttcaagtggacttgccgaaatgaaagggtagcgcatcaaatgtctgagcccgcacttgcaccaacattgctgccggcatacccagtggtgccagacatagacatcatgatcaggtatgagtcttttgacatattgaggagaatgtgtcaaaaaaatgcaacaagaagcatcttctgttggctgcgagcggaagggtgtcctccaaacgagaagaaaagacacgatggattgacattgatgattcagatgattctgaagacgggcggttgatagacaaagattcgagaaaaagtcatgaggctttaagcgctcatgtggaaagcttgatagatcatactgtcagtgagatggctgatgacccttgattaatatcggcataatttattctttgctacgagacctgtcaatcttacgttgatccttaatatcagatagccactctgccaagtcgagactgtcaacgatccctgataaagcattctaaactagccatcgtcattaacaagaacagtcatcagcatttaacaccacgacccggtgggtctttgtgagcccagtactctgatgaaagtatatgtacagaagacttcagcggcgctatcgagggaataaacgcatacactaacatattataggcgaaaacgaggaccggcccaacgtgcttgtcttacaatgcataac

SEQ ID NO: 4361 - DNA, 1280 bp, Emericella nidulans
  unsure (1)..(1280): unsure at all n locations
tttcgaggaagttcttcctgagttgcccgacaaccctgttctcccgccagcagagcttcctgcataggatggtgttatgggctcctcgtatgaggtacactcttctcagggctcggccattcagagccctcgtagaagcggatgctggcttaatacggtcactatttttatccaaacgccagatatatttctccttaacaaccgcttcttgtatatatggcacgatatggcctacaaaaaaaatattgtccccttcttaatggatatatgaactgcgcagagctcctatacggacttgcgcctgttccgtctcgcgtgctatccgtggcctcgtaacttagataaaattggggtgaatatctttcagtactcaggaaagacaccgtatacacattcagaccttgagcatcttgaatctacgaagaacgatcgcggcgatggggcatctgcccccaaaagacctggccagggcagcgccggatgcttctcccactcatttccaacatatattgtccatagttgctgcttcaaacctgtatctagctagttttaggtagtttggtttaggcagcactgggcaggaacaacaaacccaggaacctcctttcgatcttctacaggcgcagccaaaacagacattggagttgacgtcaagacctcttgaaacctcttcccaaccagaaggggtgcctggctcatttccggaaggcacacctgtctctcgatctgctgcctccctatctgcccctcctatattcagttccctaacaacgcagccatatattccaccacccaacctctttgatcagcctcttgtttatcgtcaagcatcagctaggggtcaagaacctgttagaagatcattacatcgacagtcccaaccagacctatctcggcccgtcgagccgccgatccctgaacaaccaggacctatccttcgtccgtcatcggaagggccatctccagatcctctccaagtggatatgggctcccgaaatgagcctgaacctggttcaaggccaccgaatcccgtccaagcaagctcggggcctcctgatccagcaggatcggctgacttgttcggcaacctgcgcgccttgcttcgagaggaactccaagggcacgcccgcgatgctgctgaacgacaaaacggcgttcgagaccgctattcgtcaggattttgaacgattntcaagggagatacagcgtcagatgcataacccagaccagcaccacatcgaacaccgncagcaggatgtccatatgtcagggggaaacga

SEQ ID NO: 4362 - DNA, 2613 bp, Emericella nidulans
catgcatcactatcatccgcattcgcacctccattccacctctattcgatcagtatacactcccgaacctccccggtcaagctttcttgaaaaccatgcactcaagagtcgcaagcgtcactcagactgcctactcaatagcgatatccgcacagtgcaaataaatctgcggcgtctggaacgagttccacctgaaccgcagcagcgtatgttccgacgtatagtctgggatcttgatcttcttggtcaccgtataccctccggcaattgtcgtcttgcacgagttcagctccgcgccatccaccccctgacagcctctatcgctatccgcctcgaaggcattgcacgtgaaccagtcattccggtagcaagcctcgccctctccgcagtcggggctatactcgcactcctgcccgtcgacgtctccacacttcagctcaccctgaagaaaacagtcttcagctgcctgcttctcctcctcggtgggcaagtaatcggggtccaggaacttgtcgaccagttcctggtcctggcagatcccgtacgtgaacatgcccccgtggtcgccgttgttatcgacgcaccactgcacctcgacaatatcgccggccttgtaggtgaccacgggctcgttgccccagttatcaccgggctggttgtagtcgacgctgacgcgggcgttgtaaccgcaggggccgctgcggccgacttgcgcctctgtcacgttgggccacgcatcgacgggctcgaggatcgagcattcagggcaggtatcaatcccggcctatgagcgttcagtgttcagtgttcagtgtctacctccctacaaactatagcaggggatcgctgtgcatgcctacctcgaagcccagacgggtgcggctggcgggcacggtcaggtagccgtggccatgcacggtggcgagcagggtgcttgctgaaatagcgaagaaggccttcatgatgagttgctgtgctgcttgtctgtagtcctgtttgtcgtgcgagtctcaagccatatttatacccgtaagagcccctaaacttgcccatgaggtctctattagacgtcaccatgtgccttgatgactgtctatcgaaatcgtccaccattggctcatactccgagtctcctatgcagatccaatctaaatctcttggtatccccggactgcggggtggattcttcagcgagccaggctgccttgctagctcaaggcaggtaccgacagggcacgggcaatcctcggacaaactagtaggacgggcaagtatctataaatatgaaacggagggttacatcaagcctcagccctagcctgctgtcttcgtcactttacggcgacgatctctctagcctggccgactttatattgcgatttgcgctgtcaataacagtgatctgccttcaaacaagaatccagcagacgcttctggttgccggcaattaagccgggagatcaacggccgtcttttctgtttgtatggtcgactctgtccgatatatcgcctctctccaccgtctcgatggccggttattctcctgatctcactgtgaatccgctctctctccgagtatctctgtctgccgcacttcacgttgatctgcatcaagtctcgtcttgctcaaatagcaacccacaatacatacctgaagcagccaagtttaggacattggcaggtcagctctccagcctagcatggtcagcatctgtttgttcgccgtcatgttgcttttggaacgctaaggtcggttgtttgtatgtgcggtcaaattctgcttcaatcctgcataacttgcaccctacctatccctaacacatatcttgagaaggtagcatagtgtctactaaaaatatgccaccgacagctacgcttatctacgctagctcgtccgccacggcgtatccaagcattggatagattcgctctaggctcggactggaatgatcccgggcacttccagggctcttggtgtttctgatcctagtcgcacctgcaaatgaagcaattgtgccacttcagcagcctaacctgcttgtacggaagcgtttcttttgattcgcatcatcaaagacgtatcttgcttttgtctctacgcagtgggcggaatgtaccccctaacattcaccatgccggatacttccacgctattaatcctatcaaagagggaccgtcccggctaagtacgtatcagagcatcactaaccagctctggaggccttaactttcaggataattcatatcgccactaaaccggggtcgccgttcacatgtctacgactgtctagccataacatgatctcatctctccggccctcgtgtattgtagcataggatccagcccccaggtacaggtagccgattgcaccattctagcagcgtacgtcggacagaggctacccaaattttttaaatattttttttgtttggactgaggatctagagcatccctgtggccaccgtgcattcattagctagctaggagtagcgagaggaaaaaacctcgaaacttcgattcgttctaatctctgagagactgatagttcaacaactatgggattatttacgagaccagcgaatcagggtcttatatgttacccgaattctccg

SEQ ID NO: 4363 - DNA, 4830 bp, Emericella nidulans
aggcccaacggcatgagatcaagccggaaacgcattgaaacccggatgaccgaaacggcaattgttttccccacagtgccagtcgaacggccgagatttagggtccactgatatacacccattgttccaggagaagaggatgttgacaccgcaagcatggtgagctaaattagccttaccagataggcagctgctataactaccaacatgcatgttctccacagttttcagcccgggctgattggcgggccagggattgtcgcgtggcgctaatgcgagaccctgtaacgatttgcagttaggccggctaggcgaagagcctgatctgctgtaagcaatagcggtgccatcggatggccattacacagtccgttgacatataacgtacgacatgatcggatagaccggatagacgctgcgccaagggagtcaagccagtacctacccttgcacactgatccagaatctgctccagcatacaaagtccactagcaattccagcgctgcatctctagtcttgcgctgtcgcaggacagccagcaaggacagcactgtcgcgccggtcctagcagacgagcagtcaccggcgcagctacacaaatctccaaaacagcaactatagtggctttcttcgtgcaaatgtcacagcaaacataagttgctcagcctgactgatcagtgcacaccgtcagttcagcataaaaggtacgggctccttccggcctggcccaggggtcgtgtgggggcgggacggcaagatttacctttttttgacaagccatcacacgagacggcctagatgagtggctcctggtgttttgaggcgttgaaccgtggcgactaggcagtggatacacctggaagcaagaaagccaggatgtagtccggtctcaggatgctatctatggggaaacctccggatctctaaatcctgcggtctgatgatatgaccgcgcccggacctagagactgaaaagaaaactaagtatctggtgagatttgatccccgcccacgtgctgaagactgcaacacttatgtgggtctattgttttgcttgcacgcttcatttttcatataccccgctgccgcgcatatgccctaggtcttccgcatgcaggctcaagaaccgccacgtttggcagcaaggcttgctcgcttagcataatcatatgcgctaatgctaggagcgcatattactgccaccctgaggtcctcatggctcctggtaccattggcagggctgccaccccgaaacgtgccgctccgaagtcgaaccttggatcttcttgctagtgggcccacgggcgaccgcccactggctatgccgcgagagctgctagctttgattattgggctaaccgaggtcattactggtggtctgtattggactgttcgagtttaatggcccagtgggccgataccattggcccctcactgatgccgaggggcaccctacatgattaaactctcaccaccagcagtcttcttgcgcccctgagcagtgtttaatatattcttaccatattctaaccatcttctcaccttcagacgttcatagcgactctttagaaatgccgaccacgcaaacgatccgtgtcccccatctgggcggcatctcagccggctacgccctgtccggcgacaagtacgacgcctccaagccgacctgcgtgctgatcaactccatgtgcatgacgaccgcgctgtacaatgaccagttcgaggatgcgagcttgacctcggccgtcaatctgctcgcaatcgagccactgggccacgggtccaccagctgtgcgactgagcacttcacctactgggacagtgccatcatggccctgcaggtgctcgacgcactcgggatccaaaatgcgttcgccctgggcacgagccagggaggatggatcgtgacgaggatggccctgttggcgccagagcgtgtacgttgggccccatcgcggatctgtggtccttgcccaggcgcaagcactttggcgggacactcgagagctaatagaagaacaggtgcttggcctcatccttttgggcacctccatggactatgagtctgtggactccaggagcaaaggatgctgggatcctctcccgctgctaaagcccttcttcgatggctggaccagtgacgccccgacccctgatttcgtggtcgaggagacctggtgcaagatggtcggcgccgtaggattcggcacatttgctaccgaggagcgagtgaacttctggacgaagacactgcaagaggtgtaccggggcgatgaaggccgcaagaaagtgcgcatggcgctgacgtgtctcctcgagcgagatgggttactattgaggctggttgatatcaaatgtccagtctactggctgcaggtacgcaatccgtcgcttaaattcgaatcatagcggttaggctgacagtcttagggcacggatgatacaccgtttgccacaacagtgccggcagagcagattaagctcttcacccggtctaaagaagccaagctggaaattatcgagggcggcgcgcactacctgaatgctactcacccaaagcaagttgacgaggctatcttggagctggtcaagaagtacgccgtctaatgagtggttagtgagtagatgagcaatatcatgcttccacatctaggaatctccgaatagagatgcggtaggtggatgataatctcgctatataatgtacaagaaaatggcctgcttctgcatggtgtactcgaagtaggcatatagtacgctagcgtatcagatataaaaatccggtggctggaaaatatatccccagagcctatttatagccgcgtcgacaagacccaaatgcagggtccaagcggccagggccgccatgactcgccattcagccgcctgcttgatgcctgaaacaaatcttacgccacggtagggcccaaggctgagcatgccctatgctatagtctctttatttgaaacctctgctttttaaaaccaagacccattgatttcagtaccgattatgcctctttatgcctcgaatatgctctggctcaagatagcccaccggttgtccggttgattgtaacaacacctctgacacaaactttttctggcggattgaaattttacttaaggcccgatttaaacaacttaaagggcttaataacccgttgttactattaatgacgcaggccgcagtcaacccgggctctttctggctgagtcggaaattccctgcgccaacgtaattgtaggcaaaaccgacagttcaatgggaagggaaacggcaccacttgttctgtctggaaaaagtatttggctgatcttctcatcaagcttatgtattgactcggtgtttgacaagctctgtcgttcgagtgcagcttcgtgaccttttttcgcagcagaagctctaaaactctccgcgtctcttactgttacgttcttaggcttcttcgtgaactatacgggctgcattactcaagcgagattcgaatttgaagccgaaatctcgtgagtatacgcgtccttctaatagttacaacatatagagtgcaacgatcaggggtctctagcctgtccttggctaaaaaagcccaatagatgttagcttcaccataaaataagcggcccgctgacggtatgagcagggtattacttagaaatcaattcggatagcaagaccgaattcatgcacaagaattttcaagaccattggtgtccgataccaccgtttttaacccgttgagggcttgattctgtgaccttgcttgcagttttcataattctgtccagactgttccgaatggtgccagacatcaatgctcttcgatgttccctgccccttcgcttggtgcaggctaagctgagggtaaacggcggcggtaaactgtccagactggaagagcagaactatctggtttccacagtagtatagtttcccagaacctccagtatccctcactaccaagatgtgctgagcaagataaccctgcgtagccacttgcttttccgtggtagtactccgattagttaccgcatgggacccgactataacttatcctcttcctttagaccctggagtgacactgagacgagaaaagccaaatgagtactctgacagctggtgttctatagtaaatcacaagcattaaatcatggagttgcgaaggggtatgctgttactgctgcattatggatgtctagcttattcacttttcgtcaacaccaagcgactgacaacagagcatattttatggaggcgagcctaattcattcactccatcccgatgtgctccaagacagtcagcatcttttagaaataattaacacttgcatattgaattttgttccaggacacctactcaacgagtccgccaccaaactgccatgttagccacgaattctctactttcacaagctctctctactgtcaagacctttaccactaacaatggccagttatatgcctcttgctgtctatatccacgacggcgagagccatcgtacctacactactacccctttcaacgtgcgcaacaccgtcaccaacagcaataatccaaacagtgtcaatggcaacattacccggaacattgcctacaatataacgaacaccattatgcacgtcaatgcctctaccagcggccttgtccctgcaacccaacacttcctcgacgaccgaacccgccgcatccaccagcaagtccgcgctctgtcccccttccccggcatgttcgaacatggccacgggattcacgagtcccctgatggcaatttacgccctgctcagggctggatttgtggcttcatcgacgacaaagtgacaaatttcg

SEQ ID NO: 4364 - DNA, 3140 bp, Emericella nidulans
cgaacaaccactattgacgaactttattttttccatgattgtttttaccttcgacattttccacattcctcgcggtgggtttgtatttactcgatgtggctctttccgttgtccacggccgccaggattgttcctttgcggccagttcacgagctcgcagtggcttggaggggttaagggcatatttaccatcttgcacttctgtcggcgaaaggagttctaggaacgtgatgggggactgtggtttctcaccgtatgcagatagaatctgttgtaaatatctggcctcattccttgctctaaatttacccggagcctcttgcagcttccaagcatcggcgcaaacttgggcttccagctagtaattgggttcgactggtattaccaatattacacctgaccggcttcatactatactgagataggtaatatatttcaatacatgtcttaccaccacgtgcctgttactgctttggtgattcgaatttttctgcccctttttagtaaattagggaaggcattgatatcgacaagcttttttttttcttcctgctgtttcccaaggctactcgatatccctcattgccgctgaactagattgcgactatttttccctgaaccggaagacgagccggcaaacgcgagcagctccagcggctcccgtcactcttcttttacgttccgtcatcttcaccagctatccccccacgcttcgaccaactcacgccttccttcgggcctccctcgttctccaattaccctcctaaacactcctatatcccgctacctaccgacagaagttgagcagtgctccctcagtccaacatcatgtcttctccgctctccaacagcaaacgtaagcgcgccgactcccaacacttgtccacagcagatatcgcaaaatcatcaactaccgatctcttgcaaccatcgtcacgcgatgcttccggtgaagagggagacgagtcaactggcccaattatttctccggtcaaggcttcgaacaatccgcctccgaaacgggcgcggaaggcttccgtgagcgaaggacaaagtggtgatgcgggaaaggacacttcaattagcaaggaggatcctggcgagccatccgaaaccacaccggccagtagtgacattgaaacacacaccaaaactcggcctggattgcacttaaatacgaagcccgatgaagagttgatgaaaccaccagtgctaggcaaactgcaggatcctgctggtggatataaaaccaatccgccacctgtgggccgtccggtgcgagtatatgctgacggagtctttgatttgtttcacgtggggtgcgtatatagcctagcattttgacttgggataagtcggctccattggtacatgctaattcgttttcgacagtcatatgcgacagcttgagcaagccaagaaggctttccctgacgtttaccttatagttggggtgaccggagataaggagactcacgagcggaaaggtcttacagttctaagcggcgcagagcgagccgagagtgttcgtcactgcaaatgggttgacgaggttttcccaaactgcccgtggattgttactccagaattcatggaagagcataagattgactatgttgcgcacgacgacttgccgtacggggccgcggagggagacgatatatatgcccccatcaaggcccaaggaaagttcctggttactcaacggacggaaggtgtgagtactacgggtgttattacaaggtttgtttgtcttcgtccacccgtaatttccgtactgacgtttgtagaattgttcgcgactacgaccgttacatctctcgacaattcaaacgtggtgcatcgagacaggaactaaatgtttcatggctgaagaagaacgaattggagatcaagcggcacgtgtcggagctccgcgacagcatcatgaccaattggacgaacactggccaggaactgagtcgagagctgcgccaactgtggaactccagacctaatagtccagctcctagcacgaggaccagtatggactggggaagctcgcgcggggttgttagtcctacagctggtggtaagtcacatgtctcccgcgtggaagcactgggtcgcacggaaagtatcactgggagggagccggatttcgcccacaggctatagcttagggttaatcgggggcgtcagggcatgggtatgttttcccgcatgcgctttagtcacccagtgccattaacatataacagatgcgcagtcgtcgatctctcctagaaagccgaggccagtcaccagccagtgaagaagaacacgagtctgaactggaacgcagcaacggtgagggacccgccgaacctaagcggtaaactggcagtccatcggatgtgtcgaaccggcgaggttacattcatgatcttcatcttcgaggcaatcttaggtcatatcggcacataagcaagcgctccggtaccgctcatggtataccagggcttatctttctttcatctccgtttatatccaacatcctctcgattaatgacatacggatgtccagactggcgggggaaccatattcttgatattcaactgcatgaaaccgacatttgcatctctgtacaacactcaaaaggacaagcatgaggggaaacagcacgagcggaaattctgattccacgaaattgatattagtatatgcgcgcatgggattcggacgaaattgaaggctccctttccgtccgtgttttcatcctcgtatcgataatttactttatgctgggaaacatggctctttgtaaaaagataatagtaatagatctgaatgttatcttcagcatagagttatatgtcgtgaattataagtcaatgctagaagggtcgctacgaactcaatatgggttgaaatattatgatcaatggcatgagtctcagatggcgggaaaggaacgaatcattagtgcttgcctcgaatatattacaaactatgtgctttgctctctgttctaaaccgagcgcccctgtcagtctagatgaatgaacgtagtctagagtaagcccaaactgcaagctattgataaaacctcactgagtaaaagtgctcaacgaaaatcacagggtatcaataataaagaaactaagagttcacaaattca

SEQ ID NO: 4365 - DNA, 1597 bp, Emericella nidulans
actgagcaggtacaacttactaaccaaatgtaaccgagaaacacgcttttacttcttgcctttttttgccttcctttcccttttttgctgttttttcctttttattttttttttgttatctgtgaattgccttatcaaagacaccgggacggtgaatgaatccgtacaattgttatgacctcatcctcgtcggccgaacccgcgtcgatcccccgttcggtgttcctcccttgctccagtcccgacctgccgtactgccgagccttatatctgcgtcattcctaatgattttctgcgcctataaccaaacctctcctcgccaccactccccaatccaacccatcttgaaccaccaacaaaatccgtatacgcacaagaatgcaaccactgctgaacttcctcatcatccttatcttctcgcaattaacagcaagctttgccccctgcgtcgaccaatgcataaacaataacaacagcccctcatggtgccagggcgacgaactaggccgcaaaggcacccaatgtctctgccgccatctcgagtctacatcgttgattgagtgcatacgaaactgcagtcccagcgaccagtgggactttgcaggggggttgccccagcattgtcgtgacgggctgtttcccgatgcgcgggaaggggagggggatggtagcggcgcggacagccttattctgggttcgggcccatctctgcgggtactttgtggcttgggagctgtggctttcaccttcgtcttctcatgaagtgcattgacgactggaagggtctaaaagttagtccattgacattcttctatccaagttcgacctgtaggtaatttgccgctttatccctgcaatgaaatatgattgtctgtggtgatagagagtgctgatccttggggggaatataggtatacatggcagacggtttggagacggatcaccagtgtataggtattgtacgatactatccataagtccattgctcaaaaactgtctgcatgtcacgggctagccgagactgagaaggtcgtaaatgacattctttcgttgaagacaatgaaagaatgattgtgaatgctataaaagtgcaaggatcttgggcagccaaggcccagatagtcgcacccataagacgtaaatatcagcaggaataagcagaagcgagccgtcaaatagcagactgggccaagagctccaggattatctgatgactttccctgctcagccctgtccagttggagccttgacctctaacctgcaattagaacgctcgtcttcttggccatatgggtccatctgctggctttctggcagcggccacccgttatatcattcaatctgttactctagtttccgagatacttggcaactccacagtgccgtagaaggttaaacaaatggctcagagcgggttccactatctgtaactggcagactagtgctgaccggactcgagcagctgaagtcttcagaggggctgtcagatcagaaaatgctcatccatttaaccacctcctcccaaccaaaaagagaggttaaagaaaaacaaaaaatcgcaacatttctcgttcaactatcaactccggtaatcatg

SEQ ID NO: 4366 - DNA, 2632 bp, Emericella nidulans
gagaaagccctactcagctgcaaatcctgactgctgtcgtgaagctgttcctgatcgccctgataaggctcaagggctagtgcagaaagttcttcaggcggcaacggcggagaacgacaaccccgatgtccgtgaccgagcctatgtctactggcgcttattatcaaataccagtgacccagatgctgctaggaacattgtgctctccaaaaagcctccaattgttaccactatccattcccttcctcctgctcttctcgagcaacttcttactgagctttccacattggcttctgtttaccacatgcctcccgagcagttcgttggccagggccgttttggtgcggacgctgttcagaaggctgccattgagtacgtctacgtatgcctctcactgtagtatgtatgctaatgcacctatctagggaacaactccagaatgcgcgcgaaaacccgctggctgctgccgcggcggcggcagttgatggcacggccgctccgcagcagcagaacaatgtggagaaccttctggatatcgatttcgatggcactgcgcctgcatctgctcacaaggaaccaggcggtggtgtgtctggtctggatggtttagctggcacccccgtccgtgttgactctcctgcaggtggtgcaccttcagggagcaataacctggacgacctccttggcgtttttggggacaatgtccagtcctctacaggcgcacatgcgcctcccactggtggtgcgggcgctgaccttctcaatggcttttctgggttggatctttccggcaacatgtcttcaccgccacctgcgtcacagtccagccagccgaagaaaactaatgaggacatcttatcattgttctaaagggtgaaaatttgagcgttcttgttttccggggatagaagctcctactctggctgaaacggtgtcagcaagtacctggttggcccagaatccttcgttaatttcgaccattcgattgttcgttccattggtggcactattatatcttcttcatgtatcttcctctgtatatcgcattctatctgagcatcttcctgtggtgtctgaagccgccaatggaaatttagacttgttgaaaaaacattctaatgttcaaattacttagagcacgatcccaagccaaaatcatctacaattactgccaacttttgttaccctgggtttcgatattccacccatctccaaatgtactatattattaatcccgtatttccttctttacgtttctgagaatcctcccgtttcccgacccgtaactgtgggacctgggacggcaaacccaatgccgagttgagaagacgtggaccagataaatagatcgcctaggctcagatcccaatctgcctcctaattaacctcacgagtgcattcctactttcaggatcatttgcaggatcattattcccctattaccaattttcaccatggcgcagcaggactacaaattcgaaggatggatgggtctagacaagaatgccgccgatggcaacatggtctggcaggagtttgagcccaaggaatgggaggaaacagatgtcgatatcaagatcacgcactgcggtatctgcgggtctgatttacatactctccgaagtggctgggtgagtggactcaagtttgattaccaaggaggcatctctaaaggggggtatcggaggatgcagacaggggagcaatatataaaagagtccattactaacttgttcacacagaggcccgctctttatccgtgctgtgtaggtcacgagattgttggtactgccgtccgtgttggatccaaggccgtcgggggcatcaaattaggagaccgcgttggtgtcggtgcgcagagcgacgcttgtgtgggccgattcggcgactgccccgagtgtgcaatgggctgggagaactactgctcgcacaaatttgtctctacctacaacagcgtccatttcaatgggggaaagtcctatggtggatatgccctgtacaaccgctgtccttcccactttgtggtcaagatcccggatgccgtaccctctgctgaggccgctccaatgctttgtggtggtgtcacgctctatagcccattgaagcataacaactgtgggcctggaaagcgtgttggtattatcggcgtcggaggtcttgggcacttcggcgtgctctttgccaaggctctgggcgctgataaggttgttgctatctcacgtaagaacggtaagagtgaggatgcactgaagatgggcgctgatcagtatattgctaccgatgatgagccggactgggctacaaaatacgctcgttctttggacttgattgtatgcaccgtgtcctcgactaaggtatgcacctatcaaattgatgctagttcctgtgcagagacattgactttaaacaagatgcccttggccgaatacgtgggcctgcttgcaacgaacggcagcttcgttcaagttggactaccggaagacggagtgctcaatgcacctgtggcaaacttaaggcgccgccttaagatggaaagctctctcgttggaagtcccaatgaaatcagggaaatgtttgccttagttgcggagaaaggcatcaagccatggattgaaacggtcccgatgaagga

SEQ ID NO: 4367 - DNA, 2600 bp, Emericella nidulans
tccgcgacaaaggtatgaaacttacatgaatgccactattatgatttataaattatgtccagtctgacaaatactgcagggtccggaattgctcccttcctacccgttccgctgcaacctgcgcctggttgctgtccacttccgatccgggcgttgctcttcatcatccgtctcccgtttctcattttctttttcgtggcttacttcgccgttctgcagtggctgccaataggatcgcttggaaagaaagccgcattatggtctatactggcggtacctagtatatggtggattgacttgcaagttgaaggagtgaggaaaggccacctctcacggcagcaatcccggcttccgggcccgggctctatcattgcagcctcgtttacatctccaattgatgcgctttacctcgccgccatcttcgatccgattttcacggcgtcatacccaaccaccagggaagtggaggagatctcgctctttgaagcgatcctgcgcgccttcgactcacctgagactcactacgctcctcggcggaacgcgaagaccacctccctttcccaattgcagcgcaaatatcccggtcgccctattgtcacttttgccgaatgtaccaccaccaacggccgcggtattctcccgctctctccctcgttgacgaagatcggatctacgtcgaagatcttccccgtttccatacgctaccagactgaggatattgtcaccccaataccgggccattatattggcttcctttggtccctgctcagtaaaccaactcattgcatccgcgtccgcatcgcggaatctgtcacgatggccggtagtggcaacggcatgaccgagaaaatgaagaagtctaactacgatactaactactttgatcttttagacgaggtaagtgcatccaaaggaggagtggcttcttcgagggatagggtggaaattgaccttaggcctaccgagaagaaccttctggatacgggaggggatgcgcttgcgaggtttggccgggtgaagcgggttggcttaggggttgctgacaagattgatttcttggaggagtggaggaagatgcatccggcgtgaagtctatcatggactaatccatggcgcactctcattttatattcttacgtgattggatatggtatgggttgtaccggcgtacaagttgtataggctctagctcaggtactcatactttaaatacgtggaccatcgtccttcattaatgcttcctcgaagccttgacgtatagtaatgaagaaaaagaaacgcttttccgttttctaagatcccacctacaaaccaaaagctaaactaggctattaaacagaactattgattgtacatcaaccagacccgaaggccgcttaatcgaaagcgtccgtaatacacccggaactagcatccttgacattccgggcatactttccaagcgtcccgcgcaagttcaacccggtctggggcaacttgcccgccgccttatcagcctcccactgcttccgtcgcttagcgagttccgcctcgtcaacgtcaaggtccaaaacgcgcttctcggcatcaatggtgatcacgtcgccgtcgtgtacaagaccaatcggcccaccgacggcagcctctgggacgatgtgtccaataaggaagccgtgcgaaccaccggagaagcgtccgtctgtgatcagggcgcaggtttggccgaggccagcacccatgagggcgcttgaaggcttgagcatttctagaaaggtgaattagcaggttggatgagaattgaagggtcaggttgctagagagtgcataccaggcataccgggaccacccttgggaccggtgtagcgaatcacaacgacagtttgctcatccttggtgatttccttgcgctccagggcggcaatgaagtcgtcttcgtggttaaagacgcgggccttgccgtgtaaaacggttccctccttaccggtaatcttaccaacgcaaccgcccggcgcgagcgaaccgcgcaggatctggatgtggcctgtttccttgatggggttggagaaggggcgaatgattttctggtcctcggggaaatcggggactttctcgaggttcttggcgagagtttcaccggtaactgtgatgccggagccatcaatgacgccttccttgaggaggaatttgaggagggagggggtgccgccgatgttgtggaggtcggccataacgtatttgccggatggcttgaggtctgcgaggaagggggtgcggtcagagacggcttggaagtcgtcaattgtgagcttgatgccgacggagtcggcaatggcgatgaggtgaaggacagcattggtggagccgccggtgatgttgacaacgaccatggcgttctcgaaggcttgccgagtcatgatgtcggaggggcggatgtcttcgacgaggaggcgcttgatggcttcaccagcgcgaagacattcgtcgtatttggcttgcgattcggccgggttggacgaggagcccgtgagggtcatacccatgacttcgatggccgtggccatggtgttggcagtgtacattccaccgcaagcgccgccaccggggcaggcgtggcggatgat

SEQ ID NO: 4368 - DNA, 1607 bp, Emericella nidulans
gagaaaaaagtcgagcttcaatccccagtgctgaacagatcacctgtgattgtgaccactggaaccgaatctcatcttgcccagacataatgcaagcattgcattggctggacggctggaagatgacagatctcccacggtaactggccaggccgcgtccatgctaccgcgtggcatatgcagatacccaacacagctgtcagacggacgggtcgtccatagagcgggggaatgggcctcgctgatcatataaagtgggcctgcccccgcctagtgctcagtgctgtcataattacttggtgttctttttccgctttgttctattcatcctgtcagacccggccaagatggaggataaaaaggtcgttctcgatagtggcagtagcgaggagttagagcagggcttcagttccaatggcaatggctacgataccgtcgcaaccaagaagttaattcgcaaaattgactttgttttgattccgtggcttgctcttctctacttgtacagttctctttcccctagaacctcctgctcaccgtgatgaaatattcagcttacattttatctagactgagtttcctcgaccgcactaatatcggcaatgcccgtctggctggtcttgagacggatctgaacatgtctggtctggactacaatgtacgtccaaccttcgagaaaactcgctttactaaatgattgatcaggtcgccttggcaattttcttccccttctacgtcgccgctgagatcccctcaaacattatgatgaagcgctctcgcccgtctctctggattccttcgataatgattgcatgggcagttgtctgctcactcatgggtctggtgcagaactatgctggcttgcttgttgcccgtgcagcgcttggtattgctgaaggtggtctctttcccggtgtcacattttagtatgtctctccattgtaaaccgatgaattggggtttacacctaacatcggtcaaacagcatcacaatgtggtataaacggcacgaatgcggcctccgcatggctatcttcttttcagccgccacagcagccggtgcattcggcggccttcttgcacgcggcattggcgagatggacggaattggtgggaagggaggatgggcctggattttcatcattgagggtatcctcacttttgtcattggtatgtccgctacgtctacacctccaaccaacctaacagacccgtagcaatcgcatctttctacgtaatgaacgactatccttccacagcgaaattcctcacctctgccgagaaggccgaagttcagcgccgcctggaagaagaccgctcttccctcgcggatgaatataacatgaagttcttctgggacgccatcaaggactggaagatctgggtgcacatgttcgtcactgttggcgtgtacacaccgttgtactcattctctctgttcttaccgaccattgtctccagtcttggttatgagaatgaggaggcgcagcttatgacggtcccgccctatgtggtggcttgcgtattctgtatcgggggtgggtttctggcagatcgccagggacagcgtgggatttatatgattggcttcaatattgttgcgtacg

SEQ ID NO: 4369 - DNA, 1588 bp, Emericella nidulans
gttccagtgataatgttgccgtagctttagctcgtcagcattgctggcccgttcgtagggtctgttgactagggatacatactaccgtccataattatgcgggtcaaggactgcatacgcacccagggccgtaatgccgttgaccgtctgatgcagttagcgacttgctgttcttgggccatgcccaagatctgaggcaagagagaagaaaggcgcacctcgaccaagtcctgaaaatactcgtccgctaccggtccagccaacgaatcaggcaccaggcgctccatggagaacgcaacgcggaatatgttcatcccctcgttcctcagcgtaccaatcgtacccaggtcaggccaaatgtattccgtgcccagttcgccggggtaggagccctcgccgaattcggcaccggcttcgttggtaccaagccctgatttacaggcatgattttagcacaggtagagatatctggagaagcgaggggtgtgagatatacatgtgaaggcgcctttggagggtgccaccagggccaggacggacgacagaaggacgagagacctcatgatgatgacagttgatatcgatggaatcgtgcgtagagagaagagaaaccagaatcctctatctaccttaaatacattgtgcaacttccgtaacagcagactaaatgccacgaaagacaagacggccatccggtccgtcgcccgacttcacatccttgcctcctgctagtatcctaaaaaggtacggaccaaaacggagtgcggagtgcggagtcttcttttgtaacggtccggggaagagagattcatacattaggtatatcttcagacgatcctggactcaacagacctgccgaacgccgcagtgtggggaatcaggggtcctgcagaagttattggtggatattgtatgcactacttggcttcctacgccagctgatatgatggcgctgttgcattggtcagttagccatagtttgatgaacaagactcggcaggactacccaaggattgacgggctgccttggaaggacgaaacggaatcaatataactcttgagttcgtgaaacgtcttggagggaaacagcagatgtgaaagttatgggaggggtttttgttagagatatattttggcgtggcatgacatagggctattgttaccagctttggtgtatcgtccaacaagctggtcttcacttcccgacactcacgcctattgttcgagatcatagcagtagtattagcctctgaagtacgtctcattcaaccgaacgatacagacggaaacgtcccttgtgggtcgaagcgagtagacaggtaataaatcttaatagtacacattcgcaaccgtatccctattatagggtacgtagccagcgaaactccgagaaacaacagtagggataagaaagtgattcaagagagaaatggtatgagatagaatgaaatggaaataactgccgtacttgaaccacccctaaacctaagtactgtatgcaatcgacaccctaccaccgagctccacgaacgccttgaaagcagaagtaagcttgtagaaaattcgagattgaaagaaaacaggtttg

SEQ ID NO: 4370 - DNA, 4669 bp, Emericella nidulans
ccctccgtgtacgagggaaatggtacctacttcgcctctgtaaaccacggactatctgagtttaaatctactagcacagtcgtcactcacattcatccgcgaactcaaatgctacagacttgcacactgcgcaatcgaaacactcttcgcttcggtcttttcatctggagccgtatccagacgctctgaaccaagataatcagaggtttaagtccacgaatcacatcgtggttcagaaaaaggatagacgagctacaaaaagactggaagcagagagactagagctcgaaaagcggttgctcaaactcgaagaagccgaacggacgggggacacatcaatactgagaagagaatcccggaaactctcaaagaagcagcccctcaagagttcaagtaggtcatcaagtgtgagcgatgatgagtcgcgatcaagaccctcctcgcgtctttcttctatcctctcaagttcaagacgaagatccaggtcccggtgtagttccgttgaaggggttgataaccaccccaatggccataacgaatcgaatgccctcccagtattgtccccgacgttgcctgagcgcttaagcacagcaatatcgaaagagctgtctacgagaaaaaatgccttgcttgtgtcgcctgaggagtcatcacagtccctagagaccacaactgagtctacttccagccagccgactattcgtaatggagaagaacgcgccctcgcagcaccaagtgacatacaaagtgatctgtctgagacttcgcgtagaaaagattctcaccagcaagcagatctagaccgggcattgttcaccgcgagtctaacacccaaaaatggacgcccattatcaggacacgctgtgagaggccagattgcatatcgccaattggagcagcctcaaggcgacaatggtcaactgcagatgaactcgagatcccgctcgatgtccagaaccccattatcaagatcacccacggacggaatcgtacagagacagcaaaagacattcaaatcttctcctcttgcggaatcacagacaatcgacgttgacgaagtgccttcaaaaagggcaaccacgttgacaagccatgatatccccgatgcagcacggccacagacacttaccgtcgccgaaaaagcgactagtccggagaaccataaggtttccacattgcaaagctcgagtggaatctctgaaaacatcacaatcaacccatcgttgatggaggcgaggaaagctcaaaatcctatgagcagaatgccgacttcaaagcctactagtcagtcagctccatcagtactgttagcgaagccgcgcttctataactcactaaacaaagtgacaggcgccggtggtggcaagcccaaggccacagtaacgatgccaccgccgcctcgggaacgcgactccttcccaactgtgcctccgaagagcccaaagcgaactagccgggcaatgtcacaatctccggatatgataaccaataacaggccaactagcagcctgtctaacgataggtcgcaggaatccgaatcggactacaacaccgcagacgagattggctccacagtatcgaaaacctcagacgactgtgaccttcaggcgcctgtgggctcccgcgttctcaagcacaagagtactggttctgagggtgctgttggcatatcgaacggcaagggagatccgaagaagatgaccaaaaaaaggaatctgggacaacttgttccgaaactctttgtcatttgttgtcggtgcaagttttggcatgacatgccatccgaagtgtatgcaagccttactgtttctgaccctttatcagctgccctagaccaagaactcgcggcttgggagcgaaattctttggtcgatcggctcctgcaggctcattcatcgcatgaatcatccactgagccgccgagctctgaggcccagcataggtcgtcgcgcatacgcgtaacgactgagcctctgcctggcccggtcaagtgctgttggtgtgagcatcagattagcaagggctgctgccagggatggagcactctagttcaactgcgtcagagacaccactgaaatgtacaatgggttagaggtacccgcgacaccgtgtattcttgtgattcaactatttattccatacctggctttcattgaactgcaccagtcatgacactgatcaacttttatagcagtatgaagattcatgaatgtaatcactcaaatatatatcttaccgtagcacatgtggtttgcattcggcctcggttcagccgcgcattcacgaaatgacttcgaattagcgcccggagcagaatgagaaccttgtcaaggaaaacgtattattagaggaggacatattgttaataatatatctttcagaaacaaagagcgaagataccggggccaaacgacggtggagtaggtgatgcactactatcggactgggcggggcgtcaagtattgagggagattcgccaggataaaaggcgaggaacacctcacctgccacccccttcgtccactttccaccaccctccttcctttttctgcacccgaccggcttgtgccagacacgatggtgcgtcaccgggggcattcaaatgcttcatcggcttctactctgccagaccggaaccaggtacgctagacatgctcacgccatccgcaacgcctccaggcgcatcatgttctgatcggtgattaggaactggaaagcatgtacgattatctagcaaaggtcattcttttgggacctagtggtgccggaaagtgagttcgccttgccccgcagttccgagttttctacttacggatttgcttcacttctttctcaggtcctgcgtgctccaccgatatgtaaagaacgaatgtacggttccgaatccaggctgtccagagctgggatagccagctcgctaatacaccttgcgcctgtagggagagtgctatcgtcgcaaacaatcggagtcgagttctcatctagaattgtgaagctgggcaccgggccccgacggacaagaattaaattgcaactatgggatacggcagggacggagaggtttcgatcggtgtcgaggtcgtactatcgcggagctgcaggtgctattctcatttatgatgttgcatcatacgcatcgttcaactcccttccgacctttatgatggatgcgcgggcccttacatctccctaccttactgtcattctcgcggggaacaaaacagacctcacgcaagacgactaccatgaggatggcatgcgccgccccatcaccccctccagcacttcaagcccgcaatcttcactcccgtatgactccacggctggctcgtttcgttcgagcaattttggtactgcaaccagaatgacggccacgtatgcctcgcatggtcgcgaagtcagtatggaagaagcttcgcaatgggctgccaggtctaatatacccgccgttgtcgaggtctcagctctcacgggggacggtgtggaagagctcttccagcgattagcgcgcatcatcctcaccaagattgaactcggtgaaatcgatcccgatgacccacaaagcggtattcagtacggggacggcagtccctatggtcacggcacgagcgatgcttcaagcatcaaaagccaaatgactatcgaagacaatgccgtacagcttcatagaaggaatacaagacgacgaggcggcagtaactggagggcaagcatgaacgagtgggaagatgttttccgtgtgagcggatcacataacaggaaaagttcaggctgttgctgatgcccctgcctacttcagtctctacagcgatatactggctgttactcgccccgcctctgtttctcgtttccacacaccatacttttgagcttgcgtgattaccgggcgcttattctagtacttttcatttctctactgcactataccccgattacgttcgttgctgactccgaaccttatataatgattctttggcttgattgaagcgcttattgctttgctatttgctttgtgatgcccattttctgagccgtgttgctagactttacttgcagagtcttctcatgtatttccttgaaagcatacatctacattcgcttcgctgactatgcctttttggtttgtagaagaccccgcggagtaaaacatggaaaatccgaacatatcatgcattaagaaaagaaccaccgtaggcgaaaatgggtatacccaataagaagtgtaaaagtagatccgatttatgtacatggtccttcccacctatgtacccaagcgggacggaacaaattcaagaacacaagacccgataagaaaggtataaagaggacacatttgaggaatcaaaacgtttatcaaatagccagcccatgactgcgactcccgcaactcagccgacggtcagcaaaaatgtttaaagcaaaaacgccatagccgccaacccagcgccaaccacacctgctcccgaaaacttggctccgggaacggcagcaccagtgaagggggtctgggagggcgaagcatacaccgtagacgatccagacgcgaaaccaccagtactggcagacgaggttcgcgtaggacggcgcaatggtcgacgagtggatcttgctgatgacaaaggagctgcaagggagggtgtcggcgtggcattggataaggggacacgaa

SEQ ID NO: 4371 - DNA, 634 bp, Emericella nidulans
ggtctcacagataccgagattgatggtctactgggcgtatcgcggaacgctgaagcgagcagcggcagcggcagcggcggcgacaactcagtcgaggagagaaagagcacgtccgcgccgagtacagagacgttcaatccagctgtctcaaaaccgacgccaccaaccccatcctcaaactcgagaccagtcaacctgacgccccgcgacgtcccccctatcatcacctaccccgagtttctccttcaccagtccaaacctccgcctctcgtcactctccgcagcgtcctctataccctttacaccgctgcgggtctcggtgctactctatatggtgcaggtgaatacctggtaaaaccaatgctcgcagccctcacggacgcgcgccatgacctcgcccagacaactgaggagaacctcaagaaactcaatgagaaattggaacttaacgtctcccagctaccacctagcctgattacgaaatccactgcgtcagtcggcgatgccactgaagaggacattgaatccataacgtccgatcccactgagctcttccatcgagacattggcacccaaacatcccaagaccttattcaaacctcttctgccacatccacatccgctacaatacttt

SEQ ID NO: 4372 - DNA, 2146 bp, Emericella nidulans
caatttaagtaatcatgtttttgctctgttcaccggagctcaagtagttatctgttctagccctttaaattaatgtttgcactgtattaaattcacgcagtgtgtagcaatatactcttttgatcagctcgtgaccctgtcagagtaatttttccgcacctcccaagctgttccacttatgcgattatgtctccatgttcggacagcattcggttcgagtgtggtagtctggacatccatgccttactaccccatggccccaggtgtctttgacgttttcttggggttctgctaacatgcctgtccctcgactgcgatgggaccaagtggtaaattgtaacggccccagcatgctcactggcgggatttatggcgcatagtcctttgtttccttctgttgcatcattcagctcttcttaaacattagtccagttcctgaaatctgagcaaacatatcttcaagagcgagccaaagcgatacgagtcctcgcgttcacagctcgatttgtggagggagcccgagtatcctgaatgagtcttgtttctgcgagctacatgtaggttctcatgcgtccattacctgtggcaatcgaggcggtagccggaccaagtgtatggctctagccagctcatggtgttgaaggcacaatcgcaccaggtttcgcttgtggcgtggaccggtaccgcgcggccagcgtcgaagagcttcattgcagactggagctgctaatcattgtaagtggcgctaacataaaaagagtaatatatgagatatttgccggtgctggtggcagagcaactcatggtccgaaggcatgatgagaagacgaagtgctggggatgagggaacgggacagtgccaacatctggaaaagcggcaaaagctccacttcgtagatactgcctctcacagtaccaggacagaatatgtaccaggtgatcattttatatctcctaggatctcttgaggtactaaaggccaagtctagtttacaaccactacttaactgcttcttagcacatttcgcaacagatcagcactcagcagtagtgctcaattctccttcgcgagaactctcggcaggccttcttgatgtataaagaaaaggttgacatctttatttatctttcaccgcaggcacctcgtggagcttcgaggctgtttctttcataagctcgcgtcccaactgcattcctcgcgaatgcgttgcggtgttcccagaaattacccagattttcgtcaggcacacggaatttttgaatttggatgttcgtagttcggttagtgatgcaccatttctagacttcaacgccaccttgaacgtcagtgattggcttagaaccctacccatagcctgttcacagctgttctgtcgaggttttcagcatttccgcgaaaccccatcttcataaggtatctccagtcagttacaggggttactttacgccgctgagctggagtgtgtcagatagagccttgtcggcgtactcctcaaggagggagagaatttgctgccgtgcttgcatgggatgcgcttcagccataccctgttgtttgtgcagtcaacccattagccaggttggcaattcgttgtctgtactctggccatcgtgcttttcgttcgcgtttgctagtttgttgagcaagtcaagatgcgtgcgctttgtttttgaaccgtctcctttgaccagcagctcggccgttttctctccaattcagttatatgttatttccaacacctgatcagtctctagttagccttgcgttcctgtttccatgcagcaggctcattgtccaatattgcaacgcatgcttttccctcgtaagattcctgttttcgaatcttaagttgcaggtctagtattcggttctggtcttgcgccctgaacctttgcacttgcttgtctctcttggccagcttggtctccagttgtgaaatctgggttttgtccggattccaaccagctaaggcgtgacttgtactctgacaactcagcttgcacggagcggatcatatctatgtatgatcgcttctgcttataatagtttgctgaagacagttttggcgatcgcttgacatggtccagccattgggtgagttcaacgccggccttttcgtcggcgtaccttagctttaacaggtgg

SEQ ID NO: 4373 - DNA, 3254 bp, Emericella nidulans
aagtccttgccatatctatctgcatacgagaacgacttcatccaaatgcactggaacaatgcgacgcggactcttctgcatccatttctgagtatcctgccgccagacgacgaattggcccggcgctgcttgtactcgtccgggcaaatgtgccagtatttcaagagactacggcagagagactcaacctggtactcgtttttgctcatcaacacgctattcatggcgggattgactatctggtacacctcctttaccaccatttccccataaaatgagttcccagctgatgatcgcagtctgtgcctcttccgctccccccggttatggacgatcagtgtctccaatgacctgcgcgcctgctcatccgcactcttcgtgatggccgaacgacaccccagcgtccggaaatatcgcgatgccctggaaacagccattaaccgtgtcatggactacgtgagtgatgcacagatacagagccagacacataccacgggcagcattgtcgtatactcttggatcgtgcgcttacggaccctccaacaccagggttctatatcccctctccgcaggcaagtagggctagtgcgcctgattggggcgttgaagaaacctcagagacgataccaatccctctatcagacggacggcaacctacgttctcagggttatttacgagggatttttgggcgggcgatgcgtttagtttgcatatgggggagaccttcggattgcgaacatagcgccttctactcgtctcttagtgactgaataaatccatttgtaaactgctatgcaggtacggcatatactagtgctatagcatcacaaatgcaccggcgacagctggtcctcaatccccaggtcctcccgccgtgatttactttccgggtcgaagtagggcacctcgccgatgcccacggcacggtttccgctccgctcgccgatcccgtcatagtcaaatgtggctgtgtggaagacgctgcggttgtcccagatggctgcatctgttagtattatttcatgctgatgcaggtagaggcttggggttgtggttggtcgaagacgcaccgatatcattcggctcattccatttgaaccgcacctgcaggtcatggccgtaggtaatcaagtcgtggaagtatttcaataggttctcgctctcgcgggtactcaggccgttgactttcttggggaacgttcctgtcgcagcgatcagctccgttcctacctaggccccaaccgttcccagtggaaataggtaattagggcggatgccactcaccaaccggaaagatactcttccacccagtaatcggattcgtccgcacgaccggatggtcactcgtcaactcactccccacattcaacggcgatcctcgaggtttctcatataggccgaaccctccggcctgcgccgcacgatggaacccatctcctgagtgtctggcagtaagcgtctcgaggaacgcccggtacggcttgctgattcgatcgtacagctcgtatccgctcgcccagagggtatctccacccgtcggtggaagcagggtcaatcgcagcgcagagaagtcactcggcgccttctcgaagctgatgtcgctgtgccagatggcagcgaggttgccgtaggcccccttgtacagcttcttccgttccagactgttgatcgtgctgatctggggatcggggtccccgaattcccgcgcatcgttgaccaccgggtggatgtgcaggccgtgttcctttgaacggccagtgagctcgccaagtctgagaatcagtttcttctggagctcattcgttaaattgtcctgggcgcggaagaagacgacgccgcgttcggcaactgcatgggtggttagtggcattcgcggcggaggagcgggatattactcagaatagcgagatcgcggatccgctcctcggcatttggggcgttgaggatgtcgttgacaatgtttatggagcccttagggaactcgtttccaatgactggggtgaggacggtggatttgaagccgtctagcgagccggaggagtagagacgagagtgggaggcggccttggcgctgccgttggatgtagattcaactgagatggtcataatgtctttctttttttacttcatgagaagatgttaagcttttggttgagctggacatggtccggcttttatagatgatatgctgtatagatctcgtaatcgccgacgcatcggctttcggcgataggacgcccacctgtcgcgccatttctatcgacgattcgcgagacgcatcgagtacagcctttgcctatggagtaactgttggattggtgagatgtattgcgcaatctacgcacagtcgactgtcatacttctactccagtgatgaaccgcacgcaatgcggcgcgtggatgccgtatgccgcgctgggtatcgcaactcattcagtgcaaagcggctgcaatgtaggggacgatcttgatatctactgcagccgagctcgatggcgaaggtcagcagtccaaggccgagccgatacagacgctgatcattatattcgttacttgctcaactacctggtctgcttcgctttatgagatatgggcgaattcactacccgcgatgtaagagacattctgctcaaagtgcgggagaatagatagaccactccctggtcatggaacctgtttcaaccttcaacctcgaatacagaagaagtctgctgcccatgagacagatcaccacgatcagcgtcttgttgatacaaacttgtcgaattctctttcgcattccccatctagatcatgcaccagcatccgcctcatcctgctcgagaacaaccacgtccaatcactcttgctcgtcactccagcataccccagaacaaagtcccgtactgcccggacgatcccatcaggaatgtggaagacttttctgttgttgacggctgcttgcacggtgcgcgtggtgcgggcttttcggatatcctcgtaaatcttgagcagttcagggatgtattttgaaggctcgtctgcgatggttgcaagatgagcgtttgaaagtccgagcagcttggcgattgcgaatccgtcctctactgccattgcggcgccctgcgcctgataggggagggttgggtggcaggcatcgccgaggagggcgacgagtcccttggcataggtcagcaccctttttcttattttcttgatacagtaggtaggttgaggcaatataccttcgtccaggtctccagctctggcttta

SEQ ID NO: 4374 - DNA, 4752 bp, Emericella nidulans
ccgtttctgtctagttagtcatcggcatattagatcggtgaaaccacgaggcgcagattacgtctgaatgtgtttatcgactgtctttacagtatcttgaagccggctctcggcggagttcaagcgggcttcgcgctgttgtcagtccgactggctgctttctccgcacagtatggcacagacaccggttctgggaggaagtaaactgtgttgtatctgacagccatgggaaatgatggtgatatatagaatgtcttgacaccataatgcttggatctgttattttatgtgcttggtcgttctctcaaccccagactgcgccaagcagttagggcagacactccatgccccgagagaccgagcccgaccccgacgtttctgggggtacccaagtgacgatcagtttcttcaaacggattttctcacgggtaaactatactgggatttccctactcggcgaaatgatctcgagtagatggttctatccgtaatgagactggtatttaagaccaagaacatcgtgtcttcaaaactaagcatccattgcaattctacagtcgacgcctggtagcgacaaacaaacaatatgaggcttatgaagaccctagaccaagcggcagcggccgcatatttctcgtccttcttgtgtgaggaggcattaactcatgacccccgggctatggtgaacccttgtcgcggcgtcgtcgccgtgcgcgcaagcacagactccgtcctcgtcacctggcgcctgctgggcctcgacaattccgatataggattcaacgtctaccgcgctgtcggctccggagaggccgagaaactgaacgacgaggtcctgggcgcagatacaggcacgaacttcctagacacaactgccgatcccgcagacgacaacacctactttgtccgtcctgttctcgacagggaagaaggggacgctagtggcagttttacccttcctggtgacaatgaggtcgaaccgctcatttggataccgaaccccgaaagaggggaaagatcaagtacgtgtgggtcggcagatctcacaggcgacggcgaatatgattttgtcctggaccgcaccaacacgcaacagagtatcgaagcgtacacggcaacggaacatttctctgggagatcagtctgggccccaacagtgagaaccagaataacatcgaaccggggagcacagcgatcagtgtaggaaactgggacggcgtgacggtgtatgactttgacggagatgggcttgcagatgtggcagtgaggctggcgaacggggtcgtctttggcgatggggaggaattcagtgagggcacctctgacgatgagcagtgggttggcattgtagatgggcagaccggcgctcttaaggggagcagtaagctgccgacagactttatcgaggacgggccgctggctgcgcggttcggggtcggctatctcgacgggaagaggcctcatctggttgcgttcatgaagaacagacaggatgggggcgacttcaatcgggtgattggcgcttggacgttcgatggaacggacttgattgaagaatggatctcacttggcgatgctctcgttggcgcagacggacacaacacgcgcatcttggatgtgaacggcgacgggaaggacgatgtcgtggagattggcttcgtgctgaatggcgaggacggctcgttgctttacagtatgcccgaacccatcgtacatggggacaggtactacatcggcaagtttgatcccgagcgagagggactgcagggctacgggatccagcaggacaacgaggagctgctgatggaatattactacgacgccgcggacggctcattcctttggacgcactatggcagtgaagtcggcgacgtcggacgcggcctagcagcagatatcgacccaacctacgcagggtacgaggtctggtccttccaggggatctacaacgccgccacgaacgaaacaacaacatccgacacctcactagccccctggccacagatgagcatctggtgggacaacgacactctgacggagctgtacaacgacggcaagctggagaaatgggactgggagaatcccactgacagcaggagtctgcctcggatcctgacgattggcaactatggcgctcaaaatcccaataactataacccggccttcctgggcgatatcatgggggactggcgggaggagattatcacggtgaatggggatcattcggagctgatcatctttacgacggaccagtatactgatgtgcggctgtacactctggcgcataacccagcctaccgcaactcgatgacgctgaagggatacatgcagtcgcacagcattgactactttctcgggcatgatatggagactcctgcgagcccgaatattcagtatgtcggtcagtagccgctcattagcgactttgccaggttgttagggttggaatgtctatctgtgtttttcatattttacaagctgaggtagcaatgtaatgctcatcaaccaccacactggtaactgaacagctgcacaaggtattgaaaggagtgcgtcagaaccggcaaacatgctagccctgacaccattcggtgatgagaaaagaaaaataaagcagaatataatatagacagccagtaataggttgaagcatccactaacgcagggtcgttatgtgtttgcttaagctgtcaaaagagtgcttcttgcgggcaattaccggctatctgcttgaatctcaaattgcaggcagagacgtgaagccatatgaagactatagctatatatggccgtttaataatgtagccgagtaccagagtcacagaaagtggctatgaataaggtagaatttctattcagaccggtgcctagccctattcttgtaacgcgaacagcacaaacctatacccacgatgtcctcctccaaaagctggagctctgaaccatgatgcgacaggggtatcgaatcgctagacttcgtcaaagagaagacgggagtgttaatttcttatgtagacggccggttgaattgaaagcacaagctatctgtctgcatttgcgttgttctacgtccctgtcactagaaaccatatcacgcgcccgaccctcaccccgagaataaaaatcacgcttcctcttgacttgactttgcttagatcaagcaagcgtcaaggtgcgttgcctttaattctcgaaagagggacgaagcgtgatatatacgtgtcgtgagtggttcagacacatggtgggaacaaaggggaacttggggtctcaggaggtaatatatccactcaaggcagattatcagcctcagacagcagttggaactgagtaaaccagccatggctatgttgttgattggtaatatatggttatggaagctggacgggaatgaagccgtggaacttctaacccgtaactaaaaagtgtgtagtttgagtgcaaaaatagacctttctcccgattcagttggctacttggaattgcggacctgtgatgcacaataccttctgatcgtctgatgccatctagccgactcatacgtgaaatagccaactcatatgtgaaactcttccccttcatcccattactcctcccgccgaaatcccctgctcatttgcatcgaaatagctgaaacacactcatcttataaagctcaacagtcttcttcctaattgatggatcgaggggccagattcttccgggggcaagcggcccagagcacccgcagctgtcaatatcggcggagatttgcatcgttaggcatgccggctgagctggagatgtagcttctgttaggtgcaatgtcgcaagcggagctaactgccccgtctgccacgtactcacagtcgctgcatcgaccgttctaacatggaggtcgagtatgtagtttgcggagggcaggtaggagctatgtcacttctgcacctatgtataccagattccggcctctatagcagacgagccaggaaagaagtgtccgagccggcaccgtcagcgaggaggggctcgaagaggctgctgccacgtcgggatgtggtccgtttcagctggccaatggccttgattgcagatttcatcaaggactcggagggcaccaacatgactgagacatttgagatgatggtgccgagggttagggtgagcaacgctagagaaggcgtctttagtcatgacggcaatgaagcagatgctgaattcgagatcttccagacattgagcccagttctaactctaagggacgtccagtaggtaaattttcctggcgtcttcgataatgaatactatctagtagtgtctgaatggtagtttattagggagggctgagcaagagagccaggagctgaggtgaacggaaggggactgaacgatactctgctactattcctgttatcactacttctttactctagtgggcaggctacagggcaagctacagggcctgattcgagcatcaaaacggtttattggctgcagctgttctagacgttcacacagccacggctatgggcactagaatccaacaatcaattgccatccatggcccctagactcagactagagcactgcccgataccagaggcaatttagcacgaaggaagggggtcggtgtactggcaagcgttgctggggccggtgctgatctcctggggctgtccgcatcgcatatcgttagcatactgcactttcatcacgcctcacttggagatacgtacctcctcgtcgttgttgtcagtgccctcgtactccgtg

SEQ ID NO: 4375 - DNA, 5525 bp, Emericella nidulans
tctgttctggagcgatttaatcgcacggatggaagtgcttgccacaagaacacgattgggtatgctctgcatagtaaatgctctgttttaattgcttggaagctgactgcttagcgattacgccacctggatgaatttacaaaacggcatacagagcaatgatatgatttgtgattataaaatggtatcctggctatgcacattccgaagaagttggctaacagcatcagattgataccgatttcttcttgccggtcttgatgcagagatatttcctggaaaaccaagtcgggcggacgagattcccggccttttcaaagtaagtcatcctctgccttacctggtcttgcttggattggaaatgttaatgttataggattcccgccggctctgtcgatgctttgaaccagaacatcacatacggtgaactcgccttccgcaacgcccagcgagttctacgtttagccgctccattcgtgaaaaatcccgtgaaggaaaatctgatccatctgaagccgaatgaggttgtcggccaatggagagatagcacttatggtgggttccaagcgtttaacaaactacgtgcagatttttgaatctgataactgagacactatgcaggccttggtggcggtcgtatcccatacgatgtaaatacagccctagtgcctgccgcccttcgtgccatttcggctctcgctcgcgaaggcgtctttacaaccgacaagcgctgggctacccttgcagatcgatatgccaaggtctgggaggatgagaccttgacatttttcgaggtgcgtatgggcccaagggacagcgagtgcaatgtcgcgtttacttattgtgactgcgcttttggacgtcacgatccccaaagaaacagcaaagagccttgttcagtcctacaccaaccgtaccagatttgagggccccagccacgcgaactcaattgacgacgacatccacttccacgctgtcgccctcgatggtaacaataacctttcccacgttgaggtgatgaacaccgatgactgtttccgccacttcctcctgaacaccacgaatcaagctcaattaaccgcgttcgttaaccagaccgccaacaatatccgacgcactttccctgccggcctcatgactggtgtcggactggtcgttgcgaatcccgcgtacggctcggaccctgtatatgcgcggaatttcacaaatggcgcttaccatggcacggtggtgtggagctggcagttggcgatgatggcgagagggttggagcaacaactggggagatgcattgattcaaaagaagctgctgtgccgcagttttgcaaggacgataccgtctatacgaatgtgcaactggcatataatctcctctgggataaccttgaagcaaattccgcacagctttcgtcggaggtttggtcgtgggtattcagggatgggcggtttatcccgactccgctaggggtgttgccggctccccctggcgttgggggtcagactggtaagttcatctttctgttgttgttgtaatacatcgcttccacaggcgggtctaatgatacaattttctagagtcgaacattcagcaattatggtcgcttaccttccttgcggtgaagcggaatgcagcattcgcgtaaataaatctgggtcctttatcatctcgtggggatctcttgtggcttaaatacagcattgcttctggttcctaattctttgagggaagctatgtatttagaaagggatggttttggacgatcctcaaccctacctacgacttgagcttaccgtaaatagtattggaatgacccgctggtgctgtccggtatatctgcaagcaccactaagtagcgtggaggtatatcccgtgattaatacatttatctcggtaaatagccagctggtgctaaagatatcctgcttcagacgaagtactacgcatattgtactctgttccgaattaacacccaccgcacatccagctgcacagccggtcacgcaacatacccactggcataaggataaagctgccaacagccagtattcagcatcctgatgcatcgcattcaagcacatatactgttcattagggtttatcacagacacgaaaattgcctcctcagtagcccttgcagacccgcggccagttttccaaagggtcggatagtgtacagatactgtagtagcagaattcgacctcgcagggcataaatcagcgtctcaagtcaccgcgtgatatgttgtctttgcgccagaattcggccccaactttcttcgcgtgcgcgcggcaggggttgagaagggcggtattgctactcgtgaggccatccagacggctgtatggccgttgacatcctcttgctgatcttgctggaggcattcaccgatatcagttgaggagctcgacaggtatgacatggtcagatcgtggcgcagctactaacggggcagttccgagatagtaagggtggaaagggcgagtccgtcgaggagcgcctgtggttataagatgtagaggcggcgcctttgcatggtctcaagaatcattcgacgacggaattttataatgatggttccttgcacgcgaggattatttcttctacttgcggtttcctccactgcctctccttgacagatgcatctttctcgataaatttgtcagtctattcacagaatgggcaaggagttctacacactttaaaacacctaccctattgacgacagctcagcactttgtagcatggtaatcaattgagtggccatatatttctacaggaaatatttctaatcaatatatcaagctgtcaagctgggttattgtaagacgtgatctaacgtcggggttctctagctacaacgaagcgacgactatcacagataattatccaatggagggagctcgattggtattgaagaatattgaaaggattgcttggagatctctatatacatggcatcaggaggccctttatataacctccagtgtggttagttcggcatctccaagcaataccattacagtgacgcattggtgattgcgtacaccaccgcatcccactgcaacaatatatgggttgatcccagtacggctcgtcccttgaattcctactggcggaccggtacggctctggcgatccctcatattcctactggcggataggcatcggtaaggcgcccgtccgcgttacgtgggaattgagggattggggtcacgtgtcacagggccaggtcgtcgccagctggctcgcccgtgacagttatatatgagtgaatcccagagcagcatacatttcttagtccaaacccattacatgcagcaagatgcttaatactgaaaggaacagcattgcctatatgaagggctcgggcatgtacagggaatctggggtaacccctaatatcacaaactacatcagtttggcctcttttaatagaatcgataagatggcgccgctctgcatgcttctccatggttgctgagaaattgggagcactgatgatatttgggattctagaggctttacattaaagaaagctgtacattgaggagggcaacttggactggttatccttggttcgtagcgcccgtcaacctcggtgctggtgctgtaacggtaaacctactatttcgatgaatcatgcaattttatgcagagaatatagtgtattctcgagaatttatgaaacatggattcttggcaggttacccacgggttttggtacgggtgctgaccatcaatccaaccaatgtcctcacgttgcccagtcacggattttgtcatggtctatgagggacatgcatagtcagatgtgccaacctcaatggctccgaggggtttggttagtggcatacctccgctccttcgttcagtgagcatgtgagtaggcggctagagcctacctatcaacagaaggggatgtataaaacttcatcatgctattttaggtcgaggacttgcctcaatgtcaagctgtacactgtcctgtttataaccataaatttgaaaggcagacgggcactttttcgatactataagcagcataagtgaattaacagatggataaagccgcggatgaatgacgtgcaggtgggtatattcgcgttaaaatgcttatcagggaggcttacgaatagttgttatctggcggcagcgccaacgaacaagccctaatccagcccgaaccctggacccaactggggaattctcgggatacccctgccagccgaccccatgagtggcgtacccacgagctggaaacgtgctctaaagtaaatatgattggttagtggtgctgggtaagactcggatctcggaatggcaaggaacacccgtgagagggggcgagggttctaacaatgctctcggtggcaacaaagctttgtgaagccatggatgtattcagttccctggccgagacccttttcacggcaactaagagcttggtctttacgcgacgtgagttatagtcctacaaaattattatttagcaaggtagataagcttcgccttttacgcgcgactacgtgacgaagagaagaaaaagcatatagtttaccagcgtatagtcgtaattcccgacctgttcttggtagaataatgtcgaagtgtagaatctttttttattcttccggttcgccccagctttgctcctgccagaggaccaataccatgaacggcatactagctacagctaaccggcatctctagcggcatgtcggggctgcagcagatgacgccgagatcaaacggtcagatccacccccttgcggacaatggagatgtggcacctcgaattgaccaatttccggttctaatgagctggtttttcacttttttttttcttttcactcttttttttccaatcactgggcggaaaagaaagctcatattcgtaatcggtaccttgattagaagggttaaattccaggatgtcgtcaagcattccattccacaacagctcaatttcggcagctctgtcaccattttacaccattcgctttgcttcttgctcctatctctcaccacaatatgctgctttccatcatctcattcacaacgttggctctcccaagagctgccgcagcgagcccagaaaccgccgcctctcgagccatcaccgcgaccgaagcgctccagacttggtataaccggacgacggggatctgggacacctgtggctggtggaatggagcgaattgtatgacaacactagcggatttggctactctaaagttgaacgactcggtcgacggactcgcgaaagacgtgtttcagaacacattttctgtcgcgccaaattcgaacccttaccccgaaagagggattgatgccgactacacgacagcgaatggaacgtcttattctcaaacgcttgataaaaaggtgccaactggtgccgcgaacgcgtcgctgtggctcgacgggtcgtacgatgatgatgcgtggtggggactggcgtgggttgctgcgtatgatgctaccggtcagacagactacctggatccctttagtagggttatc

SEQ ID NO: 4376 - DNA, 3668 bp, Emericella nidulans
attgaaaaaggaatggttagggggatccttaaaaaacaacagggcccaaattaaccggcgtcaaaaaacttctactgtttttccacgggcaattcccaaatgtgaacgcaaagtggtagggaaacggttctaaccctccactgggttgggtgtttctgtaccagtacagcctgggtgcgtattaggtcccttcgtcggagagcagaacctcaaaactaagcttgagaatcccaggggggttgtcttgccaaaatccgtgctatatccttcaaacttcccccccacggcaggctctaacgttcatcggacaagggaaagtgagaagacaaaggaacaggaatcttgctggtcaatacccatgtctagccctggcattagatcattgtcaaaactttatgaagaccggtcaagagactaagactaccgcatgtccacttcaaacgacgattaatttcgaagcagggatgggaaagcatgtcgcccggcccagcactgatttctcaaaccttagcgccttcggaggtttggctctttcaggaacggtaggcttcatgagttgacactataccattattagtctaggacgagcctcttgactccagctacgatagacccaacgtggaaaagctaaggtttcaggttccgtattccaggtaccagaagttcgacttgccatcagcgtgggctagttgatcactgatcgaattcgcgcacaggcggtcccagaaacaactctgaacagggacgcttcaatgcgttatcgctcaaggtcagcacgcctggtacaagactgagacgtgaaactgctggtggggatgaaccatcagttgccccatccgggaaaagaagagataacccaggcgaagctgcactgactcacgtaaagcaactagggcaactcaaaccagtattgagtgtataatggagcactggttcccagaatacagcgtaaaccaattcccggagagcggactgaagtttttagcgacggcctctggtcttgccgcggcctctcgactttccaccccctctccgtgatccttggacgtgagcgacgtcccgactgctgagattcagagttccacctgcaaactttccaatcgatgggcctccaactcctcgttcccgtcgcccactgctaatctgtttcttgggcgcgggcttctcaaggatgatcccgttctctcgagcttcccgccgacgcttatcttcctttgaaacagccttagctttgataccctttcgtattgacgatggcatgttcttctggtggtaaagcgagttcttagccccaagctcctgcattctcaaatcgagcgccttgtgtcgattcttgcctgtcggcgcgagatctgaagctgattccaacagatgagactctttcagaagtcgctgaagtgcgaggtcgttcttcaagttaagcgattcgatatctttgtcatcttcgtcgttcgtggcttttttcgagctgtccgtgatagggtttaagtccatagagaaggatggcggctttgcggtctttaggataaaatcagcgtagatcaatacgcgcataatccaacccccacttaccataaacgcctttcgagctttcttgtctatcaggtcttcaggactgcgagaaggagcctgatactcaactacctcaacaggggtgttttcttcctgctcttcaattccactccattcagactcggatgcggagtcatcttcttgactattcccatcatgctcgttgtcggtgtattcggaatcagattcatttttggcagtgttgacccttttgacctccaaaggctggaactgagcttcgaagaatttgcggaatatatcttgagcgcttgattcggcagtagctggggtctcctgctgtccaccgcccttttcagatcccgatacttcagaggtatctcttttccgtttgccaaccatctttgaaaataaaagaaccaaccgtcctgtttccgctgtagtgaaacgctgaattagagaaaaggcggtggtcaactttttccaaggtagataaagtcacgtgtgataagataaggtccttcacgagggtcccgaagatgttaagaaggcgcaacccctcactaaagacaaaattgcaattgaacggtcaaccattcgaacaagaatttggactacagaaaagacgaaagagtcaacaatgagcaaatttcgaccctgtatcgacctccactctgggcaagtcaagcagattgttggcggcactttaagcaacgttgagtcggatctgaagacaaattacgtttccaaacttccagcaagccactttgcaggactctacaagcaacataacctccggggtggtcatgtcgtgaaactaggtcccggtaatgacgacgcagcaaaggaagcgctgaggacatggcccgggggcgtgcagattgcagggggaatcacagatgagaatgcacaatattggatagagcaaggtgctgagaaggtgagcttagctgcttagctagtgcggcatgttagtgtcagatttatccaatgccagcgagtagggaagccagctgtttggcagtaccgatgctacattggcttttaaccgtgtccaatccgtcacaatcttcattaactagtatatacaggtaatcatcacatcattcctctttccagaaggtcggttttctctggaacgactacagtctgtcctcactgccctagacggcgacaagtcaaaactagtccttgacctgagctgtcggcgaaagggcgacacgtggtttgtggccatgaaccgctggcagactatcacagagatggagattaaccaaggtaagcggatcggttttcctccattctgacaaagcttcatcatggaggctattgagaagccagcgcactgatcgcaccagaatccatttctctcctcgaaccatattgttcagagttccttatccacgctgcggacgtcgaaggcctgcagcaggggattgatgaggagttggtttcaaagcttgcacagtggtgttcgataccggtaacgtagacggcggagcgcggagtctgaaggacctggagaaggtgcagcttagtagtggaggtaaggttgatttgacaatagggagtgctctggatatttttgggggctcaggagtcaccttcgacgagtgcgtaaagtggaataacgagcactgagttgactaagtggttaccgccatgtttccggttatacataaagaggtgtctgtgttcgcatagaaatagactgggcggaatttgttttgtgctttagttcttgatgtcttaccgggagtgggtgattctggctttcaggaagagcatatacatacatacatataaaggatatatggggggtcaaatttgcggcattgttttgcgcgttattatggcgaaattgccaatatatatatatatatatatatatatatattcatgcgttcgatataagagcataccagctgtcattcataaagagacgcttctagatcggaggagagaaaactgcagacacttgatggcggcactttgacgctaccatgcgactttagagacatccacagacgtcatctagcgagggctcaggcacatacattgaatagctatattcaagcagcagtaaagtcgcgcggctgtctccctgcagcccaagccgaaatcccgtacccctaatt

SEQ ID NO: 4377 - DNA, 2982 bp, Emericella nidulans
tgttgtactagtacgtagggcaggtagcggtgatattcttgtaacaaaccttctgcatttcgatgattcgacacgtggggcggtctatgcgacgaacctttcaagagtagtactacgaaagcatgattgattgcctaaacctacaatcgcagaaccaaaagtactgaaaccgtcatcaatgagcgccattgattgatgtcttcaagctgaagctgcggagaaatgtgggttgtgggagaatgtggggctcatcgtggggacaatggcataccgttgcattattgcattatttgcattattaacttgtcctgtagcgctcgtgtggaggggagcttttagctcatacgagcggcccaactgtctatcgaaatcatcaaaatcgatcaggggccgaggtagagtgtacggagtccgcagatccggtgcgacccccaagccagaaacagggctgtcctttcattaattttctcggcatggcatggcatggcatcccgaccgcagtcccgaatccctggataggactgggatatcggatttccatatggtgatcatctgatttctgtagccctgctttatactccggactctgtactccgtattacgactcccttgcctgtccaatcgagaatatcgccctgtcggctggtcatggtcgatggcaaaatactgtaatactgcattgtacatccgtgctcggctgtcccatcagcgtaatgacgaaagagttgctgacgaatgcaagtagagttcgagtaacaaagaagccaatcaagcatgcatgatccctgtatcctcgcgtgtattcggggaatggggtaatgtcaagcgagctgcacgacagcgcccccacaattcctgcttagctttgttcgctgaaccttgggacggatgcaagttgagcatttccaaacttcaagacgaaattcagacactggcggcgtcgagagttcaggaaatccaaaattccaagaattccaagactcaagactcaaaaggtacgcagcgcaccatcggcctggcggccgccaccgaatgcgccgttcttaattacgccgccgcgccttcccgggtcgggctaagcggcattcactaggatcatggtttatggcttgttattgccatgtgtctaggatcaggcttcagaacagaattcaggatcatgattccagtatcaggattcaggatcaggacaaggatcgggcttgttgggagcctaagtgagccgggacaggtatggattggtaattagaacgcgccagaacagcacggctttcggtctcagctcctgcgccgtcgcgcgtgcagtccggcacttcaggtgcgaaatgccaggtcgaagtatggagtgtagatacagaatctaggcttagttggcttagtagttggctggcagcgatcggtggatgtacgcagtccataatgggcgggagacgatctgttggtagttgctaacgtagtaaaaataagcaaaaataagtacacataattgatgtaacattggatctgtgaatgtcacggtgcagcagccggattttccagagcattcatggttatcagtatacggtgtagaccaggagagaaagttgcccccgagtctatctcccttcgcgacgcgggcgacgatctggcgggcacaaaagaggaaatgtgtacgacaaaaagcaacgaaatgggacctccatttgctgcctgtattgtcaggagtcaaaaatcaagctgaaccttgcaggtttgtaacgtaagacaatctcgcaccgcctaacccgatccgtcagcggtctcgacgaaactcgaaatcacgacgacgtcgaagagaaaaagaaacgaaaagaaacgaaaaagaaacgaaaaaaacgataaaaagaagaaaaaagaaacaagcggaaaaacgagcgacgatcagcagcgtggcagacgaagccttacccaaagcggtttaattgatttgccgtgccgtgggcgacttttccatggacgcagccgaggttcaggtgtggcttttagccaatcaggcgtgtcccctttgattctgctcgtttattatagtttcgggggcgaattcaaccgagctgtccaggtccagtcccattattgactactccatcaggaggcctcagagggatcgacaacgggggacttgcgcgccaaattagacccgtacatcatcctgccaggaccagactccaaggctgagattgcggttcgggctccatcttttcggtctccagagtctccagcagagatcgtagtccagccggagacgtgtccagacgggatattttgaggataatcggctaaacggactttggcggtgatattcagacttttggacgcagttgtcgtccgcaacgcgctccgtagtgtttgcgcaaggaccaggtcctcgctcgggaggcccaagacatcgtatccgtgtgatcgatcactaagccattttgcaccacgccatgcaacaccatgccatgctatgccggtatcctctgttggtgaggcagcaataataaacgctcgagcagcagcactggcgcccgcaagcggtcctgacccgcaatttcccgagaaaacgaggcatgatcgtatctcaccaaagtggcccagtaaaactggttgaagcttaactgcccaggtcccaaagaatgccttggccatctcaacagactgatagccgctagtccggacaaaagtcgggaaaccatgggtcgtattattagatgtgatgaggcctgcatgatgaggaagttactggtgtttcagaccttcttaccactaagtacgtacgtacgtatgcgggcagtggctgctctccaccccatcgcggactggttccttcagcgccaggaactgagggtgggctccgtgcgccgcagtggccctgtgctttgcatagagcgcagcacaactgcatagctggcatgctgcaatctgtgagaggcttggctgtagtgttgcgctcacgccttgtggtcaggcggagttggcctg

SEQ ID NO: 4378 - DNA, 1984 bp, Emericella nidulans
  unsure (1)..(1984): unsure at all n locations
cgcgttgttccagacgtccagctttatccctcaactctccgctgtgcctggtttccctactatgcctcctgtctacaatcccagcacctgggctccacagattccggcgtcgactgcgcctcagcctctcaataatagcgtgcctacgccggcattgtctctgcctgatccttctaggcatcacagtccgtatcctgtaacgtcagccactatctctccggccgtgtctgcatacggcgttcacacccccacaacccatctctccccgtcctactttttggcgaacaggaactctccataccgcccggtccgcagcgtcaacaccctattgattcctccaccctctgcttcccttgagcaacagcgcgccattcctttccaccatatgcattatcagccgctgggcaagtcgacggaacgtcgaaccggcttgctaccttaccttcatcatgatgcgtggcctcaaggccatatattcctcccagttttcatcatacaccacattatgcaccctgagtttctcagtttacgcctcacgattgatgacacctacaccttcgcctgatatctctttcccctatgtattacacagtctttccccttctaccatgtacagttacacttttttttcttgttacgacttcgcatctgttatggcgttttggtatcatagacggtcttctatgctagaagcactgcatgcattttacacggggatatggaggtgatctgtctttgttatagcattaccatggcgtggcgttgtttactcctcgggtcaacctgccaggaggtctgcattgcatgatacgtgggtatcccgagggccgaaactggctgtattattctagacaataaggattatgagcgtaaagctctccgttgtgcacatatcttccagaatgcattgtagccaaaacagtcgatagagttaccgccttcagctctcattttgccgcgcatcatgggcggtgagaatatgctattcgaccccaggacgtatatatagtagtgagacattatcggtgagaaattcattgaatgaggcatacaatcaactaaaagattgatctcgctctctatctgaacttactaattacgtcaatacttgcttgagtagtcgtgcatcttgtgcgcttggtttcgcatacatagtattcacgggccgacattttcccgtacaacctgaggccgcagccgccaaaaagatcctgtcggcctcaatccagcacaccagccaacagccgggactcatcagacaatttgcaccgcaacaatgcctcccaggctccaaatactccctctgcatcttcgcagctctcttccccgaccctcaacgataccgcaaccatcccaattgctgctctccgttcagtcccaaacccgcaatgcacacatcttagcttccctctccgataacccgggggcctacaacaagcgcatccgacgaggtcgcggccctgcctcgggcaagggtaagacttctggaagaggtcataagggtcaagggcagcacggaaaggttccggcgggcttcaacggcgggcagacgcctgatattgtggtgcatggggagaggggattcaagaatatgtaggcgctttgctcttcatttgcctcatatttgatgcgttactgatgagttccagtttctccctcgatctcgcccccgccaacctcgaccgcatccaggaatggattgaccagggtcgcatcgaccccacaaaaccaatcaccgtccgcgaactcgcaaagtctcggtgcatccataaccccaaagacgggngtgaaactggttgcccgcggggttaacgcttccaccacttcagaattacaactcccgcctcaaatttgcggagcagaacaccgtccgctcgctggagaaggacccaaccggacccgtttcacattttaaacagccatcaactgttgtttgggcgcttaacgccgcatggtgcgtaacaacggcgttcgtcaacagctt

SEQ ID NO: 4379 - DNA, 4569 bp, Emericella nidulans
tcaagattttttgtggtaaagtgcctgactgatgttgcctacctatagttgacatggctgatgagtactatcttgctcagcccgatggtaagcacatttgatccataccactaatgagcagcactaactcattctccagctcactaaatcatataatacgaggattcgggcttgtaaagggattagatagaaaacagcggggatatctagcgttcatctatgcaggactctatagacttggggtatctgagtagtgtggcgctaattgtatgctgatacatgccggtgctttctctttcctatatcgtgtatatcactttcaatgcagttttgattgatttgagttccaaaatatttagcgagtcgtcaaaaaagttggtcggacaatagagtcatacttcctataacgtcgcaaattttatgaatttacttcaaactaatgaccacgagatttctgaacagtgtagtacggcaaaagaaattcgttagttaaaggcctggagcaggtgaagcgccggtttcaggatgctgatgagcttcgtcaccgcagagactaaagaaacgcgcgttagagccagataggccgactctctgccgagcctcttctgggcacgagagctatccctcaaagaaattgtccgtccaggttggcggtcttctggctttcattattattccccttgatgggacattaggctcgcatagaaccttgagtttgtcattcgtcttattgccggatctgctgcttaatctgagctgctcaactctcgggcggatctttcttgactccttcatcccagtctgctcgtcagcctccctatactcccacccctccacctcgctgctccggaattatattcctctaaactataacgattgctctgcacgataactctgccaatcggctttgcagaatcgtgaggctgggccaacgccaacaaacaatagtgggacacgcttcatctcgaccatccgcaacctcaccctccttaaacaccccgcctccacaataaccctcgctcatcctaatggcctcagccgggggcttgactcgccggagaggtggcggtcgagctactggcacagacgatcatgatgacagccgcgtctcctcccctgtctcccggaacggctccgcgatggataatcgcatccccgagccgtcatatacgaactcagaaaatgaacataaaatcgccttcgacccaagggatatttgcgagacgcaggagctttgcatttagccgaagcttacacttatggaagaggtgcttctgctcgggctgaaggacaaacaggtcagttttggagcctctccaggcgaagggttgttgcgcctttgcgatttaaacaatggctgacaggtacttgtaatttccgcagggttacttgtctttctggaacgaaaacatctcctatgctttacgaggctgcattgtcattgaactggcactccgcggtcgggtgagcatgcagaaggattcctctcgacgaaggtttcccctggccgatagggtcattgaagttatcgacgacacattgacgggagaggtcttgctggacgaggcattgaagatgatgaagtcgagcgagaaaatgagcgtgaactcctggatcgacctgatgagcggtacgtataccaaccctctcgcttcaacagtgcatgctaattgctgtgcgcgcaccaacaggcgagacatggaacctgatgaagatcggatatcaactgaaacaagtgcgcgaacgtctggccaagggcttgtggacaagggcatcctccggacggagaaacgtaacttcctcctcttcgacatggccacccatcccgtcgccgacggcggcgccaaagaagatctaaaccgccgagtgcgcagcatctgcagcagtcgcaccgtcattctccctgccaaccaatggcttcctgaggacatcgagttccgttacctgcgcactattaccatggtgtgcgccgcctacgccgcgaacgtcttggagaatgcgctagtcacaatgagccatgaagcccgggagcgggcttttgcgcaggtggacgaacttctagccgagtattctcagtggccatttgcgcgacgccccggcggctcccaatctatcggggccaatctggcccaagcgatcaacgacgaagtaaacaagaacagtgacaaggagcttcaactcgaggtaataccacctcaagtccctcaaccaacaatcgttgatacatgctaactctactttcaggttgtcgcggcctgtctaagcgtctttactagactcgattctcttctctaactctagctcttgtacttcttccgttgccttctttcccttctatcccattccatctactgccaattactattcgattccatcctattctctccgtccatattcttgcccttaagcccacactcggtgattatcaaacattatttccgccgcggggctcgtgtcccgctccgttgttttgtctgaaatagtcggcgtacgaggttaggttgggctaggttccgttgctccctgagttggcttgagcttaaggaaggacaggcagtgtttgtttaatatgaaagctagtctagcggaagcgacgcaatgtattacttttatgtttttctttcttggtcgagctccgtggatactaatctctagatctttgcctcaagactaacgttagtgttgcgctagcatataacttgtgaagggggggcaaaaggtttagaagcagaaaacgcagttcataagatgcagagcgaggcataaggcgaggagatgatatcttaagctctcataatatctacaataatttaccagctgtgtgagtcacttatcctggttacggaacagatctcttttacgatttttcaaagttgattatgaacgaggtcgaataagatacatacttaagatcccgttatctgtatgcttgagatgttctagactaatagctagaagagtacatgtgaaagagtgcaacgctatatagtacatatgccacaataacagtaaaaagaacacaaacaaccataggtcaagaattcacacgaagtacatgaattccgcctctcttgtgtcctcccgcagccgcagcatcagaagcaagaaattgcgctccattgacaaggtcgacgacgtcctcaacacgtccccgaacggtattgtcctccaccatacgcgcaatcaagcgcactttcttgccatccggttcaacatggacgaaacgcgtctgtggtttcccgtcgttgttcgggttgatgttcagaacggggttagcatctacagctgaaaggactgtgccaccgtctttgatgatggccggacctttggattggtagaggatgtcctcgcccgtgcaatcgaggacaatgtcgacgggtccccatttttttttacgaaacgtggcagcgaggtcgaagtttttcggcatagggtgctggacgaaaattatttcgtccacatggacttgccgaagttcgtttgctgcgtcttccgatgtgcaagtgacgcagatccaggggcggtagcgcgagaatagggacttggagcgaagaagatggagggcttgggtgccaacttcgctgccgtgcgcattcgttatgagcacacggaggtccttgcgtgcagtgaaatcgaggcccgcgtatttgaagagtgcttgccaggctgtgagggcagggagggggagggtggctgcttcagcggcggagatgttctgaggtttataagagagttcgtcttcggtcgctaggacgtagtctgctgctgcgccatcttgggaataatcgatcaggccgaaaactacgtcgtcgactttgaacttggggccgtcgggtttctcgtggtcttgcgtgggggtgctgatgactgtgccgcagaagttgtggacgggaacttgcgggatggacttcgatggattgagctctttcgctagtctaagctcatcgtgcgagaatgcggctgtttggactttgatcaagtattgagatgcagatggctttggagtaggaaagtttgtatcgaatactacttccgaatctactcttgggtcatccaaagaagtgtcatcccggagggctgtagaagctggacaccaatagagagccctcatcgtatctgggacaaaggtttgctcgtccatcgtcgttgatagttgtttggccggcttcattgtcgccgatatcgtcgtaactaaactatatcgctgcaagagttattgatcctgagccacaatattgactaatgaccctaaagctgtagaagcgatgagctttaattgaacggagacaaatgctgcgcggtcattgtatccgcggatatcatgctgtagcttcgatatatgcaggttatgagtttcgccacgcgagacgttgcgttgacgtaaccaactcaacagcaagttagatcaacagccaagtccactagaaccctagattatgatataaacagtggctaacattggcgacaatgtagtatgacccttcaaatccatcagtgaaggaaacttgagttatcccttgctctaatctgatccccatagatgagtcgtattattcgcgtagctaaaca

SEQ ID NO: 4380 - DNA, 3521 bp, Emericella nidulans
ggtcagaataatgtatgaagtatattaaataagacataaacccctcatgagcaaacaatccagcccaccgccgcgtcccatactacatacccagcatccccaaatctctctacagcatcatgaaaaaagccctctccaatcacacaattaccgttcattgctagcacacccatgtttgggtaggcagtcaagggttagtaaatgcagtttatctgctgggggttcggtaaaacccccatctctcacagtgagcatgtgagagctaaccttaaccccacaggctttatcgccgacggctacgacatatccagcgtgcgcacagctccgcgcactggaggcagagcttgccaaggcccgagcgctcgtcggaacccagacccctgaggagggcgtcccaattggcgtgcgctgtatgaccccgcaaattgatggcctcgtcaacaacgcaattcctattccctgcaaggcaaacgtgactggtatctggctctccctgcctcagcacaaggcttgctacggtctatcattgcccgcaatcaggagctccgagagaaggataaatgagacgtgagggttttcgtgcaagcggccctggaagcttttgaaatgcaggcggatgttcttatcattcagggctgaacctggaggacataaatcgtctcatcaggatagtgtaattacccttgcacctgaagtgcatgatttgctcaagagctgggaaaatcgggggaggtgggtatgatagcttccggggacatagtggatgcgagaggcttcgcggctgttgttggactcagtacttgtaggtggcttttgatgtactctgatacttgctgattttactgttgtttcagatgcagagggttcttggcccatggttaaagagtaagccaaagcatgatgccagagatatcttagagttacctcataactctcgtaacctcatcaacaaaaacgaatgcccaaccccaggcttgttcaaggagaaattccgtcaagagaaagttttttgctcaccatttacagtgccacgacgaccatcaaatcaagggtgcatgacgtgcttaggcatacggatttctggcatgacccttatgaaggctaagccacgatagggagaaactacaaggattctgaatgaggtaaaaaaaatgagatatcccagctccgtgataaagcgaaagctaacaaagagcaagaaagaattatcatctgggcgtaggtgttccttcatatatcttcaaattccggagattttgtgcttacaacagtatagcggtacggataccggctgcatcaaggaaatcgtcctagttgaacggcttagtgaagctatctgtgctgaagctcaatcaatggcagagcagatctgaaaaacacttaaaaaccgatgatgtggctcgataaaagccttcaatccatgcgtctgagataacactctagatgatcattagcgttgagacatacgtattagggaagataccataccacagagcctccaatgcttcctagcatagatcaatgtctggcgcagcggtctatcatcgagtttaaattcgcctccaacaatcttcttcaggtgagttgctgccaaaatggcctccccaacacatattaccgcgggcaatggcacccaatcaatcttgtcctctttgcccagcgagttgaatttacaacatatatcacggaccatgtggataaaagatgacagtgccagaagtgaaggtcttgtggaataggatgggtccgaacaggcaacttgggcactatgatcaatccggactcggtgaaggattaatgcagctctgcttcccgtcagtatgattctccaaattatgttaagctcacattagtgtcgtcgcattagctccacacaggacagcccatccacgaggagtctgctcaaacagctgttcagcaaattgcataagcgcagtatcaagcgctgtgaacttctctaggagagactccgcatcatacgatttttgaaagttctgcacatggcccaagaggcgagctgactgaatttcccgggcaaagtaacaaagtggaatctcaaccggggcagatattgggaactgaggtatacactgaagcaccccgtctaggaattgctctagggtgagatcatccactggcagccggaattggtctgataggtctgtaaccgcatgaggggctttgaagccggcatctacctgatatacaatactgtagaagcttagccattcattcaagttttgtcgtgcttgacgtaccgatccagcaggtataatcccgcccaaactctccgccgctcttcgccttccacccaagctagccggttactgtattcgctcaaatcgtcaatattcaatctcaacgcgtatcctagccgtgcaatgtttgcgatgcttagagatgcagcacctgaatcagaattcccgacctcgtgtagcacgagtaacagtccgctctgtatgagtggcaaggagggcccacgtctgagttgaaggaaagagaagagacctctgaagaggttatagaattgagtttgtgggacatcctgcgtgcccctgtgcatcactagaactatagcgagaatcaagagggcggtctctgcacaaggagtatggtccagctgtgccacctgtttatggagtgatttttccaaaacaactggtagccaaggatggatattgccaaagtactctgccaaaagacgatccaatgaaatggcctgttcgtttagtttctcaaaaaccaggttcacgtagagttcatcgatctccagagagtgtgtgccggggtggtccattccccactgcagaatccatgtcaaaagcctcattggtgcgctatcattatcaccgcgctgtcctgggctactccaattgtagttgcaagatcgtttcaggctgtttatgcgttaagcttcactgcagatcagaaacaagagaaaacatggcctacctgatgcagcgcgcgcaagccggaagtcgtttgtcgcatttgcgctttttttcccgacacgcaagacaggcgttgatggcattggctgaggatgggtctgttactttctgaatgtgttccattgagatgggagtggttgtgctgttatctcgacacacgagggttcaattgctgccgcctcaaccccgcccaaactcctcgcgctaggcgcctaggtcggatttgtcaggcgtactttgttaacattactatacgaactttaccctctgactccaccgcagtcacgtgttatccacttaattcgcagaatgcaatatactcccatgatgtattctacacccacccgtcacttattcttcttcgcgtccgttacggatcgctacgggctgccttctgtcaataaacaccttgctgccatgttcttcccaattccatatatctgtatagttcatattgcactctcctactattgcatatgcctaggaaatattcggcgcctgtttccggtcaccactgatgtaatatctgttggcgtgactggccagatttcgaagttttcaggccgctta

SEQ ID NO: 4381 - DNA, 5527 bp, Emericella nidulans
tatatataaatataagacagtttaatacaataattaaaataataataataaataaaataaagttattcaaaacatacgaagtatgaaagagaaaaaaaaaaatcataagaaaataagaaacaagagtaattagataataaagaaatgatagagcttataaagatacaaaatttaatgaataaatagaagtaacatatagaatataaatataaacgaatggatagaatatatataaactaagcatagaataaacataataagaatgtatataaaactcagcaaaaaaacaaaatatatggagatctacacgaaaaagaaataaaattatgaatgtacaaacaagaatttcgcatagcaatgaacagcacagcgcggcagagctaactgagagaaataacgaagaagtcacagccgccgtacaggctcactatgttgcagaagatgagcggaagtacggcaagcctgttccggatgaccctaacgaggtcgaaatcgtcaacgccaatttctcgctcgcttacggtggtatgcttctgctatcgcacacgaaccttcgtctccttaagggacaccgctatggtctttgcggacgtaacggagctggaaagtcgacgctcatgcgtagcattgccaatgacaagctcgagggtttccctccccccgaccaggtccggacctgcttcgtcgagcacaaccagggagaagatgctgatctgaccatcttcgagtatgtcaagaaagaccctaagattgccgccgagggtgatgagcatattcgcaacgttttgctcgagttcggcttcaccgacgggcccgaaggacgccagtcgcaggccgtgggctctttgtctggaggttggaagatgaagctggctttggcccgtgcaatgcttctgaaggcggatgtgctcttgcttgatgaacctactaaccatcttgacgttgcaaacgtcaagtggctgcaggaatacctcaagaagcacactgagattaccagtttgattgtctctcacgactctggtttctggacgaagtgtgcacagatatctaccactacgagcagaagaaactggtttgctacaagggacacctggctgagtatgttaacctttatgtcactctacaccatcagttgctaactattgattgcgcagtttcgtcaaggtcaagcctgaagcgaagagttactacactctctcggcttccaatattcagttcaagttcccgccgcctggtattctttccggtatcaaatccaacacccgctcgattttgcgaatgacagactgctcctacacctaccctggtgccagtaagccctcgctgaccggcgcatctctgtcgctcactctgtcgtctcgtgttgccatcattggtggtaacggtgcgggtaaatcgacgttcatcaagatgttgaccggcgaaactatcccccaaaccggaaaggtggagaagcaccccaacttgcgtatcggttacatcaaacaacacgcgttggaacacgtcgagatgcacttggaaaagactcccagccagtacttgcaatggcggtacgctaacggagatgaccgcgaggtcttcctcaagcagacccgtatcctcactgaggaggacaaggcacagctggagaagcctgtcgatcttggagacggcgccggtccccgccggattgaagcacttattggtcgacagaagtggaagaagtctttccaatacgaagtgtatgttccccaatccataccctttagctcaccttatttgtgcatactgacacattcaggaaatgggttggcctccttcccaaacacaacaccatgatctcgcgcgagactcttcttgagttaggtttctttaagatggtgcaggaattcgatgaccacgaggcctcgcgtgaaggccttggtttccgtgttctcgagcctaagactatcgctaagcacttcgagaacgttggcctcgaccccgaaatcgccaaccacaacgaaatttccggtctctctggtggtcagaaggttaaagtcgtccttgctggagcgatgtggaacaacccgcacctgcttgtgctcgacgagcccactaacttcttggaccgcgactctctaggtggtcttgcggttgccattcgcgatttcaagggtggtgttgtcatgatttctcacaacgaagaattcgttggcgccctgtgccccgagcaaattcacattgccgacggcaagatcgttgctcgcacaaataccgccatctctctggatcgctttgaagacagcgcttcatccactccccagcccggcagcacggccgccagctccgtggccaacagcgccgccgcctcagccgtcaactccggcgccgaggaccagggcgagctcaagttcaaggccaggaagaagaagaagatgacccgtgcgcagctgaaagagcgtgaggctcggcgccgtcttcgccacattgaatggctcaacagtcctaagggaactcccaagcctcccgataccgatgatgaggctgaatagatgctgggcgtgttcctttgtgctggttgcttgcatgaatgatgcatgatgattttttattaatgttctgggatagacggtgttttgttgagtcttgtatatacctatagacttactgtattagttttgctctcgcctgttaatgttttggtttcattgctttccctaattcaactttcatagagtagctgtgctccagctaagcatccgcctgccaagtgcagccctaactccagtctattagaagggcaagcaacatctccattgttcaacacgtttggcaattatagagtgatgtgcggttgtttacttgaagcagaaggcgacggcacgtgaaacggccgtcttacgtagccctgcggagctcgatcttcatctctggcctgtctgtccccttttcgtttcaactcaaccactttcttctcgtgctttccgtgttttttttttttctctttctagttttcaattcctacagtttctgttttcaacagttctaaatctcactgtttagttcttgtcgctctctacttcaatgaccttccctttccgcgcatgaaggcaccatgccaaaaagctatactcccgttcacgattccatccccgaggaagatcacttctcctctgacgacgaaagcaacttccggctccatcgtatagacagatctgcttctcgctcacagtctccgaaagagaatgaaggcgaacccgtcatttttgcttcgctcgtccgcaaatctacggacttcgagacatacttggactccctcaccgaagacgagcaacaactgctttctgcctctaaagaccatgacatagaagatcttgatcggtttggcgatggcactgctcgtgcgcgccggagattttccgagtcaaagaagcggaggaagctgctagcgaagcgcggcggttggcgcgcggtttactattctaaaacttggtggcgcacgctggtcgtcgtcatcattgccctgggattgttggtttgggggtttttgaaatacgcttctactcgcggtgatatttgggaggaatatgtgcgtttggcgagttcatggacatgcacagcgctgatgtggcttaggatatgcccggacctgactcgtactttcccacgcccaagggaggcacgctcaaacattgggcggaaagctacgagaaagcgtcaaagctagttgagcgaatgacattgattgagaaggtcaatatcacgacgggaacgggttggcagatggggatgtgcgttgggaatacgggtcagtgctcctaattatctccagaaactcaaagctaaccatatcaggccccgccgcactcgtcgggtttccgtcgttgtgtctacaagatggccccctcggaatccgtttcgcagaccatatcaccgcttttcccgctggaatcaccacaggcgcgacatggaacagggacttgatgcgccagcgcggtgctgccatcggactggaggcccgtctgaaaggagtgaatgtcattcttggtccttccatgggcccccttggtatgatgccagctggtgggcgcaactgggaaggctttgggtcggatcctgttcttcaggcggtcgctgctgtggagactatccatggaattcagagcaatggtgttatggctacagccaaacactacataatgaatgagcaagagcacttccgccagcccaacgaatggggcatcccatacgctctttcctctaacatcgatgaccgcgctttgcacgaggtgtttctttggccgttcgctgaaagtatccgcgcggacgtggctagcgtcatgtgctcttacaatcaagtaaacaactcccatgcatgcgaaaatagcaaactcttaaacggcattctcaaggacgagcttggattccaaggttttgtacagtcggactggctcgctcagcgatcaggcgtcaacagcgctttgggtggtcttgacatgagtatgcctggcgatggtcttcactgggcagacggccggtcactatggggtagcgaactcacccgcgccgcactcaatacttccgttcccatggagcgcttaaacgacatggtgacgcggattgtggccgcctggtatcagctgggccaggattcttgggagagcccagctcctgacggcgatggcggtcctaacttctcatcctggacggacgatgagtttggcttccggtatcccggcagcccgggtgatacgtccgctgctcgcgtaaatcggttcattgatgcacagggtaggggagaagaaggccactggaacattgcccgaaaggttgcagcggagggcatcgttctggtcaagaacgtcggtggcgtcttgcctctgtctcgttcacctagggccaacgctgagaggccttatcgggttggcgtatacggggacgatggcggtcccgccgctggtcccaacatctgcaccgaccgagggtgcaactcagggactctagcaatgggctggggtagtggcaccgtcgaattcccatacctaatcagcccgatcgatgccttgcagggcgcatggcaaagcgatgttcagatgacgccgtatttacgaaatgcggtgatgcctgcagacacgtcggacaaggatctctgcctcgtcttcgtcaacgctgactccggcgaaggctatatctccgctggcggtatccacggggaccgcaacaacttgttcctccaaaagggtggtgatactcttgtccataccgtcgccaccaactgcggcggtccaaccgtcgtggtcgtgcacgccgttggtcccgtcattgttgaaccctggattgacctccccggagtccaagccgtactcttcgcccaccttcctggagaagaaagcggcaacgcccttctggacgtcctattcggtgatgttgacgccagcggccgcctcccctataccgtcggcaaaagccttgaagactacggtcccggcgcgcaagttctgtacgaacccaacgcccccgtcccgcaggtcgacttctccgacgctctttacatcgaccaccgtta

SEQ ID NO: 4382 - DNA, 5143 bp, Emericella nidulans
aaggaagatgaaaaaaagaataaagggtaaaagaattagagggtaacaaaaaggagagagtaaggagaaaatgaagtcggagaaaaggagtaagaacacaagggtaaaaaagaaaaagaaaaaaaagaagggtgaagagaaaatagaaaaaaaaatgaggttctagaacaataaaagacaagagagggatggagagaagagataaggagaagtaggaagaaagagggagacaaatgaagagaaaggtaaaaagatatatagaaaaagacaggaaaaagaaaaaaactaagaaaaattaaaaaataagactgaaaaaatataaagaatggaataagataccaaggaaagatgatagaaaaaagaagacgaggtccaaatccgtagttggaaagaaagaaggttaggaagaaagaagaatttaggattaaaggcaggaaaaaaaaaacatagcctttttcatatcctgcgagcagtcagcagagtccaatatgataatgaaaacaaggtataccaaaggggacattcccgttccgcatccacgaaacggcctttaactgctcgaaggaagcaaaacgagcgatgacacttcctgtgaataaatcccagatgatggccgtcttgctggcatcgtagctgattactagccgtcctgctcccctctcactcacattgtccaccgatataaagatgatatcgtccttgtggttctcaaaccgccgttcaagggctaatgtgtcatggtgaagacaaaggatggcggatccctgggcatataggaagagcgatgctgtggacgcacaggcttcgaaccttgcgacagccccctgcgttcgggaaggcattggcggaggcacggacacaatctttgacgaccaagtatccggcatgggattcctgttccaagcaacttccaccataattccgcccgaatccgtgacttgatagcacaacctccgctaggccaagtaagcggttcacagacgctgaacggagcgtctcaggaggtaggccaataacggagctgggagcgttagaagcatcaccgttaaagcaagaaatgcatcgagaagggtcgggatcgagtcgaggaaagatgaagcggtcctgaaaaaagctggagtcagcaataaatcagcggtatacggagtgagcggaggtggaatactcagaaaaaaaaaaattctccagaagaataagcgataccaatctgcaaggcgaaggcgacacaaatgcaggagatagatagctcggcgttggtgctggtgctgggatgatggaggggcggggaggtgttggtgatgaagatcggcgaggacggtggtacaaccagcccggcgactctacaacgaccagggaagcaatccccttatgaagataccgacggagcagtcgtcaagcaaaagcccacaaattaagatttaacttggactcggaggcagcaagcgatgaaggcagcggtaagggtcgatccaaatctccagcattcaagcaatgggagcgagggccaagggaccactggcacttctggcaggacaggggccttgcaaagacaggtaattagtgggcgagcagcctcatggtgaggcataggctcgagctcaatacccaacgagcatcacgaaggcatcgtctatcaggtgtttgctcgattaccgtccaattagtgtcgccccagcagcgtgcccgagtggactcggaaatgaagttggaacatctcgtctcgcacctccagcagtgttctgccactgacactgggttgcaccctgcgcgatcataagactgtccatcattcagtcggttcgaatcctggtcttcacattgctgattggctacatagccttcttcatctgcaggcctcatcacctgaccggccaatgaaatgcggtaactgcggccttggcggtatcacgggacccagcagggcgcgtaaatcggcgaccgccaatactgaggactggcagtgttcttcttgcgcagtcgaatgagatgccaatatcgcctcgtttgcgcacaatggaaggcagccatcgatagcagagatgggtcctccccctatttaacggggttgcccactgcatagggttcctggttccaagtccaccagctgcgctcaacacgtgatgtcatgtcaccgatcagtgtgacgggcagttggtgggtctctgtgcggggagagccgagagcttgagctggggaggtgatgggattctgctggacgtcttaggatgtgatgaactccacctttaagaaaagagctcgcgctaatgctcgatacctcaagctgcaggttcaagccaagtcgaacggttgaacgtatctcggtagccgcgctcaggcatggattcgagtgtggatgatcgcggacgtacgtacgaaaccgaaggattttagacatcacgttgttttcacgtctagcttgcatccttcagccttgaacttggtgacgcaatccaaacatggttcattgtgcctgcgtcgagtcggtgattaccgagttagcagatgctaacatgaaccactgagcttggtgcgatctccaacctccgtcattctcataacagacggtgcgccgagttacgctggccccgcctggctattgatgcggctggtaaggaaagaaaggtactctgagtatgcgcgcgacttaatggccaagacggctcaagacgggccgtcacccggtccctgtcaggtacgcgcacaggtacgtgcactggtaggataaaacagagcttcacgctctcaatttcgatagatcggtgaggggcaatctgctctggctgatccagccaactttggaggatcgtccggtgcgactaggggatagctttccgaactcggccgtttccgaggccccaatgccaatccgcgctcaggtttgtgaccccgggactgcacgatacaaggggataagctacggcctggggacatagctcaaacgtagccgagttgccttggtgtgaaggccaggtatcaattttgaaaccgtacgttcaagaatattggcgcagcgaggaatctagcactcggaacaatccctgtagaagagacgccttctggcctgacattgctgatcatcagcccctttgcttagttggccattgaccttgcttcgtggcacctcgttatcgtcagtatagtagtattgccattaatattaatcgaaacgctaacgcagcacatatagcaaatgtccgtgtacaagcactattttattcaaggaacgatctgttcctcatgctgggatgaagaaactctgagcactcctaagcaaattatagatttttacccataatcggcttgctctattgataatggatatatgaatccagaggcgtgacaattgatagttagtttatactctctttacgcacgaaaatactagcttccacctgcagaaaactttcgacaagatctattaaatgagaccaaaaagtgcaaggtcagtttgtttctgaggcagacaagtatgcgaagaaatacccgattcgctaaagtagatactctcgataaccatcgtccgccaacaatgcagagtatgcgcatctaattttccagtaataagcaatacctaattgactaataatgactgccagacagcgccatgtaacacgaaattgtaaaccatgcaggtctcatacaacaccctgctcaaaaccatggacgtttgaagctggtggtacttcatgttcatgacattgcgtaacagactagtcctggcatagggcccaactatcatcattcaacttatgatcgctcccaccagcaggtcggtggtatcagatatacaagggagtacatctggtaaccaataataatcatgtcattctcccgacatagagcactaaaattgatctcagagctgcccaagcaccatttgcgggccggtgagattcgttgatggctcaacctagctgaagaaacccagacagaggactttcttaaactgaatctagctattgtgagacgcaagcataaattgtcacagctctcgaaagggtcgggatatattggtgaatgataggttttctaacatgaactccatccaggaccgtcggttgggacaccagtttgtggcactccaccccagacttacagtatgcaggcctggcgacagccttgttggatatcaaggtcccgattgaatccgttgtagattctttcattgccctatctagacgaggaaggctgtaagaacggattcatcgacttcttacagaactagctctgaaggacatggcactgacaggatgagcaggcactatctggcgctcgaaggcggttagccaatctttatccggtacattagcgtcagataacgtctaaccacaaggtcataatcagctcccattagagctataatgcgcgttgcccagtatcaaatgtcgggtctcatcccttgtcatgtgtgcaagaggttgcctccaatggaggcccatgtttgagagactgattgatcgcaaggcagcgttgtggacgagttatatgcggatgaacaagagttataccttgtcacaattcagaattcccatgcagagtcaaaacaggccggtggcctttcatcaccgtttagcttccacccaaccttccacccatgccctacaatctgaagttatcatgacttgaagctcgacaaccagggctactgtgaacagcttccagttacagaggtgagataatggattgttcgggacaggactaccctcattatttcaacattcgagctctagggaacttcaaggtcacttggcagcttctcggctcaggccgttcgagacaggcttgaagacgctggagaaaagcgaccgaccgttccggcaaaggcttaagaagagtatgccgacccaattagatccagtctggtaattgtggcgcgcaatgactgcacaaatgatagggcgtccggatataatgggcttttggcaattctaattgctcttcatctcactcggccacgcagcccaggacaccctgtttataacgaagacatcttctagagacccgccgattgggttgagctcacaaaaagcagggtaaggctcgactcctctgactggacgacctattgactttgtaaggcaatgtgccattagtagaaagctgttgtaaactcgcatatcagctagctgcctgaataatgggg

SEQ ID NO: 4383 - DNA, 4733 bp, Emericella nidulans
ataaatgatatatatttgagaaatatcacaaatataaagggaggagcctcataaaaaaagaaaaaaccacgtccacccaatattttcccttaaacaagacacccccccattatataataggggttataacttcacaaaaaacgggcccaagagttggcccaagggccaggttttgatagacaaaaggagggtttcaaccgccaacaaccaacttttcaacggttacatgtcctggttaggaaaaaatttaattggccacccatgctccccgacctatcgccggtcaccatcagattggtcgggtcatatgtcccaggcaaatgtgcccaggttgcccccaagggcattgataacgctcggtatgtgtacaagtatgcctatggtctatgtaaggccccaaaggtccagctcgtgtgcaaaagggttctgaactttatgtacgtaccgggacatttgtctcacatgctttttaagacattgaagaactcccctgcgcgccgtggtcgaaagacacggcgcagataagaagctttccccgtcaccaaggtcatcatcgccgaaggcaaagaggatattactatcaaggtgtccgatgaaggtggtggcattccgcggtctgcgatccctcttgtctggacctatatgtataccacagtggagcaaacacccaacctcgacccggactttgacaagagcgacttcaaagcgcctatggcaggatttggatatggtttgcccattagtcgcctgtatgcgcgatactttggcggtgacttgaagttaatcagtatggaagggtatgtgcttctcaatgattgttatatggcattgcaacttacatgatccaggtacgggacggacgtctaccttcaccttaaccgcctatcatcgagttcggaacccctccaatgacaattaccagtcatgagggatggtcgcgttcggttttctacttcacacaggctccaccctttttattcggaacccgatccagcgccatctcaaggattgacgccaatgaacatagaagccattcgcgcacggatgcgcaccagggaagtatctgagcgaaagcaggttggagatgcagcgagcctgctgaacgcggaaaaatgaaaagggctactttgttggccagaaaaagcattgaatagctgagagactggactgcccaccacggcgtgcgtactcgctcgctgatatgcgctggacgagcagattcaggcctcctaccgcggttatagaacggcgaacccgcacgcgacccgccgtgctgcgggtcggtctttcttcgaattcgtcaattgaaatagaccatatttgaaagcgtcgttagcgctaagcggtcacgcttggctcatgacacctagcggcgacgtcgcaaaatgccatggtggtggttgtcgggcaagcattgtacatatggtagagtggcttctcccgactctggcttcctcatctgccccctcatgatcgtcaacattcctgatatccttcgcctttatttctatatacttgtcgtgtacgatatctttctggtatttggttcatcatgtactgaaacggccatgtgcgaagtataaggccttcaatgtaaggcacagcaatatgaatgtcaaatccgttgatgtattcagatgttttttaacgccgaatgtaatgcaccatcatcaagtcataacctacaatcatcactcataagcccattacctcactcagcagcgtcagaacgaaagcccagcaccataatcctgcctctccgccccgctccatcttcgccttctctccctcgtctgctgctgccgcccagacgacaccctcctacccgctctgctcctctcaggcgtcgccctccccttcatcttcagtcccgacataggcgacgacgccgcagacggtgaagacgccgccatcgccgattcagacgccaaatccggctcgggcttataccacccggagtcgtctgtttcgcatacgtcaacaatgctccgcgagacgaccatcggttccgtgctgaatggcgaggacggtgtagatgaggttgggcgctggatcgtgaactggtcggcgcggatggatgctgctgttgtcggatctgagggagagaggagagttgagaggaagcgccgacgggcttgaggaagggtctaggaacatcggtcagataaatgggggtatacgggtacgaatgtgggagccaaaggagctaacctcttgtgcagccaaagcttggatcgtaagaagctcgcggtccattagaacacagagcgctgcatggcgctcctcacgtagccggcttcgcattctcttctcctgtgcgctgggaaccgcgtatgctgatgtggacgcggacgccgccgatgcgggcgtgaggggggaaggtcggggtgtggagctggagcttgcaccaggaccgggaatatgctgtcttcctatttggagttgacgttagttaaagacctcaccacgtaggtacatactagatgactgaatttcaggatcacatactgttaaaagtcgccattgcagggtgggggttctcatcgtctgactcggagtcgattataatcggggttcggctctgagtctggggttggtcggtccgccatgggttcgcggtggggaggttggggagattgggactgaacataatgtctcgtatgggttgcagctatctggtagtcaataattataggttactgcaagtaactgccaccggtcaatctaaccatgatgggattaagcttgtttagctatgaagtctggaggcggaagcagactcacgttccccgcctcacgtgagagctatagaatcgtcctatcgctttccctccaagagagagcgtctccgtcatcactatatggcactcactacgcaaccgatgggaaaaggactgaaagataccatagctcaaggactcagcaatatgacattcttgaagccgtgccactggacgatggagtgggaaagcctagggtattcggccaaccggctatacctggccaacccctcaactgtgcctcagccataagtaaagtagagttagccgaggtgcgataaagaaatcaaaccactatcaatcatacaatatgtcaaacaaacgagcaaaacgtccagtgcgagttgcgaactgttctggctatcatggtacgatactcgtctgacctcccgcgttcagtgatgactatactaacctccacgcaggcgatccggcttatgagatgtaccgtcaggcaacgttgggcgatgtcgactttataaccggcgattacctggccggtatgtggatcatggacgattcctcaatcagctcgagtctaacaagagtaagaggtcaatcttgcaaacaatgcggaggcatggcgtgccggaaagcatcccggctacgaggagacagcttggaagggcatccagcagactatcgatgtcatagcagaaaagggtatcaaagtcgtgatcaatggcggcgcgcttgaccccaaagccctagccctgaaggtccagggtctagtccgcgagaggaacctcaaccttcgcgtcgcatacctatcgggcgacgacgtatacgaccgcgtcggtccaaacatgcccacaacaaaagaagaactccagcatctcgattcaggcaactcctccgccgctccggccgccctaacatacgccttcctccgaggcacagcagacggcaaacctattcctatggtctcggcgcatgcatacctcggagcgcgcggcattgttcacggtctgcggaacggggcggacatcatcctctgcggccgagttgctgacgccagccccgtcatagccgctgcttggttctggcatgactgggcggagacagattatgatgagctagccggtgcgctgatagcgggccatttgattgagtgctctgcatatgtaacgggaggtaatttctccggctttgacaggtataatttggacgaccttattgaacccgggttcccaatcgccgagatcgacgccgacggggcgtgtattatcaccaagcacccgggtacgaaaggaatggtcaccgtcgatacagtgcggtgccaattcctatacgagctgcaggggacagtctacctgaacagcgacgtgaatgcttacatcggagatgtggctgttgaggaagtagaaaaggaccggcacgatctgcttctctctttccaagacctgaccaaactaataatggtgcacagcatccgcgtttcaggaatcaaaggcaccgcaccacccccaaccaccaaactcgccattttctaccaaggcggctacgaagctgagattcttctcaacgccacaggctacgctacgtcgaagaaatgggacctgcttgagaaacagattcggtattttcttccagactcggtgcaaaaagagcttgagacgctagagttccaacggtacgtattccttctctatctagctgcaccgttccgtctacaagggcgaaataaagagctaatatcttatatcttgcgttgcaggatcggcactccctcgtctaatccaatatctcaagcatctagcacaacataccttcgcatctttatcgcctcacgctcacctcacgctcacctcacgctgtgggtgcagtagggttagcgctaaggaatatctcattgaagcatttttcaggttcgcttttctccctgtcatatttcccatgccctattaaaccatagctaacccctgtccaggatttcacagtaccctcgacatg

SEQ ID NO: 4384 - DNA, 6059 bp, Emericella nidulans
tgtataatagagggagaggcagctctattatagtatgctctggcagggggctgaggaggagctgtaggatccttttaagcctggttttgggcctgcccgcggtagtctctgcggctatttaggcaattaggtatttagtatcaaggcttatgtatctcactgctgccctctggaggatgctgttgagtagagcttctgggtctagtaggtctgctttgcagaggagtgctgcagtaggggtagtcttgtaggctgggataatagctagggctgctgtgcagaagagagaaagcagggagttaactatccctttttattgtttgcctgtatagaagacttctgccctgtacagagctgttagaagaatatactatataactgctgcctgcatggaggctactgggcagctatactgggtattgctaagtctctttaggtgctaggcaagttgtttccgcggctaaagccaaattaatgtgggctttaaaagtaagctttgtatccagaagaactcctaactactgtatatataaagatggtgtaatctcccctataccaggtagagtaactatagggagatgctgctgctgctttctagagaagtattatatctctgttttctctattaagaaagggaggcctgtctctgtccctagagcagtaatttgcttgtagacctctaccagttgttgtgagctctcttccagggtattcctagttaataatatgcctatattatctgcatagtagaaagagccttctaaggtagagactattcttgctgtatatagcaggaagagtattagggataggggggatccctgggggagtctgcctttaattagtactgtggcagtgccttctttaatataaatagatacagagcagccagtaagccagtccttaagtagctggagtaagcctttatactatccttgcaggtgtaagtgagaaaggagctgttggtatattacagcattaaataccccttttacatctagtaggagtagtaaagcatcttttccctgttaaaaggcctcctctaccctgtaaacaagaacctggaccaggttaatagcagagtatcctggcagggccctgaagtagcagggggctagtatatctgcctaaattgctcttacagctatctactgtgctaggaggcgctctaggcctttacctagagtagagaggaggctaattggctgccaggtattgagttgggtatagcccctctttcctggttttggtaatattattacctttgctgacttcaggctcagtagaaagcagccttcctctatatacctgtagtataattgtatgattgtatcccctagtacaggccagagctccctctaagcagtggtggcaagtctgtcctccctgggggcagatgggggtggggcacagagagcagcccagtagtgctcttttgttggcaggtgtagtaagcccaggggcttgtttgggggtccttcttctgtctgatttggaagcagggcccccttctctaagaggtgattaaggaaggtgtctgccttgccctgtagggtagtaacctgtgccccttgtatattcaggggagaagcagtaagctggtctagatattatatctatttagcaagtttaaatatatctataggtactgtggcttgttcaatttgctgcttctagtattcagcctttgcctgtataatggccttccagagctgtttatagtcagggttttattgctatcttgtttggtatagtatgtctgttagttctggagtctatcatagggtcctggggagtctgcaagtattgtatcttgatataccttgtattgcaagctgggatatctggaccagttgtttggctagtaggttaattagtaaggttgggtcaggcaggcttgccagggctctggctttctcccagttggtagatctaagcttgtatataggcaggggctcttcttgttccagtattattctaattgttgcatggttacttggagtctttagatggtcttctactagggcccttagtagtaggttagagaagacaaggtctagggtgtttggtccacaggtgggggtgcctggctcgaggcgaagttccagctcataggcatcaagccagtctaataatcctgttatgccaggtgtgacagtataagactcagtatctagctgccagaataggtgctgggtattgaagtctcctgctaggatggtgttctctgggggtgtatatcctaggagtatggaaagtataaaaagtattgagccagcaccagcaggggcaactaggttattaggggggcggtagatattaataatagtaaggcctgctgtatagattatggtgatgtctggtaagattagttctaggagggaataggctgggagatccctttatacatatattagagtcctgggtctggcagtccatcgggtcgggggactaaatagctgatattgtgggtaggtcttggttaggtgctttgctgtatttgtccaaggttcttggataagaataatatctgcttcaaaggagagtagcaggtcatatacagcacccccccttcctatattagcttatagtattttcatagttcaggggaggtcagggtttggtttaagagctcctgggtgagctgtcttgtaggctggtttgtagtataggtattatctgtttattatttagagctttcttctgctttcttctgctcctgttagaagacaagctggcctgccttgcagatagcagctagagcatcttttgagaggcaggtaatagtgttcctctggatatagagtctggctgggcatttttagaagtctactgcatgcaggccgcagcagttaatatactgcatatagcagttatattcctgttttgaggatctgtaggagatatagtatttgctggagcagcaggcttgtatatcatggaagcagtggcatcaggtgcattgcaaaggcctttgcttggggcaggtgggccttgataggccagacaggccaaagagttgcaaggggtgttgtagcctttttggaaaggctatgactgctgtaatagagtccctctctactaggtactttgagagtttggctataagtagtttaataccagtaatgtgctctgcttcattgctgatatctgtaattatagtatctatctatctatccagggaccagagttgtttcgggatccaggggatgataacctggtaatactctgttagtatttcaaagtatccatccccagctaggcttgcagccttctctgacagtaaaaagaccttgccttgtttagttgtagtaattacatatcctattaatattacttgtacctgtgcaatcctgtccagaactttccctgcaagggtaacccagatgccatgtagtccaatagcccagaggctagaggaggccaggaggcagaggaagatgtggtggtcagtcttgtttggctacttcagcttttgttgtgctggttgcttggcttgcatacagtgttctggggcaatagtttgccagttcccctgaccagctcttggggctgtcagggatgcccaggttgtaggctgcgaggtttgcctcttcagggggccttcacaagcttcaggagtgggaggttggtttggctgttctatctgcctggatggctgtgggggtgcagctgctgtcatcagaggaatcagctgaggggagtcctgttttgctagggaaacaaatctggctgcaagcccccgggccaggtctcttgggcggccctgtagagaggagacagttagatctagagctttagcaagagaggtcattgctagtttccaatcattaagaaggactagctggtcgtctgctaccatgctgacctgctcgcagatcgatggggcttgcggcaaatgggatacagggaccggagctgcagtgggagtcttctgtggggagaataaggcccttctcttcagggagttccggggtaggggggtcggggtggtaggtcctgaggggggttcagagttttcacccaggagcggagtccccggacgggctccgcctgggggggagtcatccacctccatggggtggagggaatgatcgatgagcaaagcgtaagagatcagttattggagcagtagggggccctgttctcccctcgtcgtggtggactgtcagtgctcgggatgctttctgagccgagactctagtagtgtactgcctgtctacaagactgacacgttgtctcgggagtattctgtccgcatggggtctctagatagagagcgcgatatcgttacctgggaacaacaaaacgcacgagatagaaaaccccggatcgccaggtttccctgctttacaactagaatgtgaggacctgtggaatcgacgctgcataaaaccgctaccgagcccataaacggccgcatttccacccgtaactctttaacagcgagcggtcggtttacgtgggcaccaaatatggccttcgccgggtacgatctcatagatggcatcgttgttgtcggggaccttgttgtcttggccgaagacgagcacttgctgcggacttgaatagggtgccaaacacagtcagtgcggccgtgcaaagacacaagaattgcgggaagaatcttttgatcgcgtggtggtggtatggggtgcagtggtgaaggagcgatgagaaacgaacctcgagagcagggttggctttatctcagttgcctgtctgtgactcagaactgtgccacctggccacctggtttcatagtccacacactaaactagggcgcaggagtggcacatgcgccggatcgcccggtgcacgcacggcaccaaattccaggttccagcacggggacgaccagtgagatgtgctgatccatcgcacaccggaggattgcaacggcagctgcagcagcaacttagaaattccgttatcgctcatttaccttgccaacttcgttcatgtacatagattatcgtgcatgttcagaatgcggccctttcacatccttcagctgacaagtgcgacgtcttgatataagttacaatactccggccagttcaatggtgtttggtcatttcatgtaacaccctgctaacaccctgcttttaaagccttgttgttgctagactccgtatcaattaaccagaagagaagggccctaggctaacagagtatccgccctgaggcccagttagtgcttttcggtgtcctccaggatcctcctccgttggacgtgacatgccgcggatccacctaacattgtagttgccgtaccgagtgcgggtctggcagagatcttatatgaactaaagagtggcaactagtatactgcgtaaacgtcgattcgagaaacgctaagagagctagggtcaaggccaaagatccacagggcctcgcaaggcgatggcccaggggcttcaagtggctgtaaagtctgcggcccactggaaatgagtttattttgacggttggtctagcgacgtagcctcgtgctaccacaaggacggactggagacaatgtccaaggcaatggcgtagtattctggtttggacccatctacgtcgatattgctggcgagtggccttgactcgaagcggacggtaactagagtagacagatgcgctggaatccttttctgtaccggcaatttcattcacgggcagaaggaatgcttctcatccgtgataagtagaagaactgtttgcgcccctggacctgatcgtatgaatcgaggctgccttaaagtaacttcaagtatatccaagagctgcctaagtacactaacagctgtacgagagctaatacccacgaacacccagataatatacggggggtaggcatcaatagctgcatcaatctcgatgccgtacagccaacttgaggtacccatcaatgaccagataaagtctggcccaggcacaatttatgcatcccgatggcgctgagagtcatgtaggcgtctttgggcggctacgggtgctagttgagtgtatattgggagagctggtctgtgcggacgagaaattgtcagctgaaactggccattcgcacgtgc

SEQ ID NO: 4385 - DNA, 4469 bp, Emericella nidulans
tttgtcttgttgcggttgggaagacgcaaagctgtgtgatgccgaaaatcgttagcgagctgattggactcgggaccctctggaatcatggagaagcgacaaacgccgtcatttgccatacaactgtcacgcaatctagatctttttcctttctaaagattacacttttcttgatgatatttaaagaaataggatttgttttaggggaaaatagttattgcccgcatttcagtatgtagaacaaacccagcagaatgccaggacgccctgacataacattacgagattcaacggcttgtcaggatatcaagtgttcttaagtcatttttatgctgtcaatgataatgcatacagcgagttgctgaatttaaaccctcagcaaagtgaaaccgtcccagataccccttcactctatgcaccgagcctcattaaccatctaagccttaggagcagctgccctgatcttggcgtgagccttctggacctcgaaacgagcctgtatgtcatatgttagcctttgatactaaactgtactgcggctcctatatttcaaaagccccatattccagcgccatttgatagattaaaagccatatcgcaacgtacctgcttcctgagtctaaggaccttgaagcgctcgaagtcggtcaggttcttccgtcggttgttgatgtccgccttctgagcaatggagctcttagcccacttgccgtcaatctcgttctgcgcccagagcttcttcacgggaccggttccggcggcacgggggagcttggggataacgaagtgggtgagagtggcgtgagagagagggaggacgtgacgaggaacgatcttcgcctcctcagtggaagggccgtcgaccaggacctattgtcgccgcactagtcaatttcacattcatcatagatcctccttcaagttcaaatgttcccgtcgcagagttccggatcgcaaaaacgtacacgcttgtggtcgacaatctcgacaatcgtggccagcttgccggtgaagggtccgcggcggattagcaccacgcggccaacttcaacaagcttccattgagcaatcttgacatcgatatcggccatggcgaaggcttcctatatggtgaaaaataggcttctcagttgacagttttcacggcagcgaaagggcgcgtatacactcacggtcgacagttccggggaggggtggtggaaattgttgtcgaaagtcggggttgtcgaagtcgtccaaaacgcacaagttcgcactcgactgaccggatcgcgaatttcggtgttgcccacagactcgcttaccagccagtagcagctctcaacgtcttccgtgcggtgtggcctagggctgccgcccgaagaggcttagtgcgtttagcggaacatgtattttttccgtttctgcagctttaacttccagcaacgatcatcgcatgctttttctctttttacagttcttttcaacagcaaaacactcgactcccgtcaagtttatgaagctatcagagcttccagagcttgatggtagctctattaccttgatggctgatggatcctcatcacggtaatcataaaccaactaattataccttgcattcaggcccattgtttactggtatgttggcacctattgtcttttctcccttctacatgatgcggtaatttgcgattgacacggtgtctgtgaagctctcgccggagtttcgatacagcactgtcgcatgatattcaatttcttacatattctgataatttcatcacttcgccattatgtcactcaaatgtggtctattcttctgctaactagcgaagacctcaagcagatacctaagtcgaatgactaccttttcactctatcccaccctaatgggtatgttcgctcgccctgagttttcgttatccccgtccgatgattacaacctatcatgcctagatagtacttgatgcctttggcaaagataaatccttaatcaccaagatctctgaggaactcttactctcaacacatatcactcgtgcattgttggcgactccggctgactttggtcttactaggtttctcattttacatatattaagacatgactcatgcaactatgttttgatccccttccatctgctcctgcatttcaatcttgtggccttggggccttgtagtctcgtattattgtagatttagtagtagcgttctacttttgcacatgtatatgaagtttggtattggtaatggagtctagacttcaaagactacagctgttatggagccttcggggcttgggcattcgaaacaacgacgtaggtgtcgcagaacacgccgtacagagtagtaagtttaacaatcttctagccggggcgaattacaaccctgcaagtaaccaaatagaatgaagtatacctacagtttcatacctgtatacttgaaactgtcctgtaacgccagcgacaaagtatattcatgcagcgtgtacatagcgaacgatgccaaccgccaacaatcaaactaaattctacattatgatgcattcgcatttcatcaagtccgtgtatatcattatgtgcaactgggagcagccgtaaaattctaggacgaaattccgttgcccaaggccgaagcagttgctgacggcccttcacggttgagcacccacatgaagatgaactgaatgacgtaggagtagataaacaggaactgcgtgcggcggttgcgctgagagcgagcaacggtgtgcattgagccggtgcgcatagatgagtcgcttgtggagtcgggcagaaggacgtatttcagggaacgaagctgtgggtcaggttagcaagtttcagactcacagtgctgatcgaacttacaagaaagaatgcgttcgccaggaacgtgtagatgaatgctacccatccgacccagctacctgttcccctcccaggagtcaggatctcggaggcaacgagggtgacgattattccgacgaatttgtagccagaatatgcgaccagatctaccaattgggagtcgttgttgatgctgaggatgtacatggcgagcttcaggcagatgatttcgaatacgatgaccgcgattgctgtggtggtggtcgcccaaggagttctgggtggaagttcccacggaaacccgccaacatagccgacaaaaggatgtatgtgacaagggccatcacagggatgtacatgtcaggcgagttgatatcatcacgcggaggtaggaacatggacgaatattgctggtgcgaaatctggccatcaggcccggtcgaggcagtggtaagacgtgcttgctgtcgagaccatggtttgtgtcgccatgggaaaagcacaagccccagcttattgatcacgtaggagtttgagacgttgaagtagtgcttgagggctggaatggatacgtagcggttaaactggtttccgatgccaattagcaggacacctatatagaatcaaattcctgaaggaagcttacgttctgctccatatattcctgccctgccgccatcgcagttttgcccatatgaaaccccatctgcgccgtggggtcattaatgaacccgccaaatccaggggcatacgtcccactgccgccttgtgcgatatccggctggtaagggttgccatatgccgaggattgcgggtgctgagatgttggaggaggcggcgaacgcatcatgggtacagctgagacatgctgaggcacagggtgatgaagcggaggcgagtgccccggggaggtgccaaagactggcgatacataatgaccaatttggtaaacccactggtgaatttgaactttgctgtttagatttgagactgagggttagatccggtggagggaataattgtgtgttgaaagagtgggaggtgtttatacgtggctgaaggcagcaggagagagaagtggtcactgggattaatttcttgcccggagctgaccttgatctgatcttcgccgcccgcacagtattccccacaccgcaagctcaccacacagactgtacagcagtcctcgtttcaagatgctcgaagcctttgagattctgtctacatccggggtagtcttatggtccaagtcatacgcgccagtcggtgcccatgttgtcaacagcctcgtcaacgacgtctttatcgaggagaaggcgcagcttcagaacgcaaccaacagcgtttcccccatctttaagaaagagaagtacacattgaaatggaggaagtcaaaggattttaatttgatattcgtggtatgtatgatctataatgctgcgcacattgacagcctgctaacgccacaacccatccaggccgtataccagtcgcttcttcacctcggttggattgacaaacttttggataatatatcgactatatttgtcgatctatacaagacccagctgcaaagtgaacgggctaggattgtccagtatccttttgacaagtattttgaccagcaagtgcaagagcttg

SEQ ID NO: 4386 - DNA, 5678 bp, Emericella nidulans
tacgtgctctgcgtagtcggggtggcacccggctcgccggctgcatttttctcgccaatcctttttcgtcgctggtcggcgatcaagtattgctcactctcagcgactctgagctcatctttcaaccgagcaatctcagcatccttagtcgccagttctttcttgatccttttcaagttttgcatcatctctgtcatggcgttcgcagcatcgtcgagagaaccctcatgcgtaagcttttcctcttgagcttctcgcagagacgcttgaagtatttcaagatctccgtcctgactaccctctttctgaagggattcttctagctcttcaatacggtcatcctttctctggctttcaatgacaagaaaatttttcttcctttcgttccgttcgaaagcctgcctacagcggtgaggtgagactgggcagagcgcagttcttcttctcgagcgtttagaacttgtctgagattcgctaccgcctcgcgtgcaccctacaagattaacttgcatccgcaatactatgctggactgggaacagtgattcttacctgatttgcgaatcccgatccgatttcatccttgggctaccagaataaactgacacaggggcctgacttggctccccatttctactgtaggaaagaagaatacctcgacgtctgtcgcttttgttgatacaaaagcaccgtttagcgtttctcggcctttcaccgtcaaatagcacagacgacgcctcttcgagattctcgataagaaggttctgctctataccgtggttgataaccaattgtcgacgaactaactcgttatcaaacttgttccttgatgttagtcccgtatcatatggatactgattataggcctacctgaagaactcgtaaaaccgtattgaattgttgatctggctcgtgctgggaagtatttatactaccaccgctgccaatgaaaattggcgtcggactgttgcatcattagcagcagagacggaagggggcgatgtacgcaaagcctgaccagctgactcggtgcatgatttcggataggatacttagatcgcgtttcgaggtgacaatgaatccattcaacgttgccccaaatgaactttctagaatagatgaccactctggtttgagcagagtcacgaagtttccaataggttcaacaggtgtctcagtgaacgatcggttttgctgaattgctttaagaagagctgacatcctttcaggaaaccctgaatttctgccactaccttccctgttaagattatgtagtaggctgtttgcttcctcaagatcacgtctagcttgggcaacgggctgatacgctgccttttcctgactctcggccgctcttatatcgtcactaagttgagatgcattctgctcgagttcatcaatctgcttccggacttccatggcatcttgtttagctcgctcaagttcatccaacttccttgaatagccgccaccatggaggtcagccagccgccgtgtctcttcatcgacctgatgttgcagttgctgaatccttgcatttgcttctcttacatgttctcttattcgacgttgctcagccttagatggagattaatagatgttcactggtgccgggaggacataaacaatacctgaagctcatgccgttcattcagagcttcgttccacctggcttcgatgtcgttcctctcattttgggcattgtcaaccttagcagacgcctctctgcagtattgggctgcagtaatagcttctgcctccacctctcgaatcgcggcatcacatctcgcaacttcggcctcaacctcggatatcttgctgtccaagctagaaatttccgctatcaaagagtccctaatctgtctaaattagtctggagacttgagtagtaaaattaggcttcataccctttcttgctcctctacttgagcccaggctgcttgtcttcgtagttttctctgccgctcccggaggttttcctgctggtcggacatctccagttttctttcagctgcatcccggcgattctttaggactgagacgtcttgttgtttgcttttgattttctcctcgatttggtcaccgtactcttctattagccggtaatcctgatcaagttgttctagctgaacacctttcacaaagaacttgtacttttcagcggggctggacgaactaagaaattggcgagccatatcttgcgacagaacattcatcgggttctcaaattgcaaagtgaagtggtcaataatagcatcaagttcagtcctcttggtggagaagatgcgcccattatctgcttttatcttgaagctgctcgcgccacttttagaaaaatgacgctccactatgattgactttccaagatcgtcaggcaggtaggccccgtcgccttgatttttaatccgcacaatgatagtagcggatcttttaagagtcagaaacgaagaacctcctgaggaggaaaaacttactctttaccttccttaataaagcttttgagactctggcctcgattagtggttgacgctttcccacccaaacatagtgttatagctgtcaagaccgcactcttgccgctgccattcttccccacgatgaagttgatcaaaggaccgagctccacttggaagtggtcatgacacatcaagttataacattcaactcgctcaaggattccatgttccgaaggcgcattgggttcatcactgccgaaagaatacttctcttggatgatttgtgtcgcgagcactccagctcttgttcgtcctgctccagatcaacggtagatgatgtggttgctcttgcggtatctccgccaatatcactgaatgcgagactatggtctgatcgatgaaactcggcaaaatcggaaacacggggccgttttctctgtcttcagatgttagttccagaggttgttgtatatcatacgcacacaccgtttgaagagaaagagaggaacgatccgatgaggtgtcttcgtgatccgtatcagaaaagtcttgagactcctgtgagcgcttttggtttgacatcttcaatatgcgatatcgacattaagttgtggaggccgagaccggtcatactaaatttgcggggcaggcatagaatcgaaaaattattggcagtcttcttgtcgcaatcgttttagagatgtcgtcggtttggtgagcgtaattgaaagaatctggctaaaggtgctgtcaagtatcgttgtctttgtgctgtctgctggctaactgctattgatgacccgtagtcgcgtttggcgcgtcgcggcgtcattcacgtgatatttacgagaagtacaaatgtcaactggaggagatctctatcttactaatcaagtatacagcacctcagtcgactgaccttccatacctccagtttaatatggagagatcaacatatctcctgacgatcaggagaattatcataatagctataaaatcactatacaaactgtagatatgagattaaggccttcaatttaacgatttcgttgcagacattggtcacatgacagaaatcggtactaggaaccatctcgatagtctacaacaaactacctgctgcacttgtggcaagacaaagcttcagtacactccttcttctgcccatacaccagaaagcgctggaaggatagatggagatgtataagggatggcccgtcaaacacaatagactggctcttaagtacagctgctggggctgaagaattcagccggattgtgcaagaatcatccttcttcaaggatatacgcccaaactgggccccgcggagcgcttgatagtgcgactgtctacacatctacctggataaagggtacagcccctccccccccatctataggtagccaaaacgggcatctgcccccagaagacctggccagggtagcgccggatgcttcttccgctcatttcgaacatatatcgtccatagttgctgcttcaaacctgtatctagctagttttagggagttctgtttaggcagcacgtccagatgccccctgggaggccgcaaatcacgtgggccccgtgatccgccaagtgacgttaaaataataaaaccaaaccaaaccaaacctacaacaaactacctattacgtcgcggtataagggccttgtttcgttttctctaacttatacagaatacaacaaatgcgttagaatagcagcaaaaagtcatcctggttcgcttagtctctgcaaaaaattcacctctgtggaccttgtatgctttgagacttaatgtttgccccttaccagtcgatgctattgtactgtgcagtacctaagcccccataggctcttctgcgacgtaatgcagataagcaccaagtagcttgatcccttcaatataattcctcttgtccagtttttcgttgacagaatgtgcggcatcggttgagcttcccattggtaacagcaaaacattcttgccggtcgcctcctcaaaagtcaatgtgatgggtatactgttttgatcaacatctgcatacttgcagcttcgacgagaccgccattttgaacacataccttccaccctctcgggtcatgtctggctctacaccaaacacttgcttcacagctttgctggcagccgcaaagttccaatgcttagggctggctacccaccatttgccgtcatgctgtaaccaaacatccaacgtgttcttgctgttcagcttagagaactcggacttgatataatcaaacacaagcctgtttacatccgcactctccatgttgggaacagtcctaatggagaacttgccaatgacctttgctggaataacagttttggctcctggagccgagtatgctccttcgatgccatgaatagacaaggatgggaacctccaccgagccatgagagtcctttctttggtcggatgaattccagtttcactgcccaaggactcatgaagattttccatcgtgtagcttatgttggtgtatagagacttctcttcttccgtgaccggctcgacaagatccatgatgccaggaatcagaatattgccttgagagtccacgagtttggataatacgctaataaggtccgtcattggctcatgagcagagccaccaaagacgccgctatggagatcttgagcagggcccgagacactgacagagtaatagttgcatcctcgtagcccataggtcaaacaaggcttttcggtccccagccagtagttgtccgagatgcacacagcatctgcgtctttaaaaaatcccttgctctcggaatgaatgaattcctccaagccttcagagccatactcttccatgccctcgaaacagcagagaagattgacaggtagctcgacgccagccttcttgtgggcgtcaatcacattaagccagcctaaaactgggcccttgtcatcagtgcttgcgcgaccaaacattcttcccttgtcatcgacggcgagctcaaatggttctgtagcccaaccgtcttctttcaatgcgggctgcacgtcgtaatgaccgtacactagaatcggcttcttgtttttatcgttgccatatcgggctatgactactggcggcaggtcaaggtgctcttttccgggctgcttgccgagtggcctctggtgcacctcagcccgcaaggctttgagctcggaggcaaggaactttgccatcttgaagaggttagcaaag

SEQ ID NO: 4387 - DNA, 1898 bp, Emericella nidulans
ggatactgaaaataaactgtggggtggagcgtgcatcaagaaaaaccccctagcttcctgtcattggtccagaatactccaaccggcttgggattcatgcagaccaggcatcccgctcgttgattgtgctaaactctgtacttatgtctccagtccagctcgacgtttcctgcccaattcggaactgaatacaggagagttcgtctggggagaacaatgtgaaaaagaagcatgacgaaccctaagacccgttatatccgtcacttttcacggcacttttcggaattgctggagcagaagccctgactccatcctgacaaataccaacgtacattctttgcttcggtcgacgtacgtggactattgggagagggtcgtgaagtcagccacatcttcatcagttgccggtctcgaaccgcctccctaggatgactgttggtcaacttgtcaaggctaagcgccctcctattccttccgtggcgtctcctgccagcaccgatagccccattgccaatgaacgaatagatcaccgcgaatacatggtggacaggggttgcataccgctcccgctgcaatgcagcccgcgtagggcaaggtagttctgtctctgcaccctggaagcagacggccatatcaaccttaccatggcccgttcttcaacttgggctcctggctgggtgccttccaatctggcaaacaattaacttttgtgatgcaggtgcagctacaactgcatgcggaatccctccttccttcacgagctcgaaagcctttcgagttcgaggctttggatgacccgactcggatgacctaaacccataccccactggatcctcttcatcgcgatgcacgacatctgtcctaggagaaactgtcggtaaagaagtctcaccgcacctacgagagacgaagaaaaaagcaaagagccccgagatcggagagctgtgccatgattgtatccaagcagtcatcattcgttctgcacatctcggcgatacaacccaatatcaccattgtcacatatctatcctgccttgggaaagggtcagcaaaagcgccgaatctgcaggttcctttctgcagtcgcagacggaagagctcaaactcctgccaaaagcggcatatgcaccgggaagaagacacaatccgaccgtgcagaaatgtttgctttttttcagccttccgcctattttcttccactgccccctactccccttcctctttccgccctgaaactccggcccgtgactcgtgcaaatttcctcggatatgtccgcgcttcgctctctcccaaccaatcaagatcgccagctgcacgtactcgttgacactgacagcccgggctggcgattgttggcttcacgtgggccgtgcgatgtgacggagcccgcagctaatttcatcacacccgtacttggcatagcttccggcattattcgctcttagctcttcctggccggccgacctgacagtatcagtactatgttgtaggacgaatccgtcctccgaatggataagtgtgaacagctccaaccggtcttgtgatctggccatgaaggatttcaagtgcgttctcgtcgacgtcgccaatggatagctccccttgagggagactgcctggatgtgcgggctttgtttgcttcgcggggaaggagctgtccgagcaaacatacccctccgcgcagttcgccgttctgacctcgtcgctcgacagctcttggccagtcgtttggtgcgcccatcagcatcggtattgctagctagtcgggatctcaccctctcatactttctgtacccgtacagagtcaacgcgaataggtcttgaagaccagcattatgccttaattaaaagtagctcagcaaacgttacctgaccaggtagagtatactaatagtct

SEQ ID NO: 4388 - DNA, 3498 bp, Emericella nidulans
tagcaacgcccctctctcatatcctatttatcttgttaatatttatggttaagttcggtttgcggtgtggaagaatggccgtaaaagtctttctgctgagttagggctagctgggactgacccaaggtgcatcctatgcgcttttccacccactccataatcaccctctggatcctaaactctcataaactcctcagatcattgtttacttgttctagacaagtttgctttcgaagagacacacccccaactccattcatagcggaaaacctaaccgtaggtatagaccctcggcaagcgccccgatctcgggatctccgataaacaccagcctatgctctatcgtatcaataaacactggtatgctgttatgctgttatgacccaataaatcccaacttggactcctatcctttccatcaccagttctcaaatattgccactctgccgcgaccctgaccccttcaccctccatcttctcaacagccccctacgtcccccccgacgccattttcgccctaacagccgaatataacgccgcccctcgccagtcagggccaatatgggccagagtacctaccgcggcaactatgggctcccctgggtcctgccttctgtacagcaagctcgacgtggttttaatgagaaagggctggtgcacgaatatctgccgatcctaaggctgaaggggttgagggagggggctgcgaggttagtctttggggaaggatataccgctatgcagagaagctggcaacatcccaagccatctctgggacaggatcgctacaccttgcgggatatctgatcagatactgcacgttgagggaaaagggtggagcagcagacgcagacgcagcctcagacgcagtagccgcacggaaggtttacatccccagcacgacatggtcaaatcaccgcctccttttctcatcgctcggcttcacggtcggtcaattcaattactacaacaacgccaccagatccctcaatatagactcgtaccttgcggctctacgctccgcagaccatgggtcggtggtgcttctgcacgcctgtgcgcataatcccaccagcctggacccatatatcgagcaatggaagcagatatgggacatcatcaaagagcgtcgactattccccatcttcgatgccgcgtatctaggccttaactctggggattatgataaagatgcctgggcgatacggtatttcgttaacgagcaaaaagtagagtgtgcagtctgtctgagctttgcgaagaatataggactttacggtaccgatcctctttatccctcttctgactcgtgttgaaatctagaggccggctaacagagccaggcgagggcgttggacgcataattctacagccgaccccgttttcgcagtcagtgctcgaatcgctgcagcgttcagagatctcgaacctgcccgcattcagagcaaagatagcagaggcaattatgtctgatgacatgctcaaaaatgtctggcttgaggatctgaagactttgagtgggcgaattgcggagatgaggagggcgttctcgacgggctgaccggatacgctatgtgtctgatgtctactgagattttcaaatggcttttgcaagtacggtttgctgagtaggaaactgactgcgactgctgcagcatccgctaacagttgggactatctggttagacagtcggggatgtttggattcttggggctggagaggcaggttgttagaatactcaagggtgagtcgcgtctgccattcgttgacggttgttagactaataacataagacgaatatcacatctacatggccgagaactcgcgaatatcgagtgctgggttggattcagggatcgttgactatgtggcacggtcgatcggagaggttctactgagaatgtagcgaggtacaatatacgcggagaaacaaacaagcttagctaaatgtagcataatagaaccagcaaagggtttgctttactgtgaataggtagtgcccaagttatacttatcccaagtccaccggccaaaagccctcctccaagaggcctagtgctaagtagagctatctgacctaggccttgacaggtgatattttctacaaagtctcaatcacggtccaggtgtacctacatatctccaggtggaaattggtgcaagtacgaacccggccaagttccagcaagcgctcagaggcgatggttgaaaagctaaaagtcattaagtcgttccatgtccctaatagtgttagggatcaaatgaagggcacgtttgaaatatcaagattgacaatttgagaattccaagctctgtgatagttgaatactgtctcaagaaatagttgaaagtatagttaaaaagtatagtttcaacagtactagatggccattgtaccgcattggttctgttatattgcatggagttaatataaatattcctttgaatgcctccacgatgtacgaagctggggagtggatcacctctcttcaaacgcaagacatttttatttttacagtgtatcgtcataatgggctgggccaatgtcgacgacgtcgacagggaacaaccattattgcgtgaagatagttggaagacttcttaaagggccaagagctgaagagtactccgagattgatacatgaaaattgttatggtatagggatcttagtgcaattctcaaagcgaactagttaggtcggatatgttgaataccctatttttgccgtgtcttcacctaggcagtcatggaataaacatcccattcctcctttctcagccggaccacatgaataaatatgttggatatccaaacaagattcgccatattcagcatgagactctcaatccatgagcatcttcacaattgcgagttagacggtctccgccgaacagcccagtgctgcctccacctggtcgatcaaatcgataacctgttgcggcaatccgctcgtatcagttccctcgagaatagcacagatggcctgcacgagggtgtcaagcggatctgtctggcgaacttgaaggcctgcatattcgctaccgacacagttgttcatattgaaagtattcatcatggtttggtagcttgatacgaaagagccaatagctgagagacgctggtctacgagcgggatcatggcctcgggggttccgcttgggggagtcaggttgaggagcggcattatggcgtcgttgaaggtggagaggtcggtgcaggagaggtcaaaagcgaagaggggggtagctggagaggtggttggaggtgagaccggggaggcgagggatccagtgaaaaagttgagtaggcagatacacatgaagaaggccattttctcttttgttgcttgtcctatgctgggaggctgttttctctgtatagctaagcggtaggaagatagggttaaagtgttgttaatggccgtagcgtgtgggtttatataggcttcggctggcaggcctcctccagagaaaggggcctgcgtataatgctatgg

SEQ ID NO: 4389 - DNA, 1605 bp, Emericella nidulans
ccacattccatccaccaaataactactaaactatttagacaattgtcagccagtctagccacttcgtgcatacaaaccccgacatcttcgaggatcctcactccttcattccggagcgctggctcggcgagaaaggaaagtcactcgataagtggctcctagcattttcgcggggcccgagaagttgtcttgggcagcagtgcgtatactctttccattaggtcatctattcaatgccgcttgcgtactaatgtttgttgatgggccgttaggctagcctgggcagagctatatctgacctacgcccatgtatttcggaaattcgatctgcagattgatccgtcaaggtttgtttgcatttttggtcttttcatcgttttctcccttttttcctcttattttctgcttttttctttggtgatgtgtgctgatcataccgtagtcccaacgagctaaaatggaaagataccttcttagctcattatttaggcccacatctcaaggctaaattgacgcctgtcataagctgatttgacgtgacagacttggagggcctaatggtgctatgctgggcactctctgtgctcgtatgatgagtgttaacacggagcagatgcagcaacgaatagtaaacggagatattattcgttggctttcttttttctcatccttttcttttgtggggtagagtaattatgcttcgtacgtatatgaccttcatgctactgaagatcgcttcttcgcctgctgttgattgacgttctggtacattcccctttcggccttgtcggtgccttgaaattctgtggctatgtaaatctaaatgcagtaggcaaggctcatcttagccggatatactttcaatgcacgcaccgatcatccgtcgtgcatctttctcacctcccgcctctgacgtgtacggctggtaacgatcgaatcatggaacagtctcagggaacagtctcagacggagataagacagggattggatcttatcacctaaaagacgtggtcatctcgtggcctgcccctcgcttacagacctgcagctatctctgcagcctgagccttcgggaacaacctcggcacggggctgtgcccccgccctacgtgggatgctgacaatttgcccttttgccctagtctcaccagggtttgtggcatgacgttaggttatacgacataacgtggtacggtcagagcgctgcggctctagacaaggtatggggttgagctgggcgaaattggattaaagtcctaaggcccgcaagtgggcaaagagactccgagcctgggcgaagaaaaaattgtccggtggatctaggttatggtaataccggttactcgacactcgtagatggattgggaatgagcttgtaggaggggtgagggagatatactgagtaatgcatatgcttgcaccagaaaactgcatggctatggttccctcgagttatagaatgatctaggcatattacaatgaatttactaggcatattgaagatcaccacaacatgctagtggccgtcgcatccatctcatgtgccatctactgatgcaagtgaaatgtaaggataaaatagtgcaaccctctgctgatattga

SEQ ID NO: 4390 - DNA, 4185 bp, Emericella nidulans
gggggagagggggaaaaaaaattatcaccaaaaaactaacagggggggggggtcccgcttcctgagggtttctttagggaagaaagctgccccccatttaaacgctgaaataccagctgctggatcatgttcaaaggcccataaaaaatgggggggagttatccttaaatgggtggtttgataaagcggaaaagggggggcaaaatcgtaaaggtaaaattcagaagcgagggccaaccatcgggaagggaaaggttggtcagtgaggttaggcaatagccgtggagagctgggccagcagcccgtaggatgagaggcaaaaataagctacaagaaatctgttgcttgtctgtggcaaagctgcggacatttaagtcgatcaattgcgttttagatgcaagttgacccaataccagatctaacaatgtatctgttttgtctcaagcaagaattttccctagcaatacgctatttaacgcagggccagaaatacgttggttgggttctcgacgggacaacctagggaagggtgtatccaccatcgatcacaatatccgcgccggtcatgtaactcgaggcgtccgacgcacaaaagacatacgcctgtaatgttagcttttgcagctcaatctcgtgaaatacatactcccttcagctcataagcctgtgccactccgtgcgctggaatcatgctgtgccacttcgctctccattcctgcggatgagcatcgagtatctctgtctcgatgaagcccggcgagatgcaattgacgcgacagaagtcgacccattctacagacaggcatcgtgctagttggaccacggccgccttggatgcgttgtactgctccatatcagtcgtgtccgtatgaaccatggagggaacggaccgcagcctgcttctgaggaacattgactaatgtcgcactaacagacgcagtgaatatcacattgccccgaccttgttccttgaaaatcttcgctgcagcctgggcagagtagaaggcgccatcgaggttgacgcccatgatcttccgccattcctcgacactgtaatcctctgctggaatattggaggtaataccagagttgacaacgatgatgtccagatgtccaaagtctttcttgatctgctgaactgttttctcgatctctgcttggtcagttacattcgctctgtaggcgcgggctgtaacgttgtttgccgctgcgatttctgcggccgtctcaatcgcagtgggggaagagttataaatgatagccacctaagctcatcagcaaactacgcgatacaagaaaaagaaaggcgtacattggcaccagcctctgctaggccacgagagacctcaaggcctataccgcgagcccctccagtaacggcggcgactttgccggtcaggtcaaaggccttggtgacatgctgattcgggggttgggagaggaccatattgctagtaggattccaatatgttaatatgctgaagagacttgtagagtatctatgttaaagaaggaaagatgtaataagagagcgtcaagcgtgggggtgagggttgcagccaccccgcgcagcaccccgcattcttcccgttcactcaactcgttacgggcatctgaggtccgactctaattaaaaccgtgccaattcgcacatccttgccgggtatgatcatatttacacatatctacttaagtgaaaggccagcgtgggtttgccgggccggagagcgaactgcctgtgcaccctaatagacgtatctagtctctcctgactggccccatacccacgcttgcagaggattttatagatttttcagacagtcgcaagcttctgttagtcctgccttgatgttcatgcttggtgtagccattcaaagattgttccattgcatagtaccatgcaatggtgtgtttagccagctacatggccacaagatggctacatcttactccttcccgtcataacagtgccatgccagacacgccacgtctaaagagacaagcaatcatccaataagtatgagaaggtgctgtcttcatcagcctggcagtattgcccatccccatcatcccctaccatgagccctcgctgctagcaaggccaggtaatttttgccagccgttcagcaaatatcagactcacctcatcagcatgagctcataatgccacttataggcgtacatgttctgtaaaggcccactaatcaaatcaccacgttaattcactgtttaagaccgtcaatgattcaagggatggtataggatcgcatggtatttttcattgaatcagctcgcaaagcgaacctgttcccgtgctcgagaaaaagtcacggctaagcccgcgaaatcaagtatatggagattgagcgggcatttgtgtcttatggcggtgctttaactttccgcataccacacggtagactctcacttattctgggtccataaatacaggtggcatcacagtaacgtcctttcttcagtcaatatgcataaagccgaccaggcatccatacacgatttagaagggcttgagtgaaaataccgataggcaccaatggagtcaccttagcaagggtcagtgcgagggaagttccgtaccgtatcaatactgtgggcaaatcacagtttcctggactgagcagctaagtagtttctatatgatttttgacaacctagctctatggatgctcttgcttggcctgctaggacaccgttttatacgcttatttcttatggttaaggctaagtgctttctttccaggcacgcgataggaaatatatattttttttgcagatgtgatatgggtggtgcacagtaagtaacgtaagtaacagaagcttcatggcttgtctatgagctaggcacaacatactggcattcaatctagtacaattagagtgaaaaataagcaccacatattccatacaccccgtttacagagggacttgttggaactggagacaagaaggggggaaaaaaagaaaaaaaggaaagtccaatgcatcatccgtgaatcgaacacgggcctcatcgatggcaacgatgaattctaccactagaccaatgatgcttgttcttacatttgtaattgaattataacaaattattccataacaaacaacagtaaaccagcttctgtgagattagttaagttgctctgcctcagtaacctatagtattttagtcgtcttagaacgcttgtggagtcgttagagcattttctcacaatgattttccctatcaatatattacacgagtttgtttctaacactagatacactttaccctagccgcatgctttagctcagagttggtattgctggttattcatgtacatgttgttcgaccacaggtgttaaaatacactagctcttttgcataagaaaaaccaatggctggggatcagcactcatcgatcataccaccaagagcataggaaacaaccgctagacgtgaaggttcacgcataaccaccttcatacttgagtaaggctgctataattgtgctcaaaggggaaaatgggtgagtagaacatcaacacaacggcactacaacagcacaagaaacatctcaaacagcagttcgaccaaatactgaaaacaacacagaatagcagatttaagatacacattgagaaaatcgtacattggaggtatcaacggtcgtctacatataaacacatcaacgcccagcaaccggtcgggcagaaatcaatcggacatgaatacaataacgttccataagccattggctttatcatcattgcgatatgctgaacctgcaggaatcgacaaaaaccgtctgccattaaatgcttggagggtaatacgtgatcgggggagggattaacacctctgaactactatcatgttagatcctggacctacctgaagggtaaattgggagagatccttccattcgaacaccaataccacattgactcagaacttatagacgaagaccttgccactcattaccaaccgcttgttaattaggcccgatgtgtcctactttttctctgcctggggtattattttagaattattcgctttggtgtgatctctttccttaattttatactctcttttctctttgcttctcctttattatcgtcgcatctctcataatgtcgtttctggtacttgttttcctttgctctttcctttattattccttttttctt

SEQ ID NO: 4391 - DNA, 2262 bp, Emericella nidulans
  unsure (1)..(2262): unsure at all n locations
atggattggctgtgcctttggtacgtctcttgcttatacatgtagtcgagcaggctgacaaaaacagtggtggggatcaggtctctgcttccagattgcgctcatggctgctctcggagtcatggccaagattcgagtgccgtatgctcatactgcattggagatcagaaaaatgagagatggcacgattggacatttggtcgtcagcgtcgtgaacttggtcaacaacggtctgtggctgtgcgtcgatgattttaacaggatctcaactggtatctggagtttctggcatgcactttgttgcagccaccattctgattcccttgggaggtgagtagccctgggataagtcggaaacgacgaaactgatcaagcttctagtggtcttgtatactgctgttggaggtctcaaagccacctttctgacagacttcctgcacacggctgtcgcccttattctcattatatattctaccttgtctgttttgacgaatgaacatattggcggactgggcggtctctatgataaggtgatggcacagcaagcgaaaactatatccggacaactacgaggngtcattactcaccatgaagtcaaagggagcaatcatctgggggttggttctgaaatttgggaacctggcactggtcgtcatggatactgccttctggcaaaagtcctttgccagcgaggtcaactcaactgtaccagcatataacctcgccgcgatcgccgtctttggtatcccatggggtctagggacagttcttggactatccgccagagcacttcatcctcacacccatattcccgacatatcccgccgacatcactgagacagaggtctcaacaggtctggtgatgccatttcttgttaaagctctcatcggtgactctggcattgtcgcgtttttcgtgcttcttttcatggctttgactagcactgtatcgtcttccatgattgcggtcagcagtatcctctcgttcgacatctacaagacatatttcaatcccaaagcaacagacaggaagctgctcagagcaagccacgtcaccgtggtcattcatgcagtcttcattaccggcatctcaattgcactgaattatggcggcgccaacatgacctggcttggttacttcagacccgtcctttcctgtcctggaatcattcctctcggcctgactcttttctggagcggccagacaaaactggccgcaattctcgcgcctgtcttggggtttttcacaggactcgcaatctggctgggtaccgcgcatgctctgtacggcgaagtgaacatgataacaacagggaaccccctacctgcactctacggagctattgggtcttttttctcccctgctatctactcagttgtgatttctctctacaaaccctacaaattcgactggcggatcttcctccgcatcgaactcgctgcggaagcccaactccacagcgccgacaaatcaaaagccacagtcattgagtcagaagtgaaagaaaaatccggtaccaatacccccaagcgcgacacctcggacgcagccgcagccacaaccgcaactgcggatcccgaacacgcagccgcccttgagaagcccaatcccgcatcaagagcaaattcaactcccgtctccgaatcaagcctagacgacattcgccaccccttcgatgaaaagacattaagagaactgtaccgctggatgaagatagcctgggtcatctttgtagtcatcgtcctggtaaccttcatcctctggccgatgccgctgtaccggaattacatcttcagcaagtcgttcttctcaggttgggtatccgtggctattgtctggcaattttttgcgttctctgctgttgtcatctatccgctatacgatggacggtatgagatcgacaagggcgctcgaggtatgtggaagtccacgaaggagtttgtggcgaagaggagttcaaagactatagactcttgagatgaaatcctcacatagaggttgatagatgggtatatacgtgtatagaatgaactgcaagcgtctagcgaatacattgtatctaaatagatttaggacttatgcttgaacatctttaattaaagaatcattataatgcctccagccatgtgcacgtctatctgcacaactcacagccttttaatcagattcatgcgagtacccttcaccagccaactactgagacatacaaacacatcataaggagtgtatattcaaactgctcaaccctatgcaggcaccga

SEQ ID NO: 4392 - DNA, 2507 bp, Emericella nidulans
gaaccttggtcgatgcattgtaagctccgtatgcggctccaaatggctgaagagagtggcgacgattggaattcgcactgcgcaatcgacagaatcgctgctagactgccaattatgcatagcttgtgcttgggacacagaatttataacatggctgggaagagttttgtgtgtctcgcccccaacctctcagctgggggcatattttcggttcagccgcagggcgaatgaagaacagattaaacaaaagtcgggagatcctgcccctccttggggtttggagtctcgagcttagattagacgctcctcctgccttctggattcttcctctttttcggtttctgcttcgtcccctctccctctcgcttgatcgcggtgtttgtgcgcatcccctcctacctctctgaccccgcaatactttgtagtaggacaaacacaccgcattgcatccgtcactgctgtccaccctgggcacccgaattgtctgtggggaagcttcattgctcgaaaatcgtgggctttttcttgcgtgcctctaggtcgagtcgatgtctcttcaggtcaacgacccacggtcgcgaggccggtccaggtcccccagcggccggacccgtgatcgttccacgtcccgcgaccctcgcctgccttctcctggccctggccccgatcccgcaaggaagagcggttatctactcgccgaaactgtcgacgagaaagcgcgcacgaggtccagaagtcggggcgccagccccctccgtggttaccgtaagacgtctcgctacgactctgactcggagcacgagcgtgaacgcgagcgggaacgcgaggctagagattcatatacacgcttacggaacgatcgcgactactactatcattccgattctggagagagtcgaggcgcgacgaagcggagcagccagcggtattctcagccgccgcagcggagttccgcgcagcttgatgcgtattcggatgaagacatttattcggattcagacgatgatttagcctacggcgatattcctggaagtttggagcgtggatactatgggtacaagggcaactgtccgcgacgcggcctccttcagagaagccgctcatgacgggagcgctcaatgcgggaactagtcctaggcatagtgcagaggcagtcagtggctattctagatatgccccaggtcaccctgcgcgcacggggccgcctacttcagagacacagtctgcctgggcacctgtaccagattgtgagaagccgggcttcgtgccgccgacatctgcaggggattcaatgcccggggcgtttccgaccacgacctcgggcttgcccaccacgcagtatgttagctcggaccctgtgcagaatccgtatgtccagtggaatacgcagcctccgacatctggcgcgccatatgccgcacccgtgagcgcggcgagccatcaacgcaatccttcgggagaccccaatctctacgccaacccacctgcttttaagtatgcgcaaattgaccccaatgtccggtactcggcgaagcccgcgacggcaactacgtacgcaccgccttccaaggccagtggccagacaagcgacggccaatacgccggggttaggtatactacagcccctcagtactcgaccacggctacgagtggatcacagtatgttgagattgcgccgggaagtcgacatactcgtccggccagcctcagcgtctccaccaacaacctgagtgtttctggtcctgatcctaataacccaccggccagcccattgctagaggcatacaaggggacataccaaagcatatcccccatgccgtcgccgatcctgatcgcgcctagagacgacgatgtctctgacctcgaaccgctggatcacagcacagatagcgaacggcgaagaagacgcaagtccaagaaatccaaagacgaagaaggaggcctcaaggagcccaagagcgatcgctctaaacgaggaagcagccgcatacggcatggacgccacgaatccagagactctagaggcggcggccccgattctgttgccctggtatctcctagcacagaccgacggaaagaggtatccttctacgatgccacagacgacgccctcgcgctgcgtgacgccctttcgcactcgcgaaacattgacaccaaaactctaatccaggtgctccctcacctaaccaatcacgagatgctcgacctccgaaaggaatacaagaagcacgttaagatccacggcaagggtgtcaacctggccaaacacattcgcgtcaaattgggcaacagcgccttcggcaaagtctgctacgcaaccgccctcggccgctgggaatcggaagccttctgggcaaactgctattaccagtctggctcgtccagacgcgagctcctcatcgagtccctctttggccgcagtaacggcgagatgcgcgagatcccggaatccttcaaggactcgcggtaccacgacagtctagagaagtgcatgaaggccgagctga

SEQ ID NO: 4393 - DNA, 3926 bp, Emericella nidulans
  unsure (1)..(3926): unsure at all n locations
caacttcccggtaaatgcaccagtagtggtctgagataatgacgtctagcactctgacccgagtttacaggacagttttttgaacccattctcaagggcgatggcactaaatattgctgccgtgccctttccggccgggtctcatccgaaccgccggggttgtctccatacaaagataagggccgccatctgacagtaaacccctgcctttatccggttcccatacggcctattttccagagccgacggatcaagggtgccagatatgtctcctgcttcctggtcagtcgcccagctagactatgaagaggttccagcacagtgtgcttgccatcgagtgtgaggtaagaagctactgggtgctgttactaggtttacacatttgggtcagcctctattgtgactcaattttagccaatttcatcatcaaaggctcttttgacccgtggttttctttcacaattgttctgaaacttcgacgccgacagcacatctgctcggatcataggcaatagcgctattcaggcaccatactattctataagtgggtatttcaactcgcattgttaccattaaagtacgtttcgaagataggaggagggcatcaggccatctgtggcaatactggcagtatggcggaaattagggctcgggtcattgcaagtcgaaacccccttcaaaatctctccatatgtgtctcccaccttcctatcccagtgacagcaaacctggacgcaagatatcgaacgagtctttagtataagagcctgagcagatggatgaatactggatatcgcgcacagataagactgctgacattatatttcacgattttacggactcagtgctaactaaatatggcgcgcgaccagcggtgacgagggagcactggcagcttttgattcacttcctcccctcaacaatagtgcgctttccttgttgcagactcatgaccaccttcaaggttctggctggatgagaattcaactagcccattgcgcagcatcaggttgatggagcagttcatctaatcttatcatgttgcgttctcttcagtacagtgtggtattagcctgctagcgattgctttgttagttgtagcaggcagtgagataaagcccgctctacgcgagtgatgactctgcccttacatacacagatggtgcagtcaggagttcatctctgcactacgcgaaacgccttagactagcctccttatgttcagtataacaataagaccccaggtctagtattaacatcccaggtcatcaacccacataagcacgaatcttgcgaatcccattcgctagctgaattaagcttgactcggcccctcaaccggcttctcccactttggccttcgctccgtaaacacctccatagtgggaggcgagatgacatcgaacagagaagccttgacaaatgctttccctgggtaccttgggctcctcgtcaccacggggctaaccctcatcagcacgactcctctgccgcagttgccgcagaactgacactgctttcaaagttagccagctggctggcgtcccaatcctaaggggcccacaacgttcagcgggtgctgggaactcactgcaacgatgtttccactggcgtaatgtgtatcggcgaatgttttgagcgaggtagtatcttctacggtaaaatcgggctcatcgacgaggtagttgatggatgagcctgttccaagtcagtatggttactagcaggcaaccagaggtagacgaaccaccaccagacctggcacagtttcaactatgatcgggttatataagtgtgtccaagaccgagggtcagcagtgaagataccagtggcaacgcagcgaacccggcggctgttccttcaaggagacttggatactgccgcagatacagtggcctctgtaaggcattgtgtgaaattcgtatgtataggcactaatttggcaagcgttagagagagtatttcatagttataagtaggtgggtgttagttatccccctttgctgacgttgggaagactcgcgaggggtttcatggttgtgggtctcgccgtgacttggaggtatcccgactttatggacatatgaaagtttatataagtatatactgatgcttccagtacgctagaggtcctggccagtacagccaggtactcctcgctctagtcctttatcccggacaagggaggggcatggacggcaatggaagcgatatcgtcactgggccggcgagaatcccgagcttccagaatgatattgatgatgactggcctgcctttatgatgaacaaggagtaaatagtatcaatagcatcattcagcttcattattgaagccaaagtggtaggtatagcaggtatatatttctagtcgaactatccaccaagacggctggggttctgtagcgatatagctatgtaggtccgatcatgttctccagcagactaaactgacgataccaaatgattatctttacagtatttagttgaggggttttgtgcgagagatgctccagagaaggagatcgtgaaatcagctacccacgtacgctagcagccagtatgcatatagtgtatcggatgatctaactaatagcatccaagagctcttggcaaattctccagtaagtagtgaaggtcagagacggtacaagttcttaacacgtttcacctgcagctacgcttgagcctcgaccagcgaggatcgaccatggccagcacaccccaatcaccacattcccttgagaaaggacctgtctcgataaccgtggaacctatctatggattcttgctatttttagcatctctacctttggctatatatagattacagtgacttctgaattcctgcaaggctctttcggtattggcactttcctggctgacgatcctatatggagattcgaaatggtgttgaaagtagaaatcaatgaagccgtcatcaccagtttcgttaaccagttctggttgccgatcctgactcaattgactaacatttgatctatctgcactcttctccttgccctgggtagataatggtttaggaaagaagtactagaatgagcgaacaaaacacattattatcaatcgacagtgctctacaaagcaaacttcagacatgctgatataattaccgtcacttacccaggccaacacctctctcctctctttcttcacccaaattctgggacatgtcacatattattacttggttcagatagagttctagacaattgcgagtttcggtcaatcgaagggaatcgcttcgtaaacccaagtagttatgaagggagagtgccagacctgccgcggcaagcatactatatagcattaatttcccaggaaatgttaacaaactaattctttgtagcaccttgtgttaaaacattccacaaactccatcaagacgggctagaacgatgttgttctgtacacatctctacaaccttactagtgcgggttttgatcgaagccacaactacaagcaccaggagctcgggatatctacaagacagcngaagcaatgtgcttcgacaatgtgttgatatcgtccttgactatccgtatncatgtcgatgtatgcttacgtgacacantaccncattacaatgaagaattgatgcaacccagcaggtaaagaaacaaagcagccggcttataacaccccccccgaagagaaggaagtttttttgacgcctttctttttacccaccgggtcagccataaatacaatagcccagctatgtggtaaattttaaactatagtccattgggcgaaggggtacctactgtatctcacttcnttattttttnttnnatttnntnntcnttnttttttnttttccacaacaaataaccccccccctggttttcttccccctgcagcccccttgtctaatgaggaaggaatacttcttctttactatcc

SEQ ID NO: 4394 - DNA, 2874 bp, Emericella nidulans
  unsure (1)..(2874): unsure at all n locations
actccttcacgcagtacgggtacctcaactggtccggccctgtgattgcactggctcccatcgcattcggcattttctacatctttgagtctacttacagcttcacttctgactgctatggcgagaactcgtcctctgctattgcgggacaggggctgcttaggaatacgctaggcgctgtatcgccgctcttcgcgtcgcagttcttccataatgtggggagtcaatatgcaggtctcattctcgccatcgcggggacagccctcgcgcttattccatttgccttctttaaatggggcccgaagatccgggctagatcgaagcttgctgagacggccaagggcgaagatgaggagaaggggaagacagggacgactctttattggtaaatatgagatcatctacagcttagcctcaacttacaaattcaatgagattattgaaaggtttccagcttttcaaggtcaattgcattccaaacgccagtattatcacacgtaagcaagagaattagacgatttataaacgacttcggctagatacgtagacgagtacgaatcagttaaatgtaatacgcattcggtgatttgcagcatatctccactgatattgaagtacgtaccaagtgagcaccaacggaaatacgaaagacgagtctcggtttcacagttcgcgtagtcgattgaatgggttatgcgtgcatgtatcccggttttgaatgtttgcttatgtaccgtctgacgctccggtcttgcttttggcggtgatgtataccagtaccacgttcttgggatgacatgaagattgtgatcatagtgcaagaaaggaaaggcatgaccggatatattgaacggaagtttatgcgaagaagactggatcgaatatgaagagccaccaggaaaattcttggtatatatcaaacgtccatactccgctctttcttgagttcaatgcaggaagagtattattagttctactcctcttcccgtctcaccgttcgcagcttgtttttcattcttgaatacctacttgcacccagcgcagaataacagcaacttaccgtactgtatccaggcgtctctcaaggaaagttattcaaaacttccacctctcccctctctacttgagtgccggcaccaagatctatccacaagggagggtggcattgcataaggttgattgtcaaggtagagattgggaatgcagggtgtctgctatcacttcgctcatacctaagagtgcggagttcactgtgtgagatataggggaggacgctcccgcaaaaacaagacacactctttgttttcagttatagaagatgggaattacctctctctgaggctgcccaagacgcactgatgctttcaattcattctttttggccgagttccaacaagaatagagttcggggtacactgggagtatacttagtctctaaatacacacactggattgaattagaggaagttaaggccgttgatcttcacgtctgctgcttttcttcataaacggcgcattctccaaggcactggcctgaatctcccacaaacccctgcctaggttcaccagtctctctccaaatctctccaggatgtcttcaacccgcggcgcaccctcctcaagaacctgtcggaacatctcatcgtccccatctacgtctaacgtagcagccctccacaccctcttccacctctccagcacctccctcgcttccttcctatcttttttaacatcactggcaagcatataaaacgacgaccgctttgcatggtaatgcgcatgtttatagactctcacagtagagaacttctcaaactcatatagcaactgcactgcgtttggtgcttcgatcttatgaagtaacacaatcattgttccgccgggtctgaggtgttcaagtgacaagataagctgagttagggttagtcgtgtggcttccctcttttcgcgatatgcagctcgggcctgtgtccggagaacctgaccatcgcagagcgctaggtcaaatctctgtttttcattgaagtgtgcagggaggaattttgcaaagtctgggtgtgatggcgggaattccgcagctggtgtcctcatatccgttgcaagcattgtgatgtcaagaaaattggctgtgacgttggggtgcttgcgcagctcgcgagcaacctcgtagcctccttcactttttgggagagtgaatgtcatcgcttgcgccgtagggttgatttttagggctgtcgcgaggaatccacctggtgccatgcacaggtcaagaagggccgggcggctgcctatatctgaggccgagggcttgatgtcaaatattccagtaagccggttcatgtcggtcgctatatcctgcatcattttgtagaagtgtgccgctgtctttgcgtgggctttgtctgaggttcggcgctgtttggcaaagaacttgtcgccggcggggactccccaaccctgtttagcattagctagcgttgttagttgaagaaaaggtagtgtccaacctttttccgcagctcatagagacgctgaaactctgggacttgggcttcgtttagcagataatgcattatggcttttgtgagcctgctgttgtagtcgttccggcttgatgtttcttcttggggaaaatggaggtcaatagggtccgctgcgatattaagcttgtccatggcgaaaattggctggttcaactgctcttccatcctctgaagtacccgcgaagtttattagaatgattatgatgcctgaaaccaggaagagcctaagaagaatagggaaagaggctttaaacatacacccnaagnctcgtatagtggtatctngatgggatgccgnaggtgaaagaataaaactctgtttaagncgggt

SEQ ID NO: 4395 - DNA, 5513 bp, Emericella nidulans
agcaagttctagagatcgcctcagggacctcaatacccaagggatcattactagacctcgaacctatcgagtcaatacgcatgggaactacagtcgctaccaacgctttactggagcgaaagggtgaccgcgtagccttccttgtcacaaaaggcttccgcgatatcctgtttatcgggaaccagaccagaccgaacctcttcgatcttactgtccagcggttagagcaactatacgaaacggtcatcgaagtcgatgagcgcatcaccattgagggagccagcgaagctccccagccggaagaacccatcgacgtctcatcagatccagatttggttgtgggtcagactggggagattgtgagaattatgaagaagcccgaccttgacgctgttagggaagatcttgagaagctcaaggctcaggggctcaagaatatcgccattggattcatgcactcctacacctatccggagcatgagcttcaggttcagaggcttgctgaagatatggggttcaaggtttccgcttcgtctgttctgcaatccatggccaaatttgtccctcgaagtcaatcagccgttgcagatgcttaccttacccctatgacatttgcctacctcgatgggttccgcaagaatttcaaaggacagctggaagatgagagtgccaacaagcttttgatctgccagtcggatggtggcttgacaagctggtctaaatttacgggcctgaggggtgtgctaagtggacctgctggtggtgtagttggcctatcaaggacatgttacgatgaagccgatggcacgcccgtgctaggatttgacatggtaagtctattggtctgctttacggatccatactaatttttcacacagggaggcacatctaccgacgttgccagatactctggtgctttggaacatatctttgagagcactctggccgaagtcactatccagactcctcagctggatatcaacactgttgctgctggtggtggctcaattctgaactggcgcaacggtctcttctacgtcggaccggagtcggcgtccgctcatcccggccctgcttgttaccgaaaagggggtccactgacggtgaccgatgcaaatctcttcctcggccgtctgctaccggagtttttcccccatatttttggagagaatgaagatcaaccacttgatcttgaggtcactacgaagaagttcaaagagttaaccgataccgtcaatgctgagcgaaggcagaaaggtgaatccgagtatacacctgaagaggtcgcgctcggtttcctgaaggttgccgatgagtcgatggctcgtccgatcaggaatcttactgaagctcgaggtttcgagaccgcgacacaccacctcgcatcttttggcggtgccggaggacaacatgcctgcccagtggcagcatcactgggcatctcccgcatcattattcacaagttctcttcagttctctcagcgtacggtctggccttggcggaagtggtcaaggagtcgcaagagccgctctccactcaatacgagtcctccaagccagagcttaagaagaagctagctgaaatgacggaggctgcagtagaagacatgaaggagcagggcttctcatcagaccaggtccgacacgagcgctacctaaacctgcgctatgacggctctgacaccagtctgatgatcttggagccggaagatggctctgatttcattgagcagttccgagagcggcatcgccgtgagttcggattcaactctgacagacccgtactggtggatgatatccgtgtccgcacgatcgctgcatcgaaggtcagagacgagaagagtcccttggtgcagcttcgggaagccaaaatacgcgacatcacaagctcccctgatctcattacaaaaacattctttgacggacagaaagggcgggttgataccccggtgttcaaattggacaatatcgagaagaactcccgtatccacgggcccgctatcatcatagacaatacgcagacaatagttgttgttcccaatgcagtggccaatgtactagagacttgcatcttgattgacctgaaggaaacgaggtcgacagaaaacaagccaacatccggcattgacacaatcaaactcagtatctttggccaccggtttatgtcaatcgccgagcagatgggtcggacactgcaaaaaaccgctgtttcgacaaacatcaaagaacgacttgatttttcttgtgctctgttctcacctgatggtggattggtggctaatgcgccacatgttcctgtccatcttgggtcgatgcagttcgctgttcggtatcagcacaagaagtggctgggaaatttgaaggatggcgatgttctagtggccaaccatcctagctgtggtgggactcatttgcctgatatcactgtaggaccatcctacatatccttacagaagcctgctaacgaaataggtaatcacacctgtattcgacaagcccggcggcagcgagatcatgttctatgtcgccagccgaggtcaccatgcggacattggcggtatcctacctggatccatgccgccaaagtcaaccgaactctggcaggagggtgccgccatcgagggagacaaggtcgtcagcaacgggaaattcgacgaagaacggatggttgagctgctggtcaagaagcctgcacaataccccggatgttccggtgcgcgatgtatcacggataacatttctgacctcaaagctcagattgccgccaatactcgaggaatcactcttatccaagccctctttgctgaatacggtgtccagactgtccaaaagtacatgtacgctatccaagaaacagctgaaacagcagtccgcaacctcctaaaggacctgtaccaccgattcgaaggtaggcctctagaggctgtggactacatggatgatggaacccctatcaaactcaaagttacgatcaacggtgacgatgggtctggtgtggttgactatgaaggcacatgcccctaggttgacggaacctgcaacgccccaatagcaaatacccactcagccattatttattgtcttcgctgcatgatcaatgcagacatgccgttaaaccaaggctgtctggccctgatgagcatcaaggtcccaccatcctgtctccgatcaccaacaaagaacgcagccgttgtcggtggaaatgtcgtcacttcccaacgcgtcacagatgtcgtattcaaggccttccgcgcttgtgccgcttcccaaggatgctgcaacaacctgacttcggcaaaaacgccaagaaggacccggagaacggcaacgaaatcccaggattcggctactatgagacaattgccggtggcagcggggcaggaccgacctgggatggagagtctggaatccatgtgcacatgacgaacactcggatcacggatcctgaaatattggagaaacggtacccgaccttactgcgtcagttcacactgcggtcgggctctggtgggaaaggtcagcatcctggtggagagggcgtgattagggagatagaattcctgactcccatggactgctcgatcttgtctgagcgccgagttcatcggccatatggactagaggggggcgagaatgcagagcctggaatgaacctctggatcacgaaggataaggacactggggaggaccatacagtcaatattggtgggaagaatactatccatgtcgagactcacgatcgcattgttataatgacgcctgggggtggtggttgggggaagtgagagtaggtgctatccgtccttagaaagcatgtacatagctctgcagctccagccgttgtatatatgttcaatggggatctttaaccacactacactaggattactcatatcttgtaacccatcaaggtccctaatcagccgccttccctcgtattctagaagagttttcctctccgcgaaatttctaaacttcgttcacacaacgtcatgttcatgctgtatacatcagtttgacgtcaacaccaacaacaatcttcaacagctataaaaacttcccagttcatcctcaaccactaccaactcgaaacataattaatccatcaaatccgcaactgctacggggaccccggtaactcctccataatgacaactttcaaactcaacactggcgccaccattcccgccctgggcttcggcacatggcaagacgccgacgcccaggaaacagctgtactggaagccctcagggccgggtacagacatatcgacactgcgcgcgtctacggtactgaagccgcagttggccgtgcgatcaagaaatctggcatcccgcgtaaccagatcttcctgactaccaagatctggaacaacaagcaccacccagacgacgtggcacaggcactgcaagattctctcaacgacctggatcaggattacgtcgacctgctgctcatccactggcccgtcgcctttaagcgcgggacggagcagttcccgaaaactgaagacggaaaaccggctgtcgcggatacagattatcttgacacctacaaagctttggagaagctactcagcacgggcaaggtcaaagctatcggggtctcaaactttagcaaggctgagatggagcggatcctggcgaacgcgactgtccctcccgccgtgcaccagctggagggccatccctggctgcagcagcgggagttcgcggagtggcataagaaacacggtatccatatcacgcattactcgccctttggaaaccagaacgaggtctatagtcgagagggcacgatcggccggctgattgaggatccagtgctggtggagattggcaaaaagtataacaagtctgcagcgcaggtggcgcttgcttggggtgtcactgagggtcactcagtattgcccaaatcgaaaacaccagagcggatcaaggcaaacctcgagggtgacttcaagcttgaagaggaagatttgaagaagattcgcggcattgatcgcaagctgaggttcaatgatagcagcaaggactttgggtatgatttttttaaggacctggatgggaagaaatgagcgtaatgggtaggggtataactgaatgatatgagcataatgataatgaatcaaatcagaattctacgcatatgcatatgtgctctagaatatatgaatggttgaagctctgcggttctccgacttatcttcattctctcaagcattatacttgataccggtacagaatctattctcgcttttcaatgcgtaggatagatacccttcaaaactgtacagagttcacctaaattttgcagaatctcgtggttgcttatgtagatacgcatacgcatacgctgatccctaggctaaaagaagatagatctacatgagtcggtctgtctatataagctgatcctgtcacctccataatctgacatgaatatccacttggcaattccttagccgtccagccttgcacagatgactcctggaagccttctccaacagttt

SEQ ID NO: 4396 - DNA, 2563 bp, Emericella nidulans
gatcggtccgaggatgtccctttgtaggtacagacatgggttcgacctgaatatattcgaattgagggttctgccagtatccaagctgtgtcttctttctagtgtatttcgattggttgaggccacagagattgagtggcttggtatgattctaggtcgaactaaaggtgatgccggatcggtttcgtcatcgtgacttgatgatactggattatagagaattgtggctccagatggatgtcgtgagtggtggcgggaaaatcggttcggactgttcttgcgagacctgcgtttagctgtagacggacgagagctgtagaatttcggggtggttttcccctgaaccagaccaccactctgcccgcggccagactcgtcatcggaatctctggagtttgacctttgctcagtcgaagcgttgtcgttgctggtaagctcattgtcgccttcaatatctgtatgatgcgagaaccgccgtgctctgtcaggcagcaggttcctcccgttacgcggcgtgacaggagaggagatggcctgcggtacatgatcgtcgaggtttgaggcaatcgactctgtaaagtcacgaagactgcgggtttgcctccgtcgaaaaggaaaacgcccttttggcattcgttccagtcggtcgacttcatcggaatcctgctcatcaggtgggttgactggcccggaacccatgccttgcatccactcgttgacaaggttactctttctttgaatggctcttgcagggctgcggctgggtcttccgctaaacggatgccgaaacacctcagcgagggcccgatcttgctggaacgtggccacagatggttctcgaatcagtcgtgagacccgcgttctcaaagctctaaatctatgacggctatggttccctgttgcaaattgtacggggcgatcgataaggtcagtggcttcaatcatttgtgggctcaagatcatcttctcgtatgcgcagatggtgaacagtataggcatatgggtgatcttaatgatagtgcgattaagccgcacatattgtctgaacgggatcatccaccggagcggagtgatcagccaagcgaaaatattcgttggcgccacataggagaaaagggcgtcggatttgaccattgagattgtgttaacagcaaacaagaactggtgttcctggttggcattctgcacaatcctcataaatgaatttgtaagaactgtgatcaaaatggtcatgatcacgaaatgacagatgaataagaacatagtcagaatcacgcgcccgaggaagccgtattcgtcccaaagcgtccaagcagccggggtgaagcccatcaccatctggaagagggcgtatgcgacggacgctggagtttcatcctggccaatactaagacaagccactagaaacccactgcacgcaataacgatcagaacaaaaactgccaccaaatcagaagccattattcggaatgcaataagcaattgagagaaatagcgatagtgatcaagcaccgaaaatagtcgcgggaacagaaggactgcgtttgcagccagaatatcgtacgctctttccgcaacttcctgcttaggagcgtatggcacaacagcgccgtatagccgcatgcagtagaagcagaacagaagaaccaggatgccaatgtcaaatatgttccagaagctcatgaggtagaggctgaagccctgctcattgaaattgatcagctcgtccaaaataaatccggcgctccagaaccagaacaaaacttccaacaaagtgattcctatgctccgttgttgtaatacggcgaggaatagaccaagaagaacggcaaaggaacaggtcgatagaaactgcctgtaacgagggaccctaagacgggagagcttaaacggcgaggcatcacgtgggttgtaaagcgtcacagaccggcgtagacttgatgcaccggagccgagatttttatctgagaacctgttgccgctagaagtggcaccgtaggatcccggtctttgttcaaagcgagcctgtgtggatgcacggtgaagactgtctgcagccgagtggaaaacaatcgtaccagcccagatagcttccaactgcttgataaccagaggatgtgccaggaagcgtttcgcctgggcacggatagctacctcaagacatgaaattcgggcagcaccaggacgtgatttacttccggctgcggaaggccatctgtcgccgtccgccttctgaccctggagagggtaaaagtcgtaggataatgcatcaatcagttcgcgcgtagtgtagtccctgagcaatttgatcgcgagaagctcgctcaccatcgcccgagtttggttggttccgctatttcccggattcaagtgaacttcccgctcgaattgtagacagttggtcatcagtgcatatagagtagccctcgaaaagtggacttcttttattttctgcaggattggcttcaccaagaactgcgagatctgaggagaccgcaattgctcccaagtcagattgacatcgcaccgcgaaatgatcaaggaccgaatcgaacgtgtatct

SEQ ID NO: 4397 - DNA, 3316 bp, Emericella nidulans
  unsure (1)..(3316): unsure at all n locations
cctgctgctgctctggtcttatttatacagaaaccagggggaggtctgagattctgtgttgactactgcgccttaaatactattaccaagaaagattaatatcctctgccccttatccacaagacactgaaccagattggacgggctaagtggtttaccaaactggatgtttcagctgccttccacaaaatctggattgccaaaggccaggagtggatgacagcttttcgtacgagatatggcctttttgaatggcttgttacaccatttggcctggcaaatgcccccagcactttccagaagtacattaactaggcgctctgtgaatacttggacgagttttgctctgcctatgttgatgatatcttagtcttcactaatagaagccgtgaactccatagggagcatgtataaaaggtcctagtcaagcttaataaagcagggctgttcctagatatcaacaagtacgagtttgaacgcaaggaaaccaagtacctagggtttatcgtacgagctggagaaggtatgtcaatggacccagagaagatcaaggccattaaagaatgggaagcacctacaactgtcaaaggcgtacgaggatttatcgggtttgcaaacttctaccatcaattcatacctgatttttcatctctaacgcgacccctaattgaactgaccaaaaaggatgcccggttctgttggacggaagagtgccagcagagcttcggacgattaaaggaatgcttcataacagagcctgtccttgctccatttgacccagattgagagactatagtggaaacagactcgtccggccatataactggggggacactatcacagtatgacttggagggtaatctctacccttgtgcctacttctctaaacgccactcccctgcagagagtaactatgagatctatgacaaagagttactggctgttgtacagtgcctggaagcctgggatactaaactctgcttagtatctaaatttaaagttcttactaaccataagaatctggaatacttctatttaccaaggaagctgtcagaataatacatataatagagcctcttcttaagcagatttaacttcaaattccactactggaagggctctgagaatgaacatgctaatactctctcttaacatgaccaagactctccaaaaggaaataatgattggttagagtcatgtacaatgcagttataccaagaaaaatacagggnggaagtaatagacattccctatccaaaagccactatcttacctattgcaccccaaggaggggtccccagcctggcagaagcccagtcaggtgatgacgagtacatggaaatacggaagctcgtacgagagggggctaggaaactcccaccaaggctactgctcaaggtttccatgtcagaatgcagcattgacgcgcaggacaatctcctattctgaggacaaagatgggtcccctgcaacaaacccttgcgtacaagcctgatccagacagcccacgactccgccctaatcagtcaccccggacgagaacagacctatttggtggtgagccgaacctacttctggccaaatatgtccaaagatatacgccaatttgtacagaactgtgacacctgcggccgagcaaaaatatggaaggaacagaaaaagggactcctaaaactattaccaatcccagaacatccatggcaatatatcacactggacttcattacagacctgccaaatagtaatggctgtacagtgattctagtcctgactgactgactgacaaaaggagtaatccttgaatctatggccaaaatgacttctcaagaggttgcttggaccctcgtacgaaccctgatacgacgccacggaataccgcagacaatggtctctgataggggcagtcaatttgttagtagagtatagaagcagatctgccagctgttagggattaaacaattgctatcaactgccttctatccccagacagacagggctacagagcaagcaaatactgtagtagagacatacctttgcttgtatatttgctatgatcagggagattaggacaagctcatccctattgcagaactggctatcaatactcgtacaagctctgctactggggtgtcccctttttacctaacccatggctatgacctctcactatttggccttactgaggacttaccagagcaatctgccgatcagagccccatccagatcagggaaaatattgcttgtatgatcaaagaagccatggactgggccaaagcatctctagcttactcacaacaagaagctgaacaccaggcaaataagaagtgagccccagcacctacctataagccaggtgacaaagtatggctgaacctttggaatattcgtacggaaagacccagcaagaaactagactggaagaatacaaaatatacagttacaaagttgataggcatacatgccctacagttgaatactccaccaggaatacacccagtattttatgttgaccttgtacaactggcagataataacaagctccccttgcaagtccaggatgactcccaacccccacctatcttggtaaataacaaagaagaatattatattgactccgtactagataaacagtggaagaagataggaagaggaggctgttgggaatatctggttaaatagactggatgggctaaacccacatgggaaccagcccatgaacttgaagaaatagaggctgtacaagcctatgaattacaacaggaacaacagaaagaagaccatcccaacctagaacctacagaacaagaaaagagaacaggctcgcgcagaaccagatcatacaacaagattaatcctccagttccttaattagagcacggggaagctctgcaacagtaagaggcacatacttaggctcgcaatcagcataaaagtcacaatgagctctgctatctttccacttgcagccagcacaagcaccattccaatagccagggatttgtacatgctccccatagacagaacaagtattcatggagcatggctcccgagtcttatgcctcataaagtatcaggatgcataatttcaagggctacagtcaggcctaacgagatcagcctaccctattggtgcagacccacaactatggaaggctccgtttgccgggaggccaaccgacacaatttgcaaggacgctttctcttttcgcgtttaacaggaaaaagccggcccttatggggcccccttcatgtgctggttctgaccaaaagaagaattttggacgccccaccttttttttttaaaaaaaaaattttt

SEQ ID NO: 4398 - DNA, 2242 bp, Emericella nidulans
gattaaagttccaagtctttgacagtcggcatacctcactttagtatggataaatgcctaaaagcctcggcaaggcacgtcgatttgatcatccagtatctacgcatggctgaagacctagaagtatggtcaccagatgagatatagagggctgctaggactgtacgcattcagttttggagtcaaattatgggatgggttgctagatgccgaggttcagtctttaccgttcagtgaatagtggtgccatatccactccacctgggctgctgggagagggcagttcaggggctgttcgaatcgggcttagtgccgcccagactcgacttttacgcctgatccgctccccagactacagcgattttaaggctttgagctattctctgtcttgctacactccgaaagagtttttgattttctgttcgaaagatcaagtagccacttcccttgtgaatatttacttcatctaaattttatcttgtcgaacagcgttctactactggtaaacttgtcttacataaattcgtcctcggagcctccggcgcccgtccctgagtattatttttttgaactcacgccactttcccgacctcacaccatttattgcacgctcgccactgctatcggtcacacttccttcaatctactcagcctctactttatcatttcctttttccgtgacgccttccttgagcctgcctacgatttcaagtttacttttccgcggcgatcatgcctggacaaaccttgcccaccttcaccccggctgaagttgagtcgcacaatagcgccaaatcctgctatgtgaccataggctcgaaagtctacgatatcacatcgtttgtggatgatcacccaggtgggggagatttggttcttgaatatgctgggaaagatgtgacggagattctacgggatccggtatctcaggcccattctgaatccttatatgagatcttgcaggacactctggttgggtttatcggttccgaatcgagctcaaagtgcgcgaatggatctgcgaatggaaagccggtgtacgccagcactgggatgtctacagcggaagacctatccgtggaaaccgacgctgtccaggattatcaaaagcacaagttcctggatctcaataagcctctgcttatgcagctgtggaacagcgggttcagcaaagagttctacctagaacaagttcaccggccacgtcactacaaagggggagactctgctcctctctttggaaacttccttgagcctcttagcaaaaccgcttggtatgttgtaccgattgtgtggcttcctcctgtcctctacgggacttatcttggggcttctggcctgggacgtgctcctgccgcggctgcttattggctgttcgggttcttcttatggagtttgattgaatacctcatgcataggtttttattccaccttgacaagtacgggttcattgtctcctagctctctaaacaacactaactttcttcagataccttcctgataaccgagtcggaataactctacatttcctcctgcatggcattcaccattatctaccgatggacaagtatcggcttgtgatgccgcctagcctttttgtcatcctcgctacgccgttctggaaacttgcgcacacggtattctattacaactggaatgccgccgtgctcgcgtactgtggcggcgtttttgggtacatttgttatgacttgacgcactatttcctccaccatcgcaagtgagtacaccagactatcgacgttatcagatttcaactctaacgctttatcccagtctcccttcgtactacaaggggctcaaaaaatatcatcttgagcatcactttgccgattatgataacggctttggcgtgaccagccgtttctgggactgggtattcggtactgagctcgaactccctcctcccaaggttctgaagactcaatagatgcggatgttctctatgagcggctctaagtctttatgacctgtcatgcccggactgctctctttctttatggaaataatgctgcaactggttgtgtccttttctatatcgacgcttcaagtggagtatctacactcctccttggtatcattccctatatgtaaagctacttattactcttgacagagggctggtttgcttctttggcaagtttctcttctacttacaactgtcacaactacgattgtatatgatcctaagcttgggtctccctatagtagtggtattattgat

SEQ ID NO: 4399 - DNA, 1661 bp, Emericella nidulans
cttcaacacaccggttcacattagcccttctgctacaacaaatctacgaatgttcgtcgagagttcttagattccagtttcaacccgctctttgtgcatgtccgcaaggcgattgaacgtgaatcgatccgtgtcctggatatcaacaaacggcactttctctatacagtttcctggtttcttggagctgagcgcgcgcggcgtgctcgccaacgagagaagtatgcccagagcgggaagaagcctgataacgaactggaaccagatagtttcggtttggtcgccggtgtgttgaaccaggaaacctttgtcttcttgaacagatcaatgcaaaacagcctcgataataaggaatgggatgatcttaatgccgctatgcgatgttttacgcagatcctattgacagtacaagaaatgtcgcaatcgccactcgaagaggatcaggagattgcggaaaacatccagaaccgcattttctatgaggaaacgacccatgaccggatactagctattcttcgtggatacacagaccagggattcggttatcttgatgcctgcaccgaattatctcacgtgtttttgcggatgctggaacgatattccaagacaaatgtcgatatgcaagtccgatcccgtcggcgagctagaaagaggaagcgggaagaacagctggttaataagggcagcgacgaggaacaggaatcggaagacgaagactacgccgaagctgagaagatgtcaaaggaacgcaagttcgactttacacgttttgccgcaaagttttccaatcagaaatgtgtcgatacatttgtggcgtttaccaaattctacaaagagttaacagcggaccagttaagcgcgcccaccgctacttctaccggatagccttcaagcaagagatgccagtgttgttgttccgagttgacattctcaacctcttttaccgcataatcaaaggacctggtggaatggattccagcaaaccaatatacaaggaatgggaggaattggttagacagcttattcgacggctgataaagaagctggagcagcgacctgctctgattacggagttgctgttcagcaaaatcaactccaccgcattctatcttgaatacggttttgagaagcagacagtaaccacgagtaaaagggcccctgctgaacttgaggttgaccccaaggcagcttcgactccggaggagaagctcagcattgtcgtagctgcattggtcaaggacgaacaaagtgcactagtcaagtggattagtgaagttctggggtcggcagcagacgagagagaggcctgggaactaaattctcatgatgttgacctcgcgggacctagagatacccaaaaccctataatcagtaggtgctcctaatattatggacgctatgtttactaacacggcacagccgtaaaatcgcaagataattcgttcaaaagggccatgtttcaaaatgcgaaacttcgacttctcatgactctgctgaaattcgaccgcctgggacaggaaaatgtggaaggtatttcctggattatcccgtctgaactcaaatcagatgaactacgggaatctaaagcggtgattgataaagcgctgttgattggcaacaccgacgaacgtgatcctaatgacttactgcgcaagaagtat

SEQ ID NO: 4400 - DNA, 3101 bp, Emericella nidulans
tcggatgagctggagctcgaccctgagtttgatccggactttgatcaggaattcgagtacgatgatggctatgaagtcgagcctgaaacctcctcctaggaattctggggctttgacggtggggtagtgtatccaagaatctgccttggacggatataaagatggaagataagtggatgagaaggaaagcgggttgagcagtaatgtaccttgttctcgatgtttctgcagcaaacattgttgacttatgcttttgagcgcatgcctatatcacagttatatctattgtagtctaccagctaattaacctaagaggcctgcaaatgctagggcaggttattgaccatggtcagcttcaatagtgattgtatgcatttgacaaattcgtgcctgtaatgcctcatagtctgtgctctcattcattctattcagataccgtttcaagattggtcattagtttacagtggccatgctaatccagaaaagaaacaccatggctgggcaagtctcctcgtccaatgcgcaatttaacggccaaatgataagtgttggctagatccttgctcagactgaggctcaattgtctcggctatgcatctcacggcctcttctgcattgatacttcataatctggagaatctgatagccgccgtgaccggaggaaggagaattggataattgagggcattctattggtctgtttgggtgctctcgacatttcggaaagctcagctgttggtcgggaggctttaggtgtgaaatgaggaggcgttggcaggaggccgtaagcatagcagcttgtgaatattcttacgcctgctggatgggtgatattgtcatcttataatcactcgtagaagcagcagcagcatgatcacggcttggtgcacttcttaccgcgttgatgttaaggggctaagtacttctgggcagacgagagtcctgctccccataccctatggttgtatgtgcttagtttgttcttgaatataagaacggcgcctagtctcagaaaacaatactataggagaatgtagttgtgcggagtgtattttagaggccagcaaacaggacaaggtcggtttgtatgtaggttctgagaccgggttgcacctgagccgtggcgaaatagactctcatgtattagacatgctttcttcaaaccacatatcagctctctagtagactaaaacgattatttcatatccagctcattgggttcgtagcgtcaagaagagcagatgctgctagatccgatgccttgcaaatgcgttagttattgcctcatgagcttattatagtcacttaccatgaagtcccagttatctattatatccattggtatattactgaccacctctgccccgagatctctatcctggtcataagctcctgccatccttttcagaattggtaggcacgccttccaagcctctttcactgcgaggactagcgcttccttcatttggtccccaccatccttaggcccatccatcaatcctctcacctgcgccacaacagattacccttgatatttgtctcgccagcttctataactctcagaccccgctgacttcacatcgttcagcacagaaaggagatctgagcgtagcggaacagggttcagaccagcgtcttcttgcagctgcgctcggagttccatagcaaccatgactgctgcgtgacttacagctgccggatagaaaccggagctgcatgctaataagcgtgttaaccgctgtcgttgggtgtggtaccagtatcagcgttactgctagaacaaacaggtagacgagggcaagcggctctccatattctcagcgaagcatcgactactgcttttcgagagaaagagtaggctgtcccgtgtagtgacggctgaattacggtgcatggagagcaggaagtagcgctgcatgaggaagtcaataatctcggttccatactgcagggttagcggatagggctttgggtcactgcatgttcacagactctggcaaagctctctatacgctgctcgcagttcagcatcgagccggagtgtctgcttatatgatcccagggtataaaggtcgttgagtaacttgacgactgctagacgctggggtagggtcctgcgcagtactattgccacggatacttgtgtcatttcggcttgaggcttcggtgatgggtcaccagtctcgagctgctcatcgtcaaagttcttgggagggcttgtatcaaagtcgtcgagagagatcagaggggcgccgcgcaaggtaaactaagttgaagattcacttccatgatcgtttttcataaccttcggtgcatctcagcggcgaatatcgacctctgcaggagatggcttgggttgcgatggagacccatgtagattgcttcctgagcagagccctggcggaaacccaggctatctccccaccaacacgcagttgctcttgtgcgatcacgagaagcaggttcgtctgaatagcctcaatacttagcctcgctttgtactttgtggtccggccatcagatctgggcctcgtatatccactggatggctaaagtccgcaactagaattggtcctcgtatgtgactgcaccaatgccaagtaccagcttgagctggaccatgaaagccgggtttcgcactgctccaggctcccagaacttctcatattctctgcaaaagctaggaatatgcagaatccgataaaatgactcggttctctgcaagtaatggttagatagtgtatcgcaaatatctcgcaagggcaactcagacgccagtaggggccaggaagatgccggctgtgctttgagcaggccgatccaggcgtccgataactcttgcatgcagggctcgatggacttgaacaagtcacgagccagataggcgatgctgactacccagtgactctgacccagtaggcgtgtcttgaggctgaacccacgagcgataggctccgcatgttcgggatgtctcttgtaatggaggtggaatgtccacttaggtgagagctcgttgcctcgatgctgcattctggctgtacatcacgggcgaaaggagtacactcgcgatctggctttcgaggtactggatcctgagtttt

SEQ ID NO: 4401 - DNA, 610 bp, Emericella nidulans
atcgtgctccatcgcatctaccgtgcttggtaaacacgaatgtgtgagcctggacaacccaccaagcggacattcctcatagcttcagggactatctacactgacagctggccgacagcatatcgtgctcttggacagctaacccctcaccttgaggaacgcttgctcaaaagccgaggtattctagatataccgagagatggtttggcgccgacggaaaagccagatgatactatcgccttttaaaggaacacctccccgagggtgctggctgacgcgctcagagtaccggggccgtaacgccgccttgcatatgacgagcggagctgaatgctgcgccgaagacggctaaaggatcgcctagctagtattgtatgagagcctattctacgtggtcagagaggctaccaggatggtagctgttcgggcgcatgctgtacatatctgcccagtgataagatgcgctctcccagtaccgttcgttgctgctgccgagagcataatgtgctgttagagaattgagtggtcaacacagacgacatgcatggcgaactgtgaggcacatgctgtgaccgcggggatatcatcattgcccaccgaggtgtaagga

SEQ ID NO: 4402 - DNA, 2286 bp, Emericella nidulans
ataccataataatccgcaccaaacacccaatctcaacggcgccacaatatactcagctgctggtacgcgagcaccccaaataatgctggcgttcaaaccccccaaaatcacacgcccggagcgctgactccaggagctacaggtggagtcctaggacaatatcagatggccaagtcgtgaggttcggcttcggtttcggcctctctactcttctgctaatgtataggcatgttttggctgtccgaggcttgtctctctctccgtcgtttgtcttccccacgccccttttttccccgctacttcgccatactcggcctttagcacctagcaatgaaccacgatttgacggacgtacacaccatgcggcattttcgtgacctttctcgtctcgttgcggtctcggtgtatgtttgtcatcttatctctgtggcaaatgatatgcactcgattcctatgagtttaaaattcgtcacttggttttggagggtgattagtaaatggatgggtgtatggtgttgcctttttctttctcttctatttcctcttcggctggaatctgatgctggtatacgggcgttatcgcggatttatgttcttcttaaggtttccagacgttccgtgccttgtgcctatttctttatagataaccgtaggtagaaatgggttggatctttttcattcttggcagagtatgtttctttgtaagatattcctggtccagatataatctttgcctccaagcctagctgctcaattactataaatcctaaaacaaagcgcttgcggccaactaagatcccatcttggactgttagtgctgaaccttttcgcgtgatatacagcgcgagctcaattgctcagaaatactggttgtagagcagtatctgtcttcccccattgtcaccgtggtataatgcacataacaagccatgttagcttgcgaatgaactacacgaagagaacgtgaagagagatctcaggcaaactaatcgctatctataatctcagcctgggaaaagtgaccggaaggatgattgtcatagctgtcctttgcaggtagatgtggttgatggatggtttccatacccaatagattatactgtggttcatttaacatctcagtctttgcttctcccatagatgtcaaaattcaccgcatgctcagctatactttctacatgcttataacgctggctcaaaggaaactggtgtggtcatggctgcggttccatgatttcagagttctatacctgccaccaatttggcgaacgttgaaatggagacgaaaaagctattctgattctaatcacaacactttgaatcattcgctatctcaccaaatcaactcctcgataccttgatgcttcttttcaattagccagctctcgacggatcgcatccgtcgttacccaacctttccgtcggactctatccgagaaatcggtacagccgtcaggattcactacgtcctgtaccctatttaagggacgttaagagagcttcttctgttcaagatcagttctgtatcactgcgctcatatcctcttcagcggtgtctcattgtgctatcctcataattacaaccaccacgaccacgccgatcagaatgacgcttatgcatatgggtaagttcgcatttctgttatttgtccatccaacttaacagtttatgctgaacgatgatgcagtgcttttcaaattccgctccggtgtcactttagagcagaagaacaagtttattcgagagctcaagacactgaagaatctaccttcagtcaagaatggacggctcattgtcggtagccccagcgccacggatcccattgaacgaagcaaagggtttcaaatagctcttgtgagttaccacgaaaacctggcggctctggcagaataccaagccagcgaggaccatcaccggtaagtttctatagtctatgcccttctgaatctcagttctcggccctaaaattactttgtagggtaacgtctacatacttcattccgtacaaggaggatttgattcgatttgattttgaggtagatgttgaggacgaatatatgtgtcagtttcctatgttggcatgacacctgattgatccaaatcttgttatagtcctgcgcttataatcagagatagtatctgtaaatgcactgtaaggtggtggcaaccggttcgggagctccgctaacctaacggataatctcccccagacctttttctccacatcttctactaaaaaaggctcgtttacgtacgggcgcaattgcaacacgtacccccggggt

SEQ ID NO: 4403 - DNA, 1904 bp, Emericella nidulans
cagcaatacagtcgccgacctacatttcactaaggcaaaggctcgatactagctcttggtctttcttcaattatgatctcggacagccgagaggtattttgcagtacgaagcagtccagtgccctcaaggacagcgagaaatgcaaggtcgcaccatcagagtgcaaagagaagttacttcctgtcgtagagattgttcagccctgtgtattgtgtgttgctattcagtcatgttagaggccgagctgatcatctatagtagacatcttgagacgtgcattcctgccaaaagggacagtgaatgcttagtcaggcagctacataagttagttccgctttactgcaggttcaggtttggctcgctcgagacgaaatggcttatgtaatggcctttttggttatgtgacgctcgagcgagcgagcttgtggaaaatttcgtctcgagccaggtcttcgcctccgattaccaacgaccaaaacaagcttgcgtgatggcctctctctctaacaacgtaagttaattattcagaaagtacttaatcgtttgcacagcggcttcttcatttagactcgcttttttacagcccaattactaatatgccgatttagaagtggtaccagtggtaccgccgtgaggtggctgttggcgcctcgagcttactgaatttcaaagtatttccgtaattatttttatagctcgctcgagacgttctgcttactgatggccttggcgtcacgtgcatcggaggtgacgctcatatgagctctggcggagctcggatgagctatgtactcaagcgtgtgcatactactttatgcttagtatgcattgtatgagtaaacttgtgtgctttatgcaaaaacgcagccatccatgcctggcgagcgctgactggactcggactgtgcctgctgagccaccgaactgttcttgaactccttcaaatacctgtaaaagtctcgtttagaatgtccatagcctagcatgtctgtgtccccgtagaggtgcctcagaaccgtaggtagcccgccatgtaaaagcttcagttactccttttcgatcccaataatctccaaaccctgaatgtcctcaaacttctgcctgatagtgtcagtgggtctgactgagactgcgccacgggtgagttctgagactcgccgacgaatgtttggggatgtgaaatgccaataatgccaataatgccaacaccagtccagtgcctacgccaatcaatcccaagtggctttgctctccctcacttcatcctaccccgtaatcgacctttctcatccactccacggcgagaacactctgccgttttatttctctttatcctcataactcattctttctaatatctttggtggttcttttctcgatcgtttcgtgtcagggagcatgtctatgctagtcgttcctttccccagatcatgatcccgttgcgccgattccgactatctgcctccctatccagcttgcacggatccctagagcctcaattatccgtcatgactaaagatcagaaatacgaatatgattctcttccaatcccgtcttacgaagagggcatcgccgaccgaccggagctcgttccgaacgcatatagccggcgatgtgaccgacgacccggccggcgaaagccaggccctgcttaacagacccgtgagttcgttgcccgcaacggccttattcgtgcctcatggttataccttctaaccgtgattcccttgaataacttctatgccaaggctttccctgccttttcgaaagggttgttgaagaattggccggagctaataattgatgttgggtgcattacaaattttaaagtcctttacggtttatttcaagctaaaaatctggggggtttgaagaaattcctttcggttccccattaattcaa

SEQ ID NO: 4404 - DNA, 3910 bp, Emericella nidulans
  unsure (1)..(3910): unsure at all n locations
gaagtggacacatgtagataattctgggctaccagggttcccatcctgcgacgaaggaatgagggagaaccactcttgtaacttgcgaagaagcattcgtgaaatctgtagagactctgaaaagttggaggacaggcgctgagcagcgcggagggagctttaacgttcaaatggttagcctgttctcgtaaaacttttggccgaaaaaaaaaaaaaagaaagaaagaaagaaagaaaaaaagaaaataaaaagagaactgactcactataaagagctctgcacctcgtccacaatcctcgccatcttcaccatacgcacaaaccggtcagcgggcgcagattcaaaatccgcttcatcgatatcggtgacgtcccattcgtactcatttatgtacggcggccgtcccatcagtaatgcatgccatttatcttcgctgtaaattgcccaccagagacgtctccggaggcggcgctcccaaaaagggatacccatcggccgacattccagctgcaagcctagagacattgcaaggccgaccatcattccaacgaatgaccagataaacggggtgctggctaaggcggctgcttgtgcactttcgcacggtttgtgaagatacaaaagaccggcctgcaggacggagagatggggtcggtggatctcttcgaggatgagatcgagcgtcagccgccagagctggacggctggaggcgcttggtaagcgtaaataatggagagatactcgtcatatttggcgaacggtagagctgatgcatacaaggcggctagcagatggacgggaatggtttgcaggtcctgggaggcgatgaaagtagacaccaccggtagactaggaaagacatgggtgaggaagagggagatcaggcgctggccgtgatctacaggaaccaggacatcgagttcctggcgcggggtggaataccctctggcagccttcgttgaggcggccgccgactcgtagagagcatcgtcggtgacgagatagtgaacggggatcttctcattcagtgggacgccaccggcattgcgaaaacggacttgatggaagtgcaagaagccgtagtcgtcgaacttgcagtgacgcagtaagaacgggtccgactcgcccgagctacccaccagctgtgctgaaacatccgggagcaggtccagcgtctgaatggcctgctggcaggaggagcgttcgcgacggggaatatcacggccgtgcggctccggcagatacgccgcacggantagggctgtagactcggctcagagctcccaggcgttggactggtaaaggcgactggcatagagaccgctcggtgaaggcgagcgaaggagcagagagtccgctggcctggcatcgccggcagccgatctggtcatcgggatcgcagcggagcttcttttgtcggcatcgatcgcagggcggatgtcgcttggaccgatatggccggcggattggggacgccattcttaacgagtctatgcttgcatggctactagggaccgacggcgacagatatacagacggtgggcgtttcgccgggaaaagatgtgcaaaaaagatccacaattgctctatccgcgaatcggaatgcaagatggccgatgattagaaagccattgatccacaagggccttaattcgccgagagggacccgccagccctcctttggctttgtatatcaggcgcgatgccctaactcgatgtcaagaggacgagtcagaggtatcccaccacatcctaaagccatgttgatctcagatcttgaatcgacaaagtatcccgaaggaggactggaagcatggcttatagtgctcggagcatggtgcgccatggtcccctcgatgggcctgctcaacagcctgggcacattgcacgcatggacaagcagctaccaattgaccgattactccgagtctgagattggttggatatatggcgcctatgccttctttctctacgttgcgggcgctcaaaccgggcctatctttgactgctacgggccgttatatgttgtcgtgccgggatcaatagggatggttgcgtctctcctctgtttcagcttcagtactggtgcgtcctctacttccgacttgaatatttggcatgaggcagttgctgatcccgtctcagagtactaccaaatcttcctctccttcagcgtccttgggggcctctcagcttgtaccctcttcaacccggccatctcagtgatcggacactggttcaatattcgccgtggcctagcgaccggcatcgcctgcaccgctggcggcctaggaggcgttgcattcccactgatcatcatgtacgcggccccgaagatcgggttcgggtgggcgatccgcatcatcgccatattgtcggcagtcctcctaatggtcgcctgccttctgatgcgcactcgtctccctcgacctagcggaaagtcggctgcgattgacttcagggccctcagggacgccagatatgccagcacaaccgccgccgtcttcctggtcgaattcgccgtcttcgtcccgattacatacatcagcagctatgcgctgcatgcgggcatcgataccacgctatcctacgctcttattccgctcctgaatgccggtgctgtgcccggtcggttcctgcccggcctcgtagccgacagactgggccggttcaatgtgatgatcgccacatcccttctctgctcgatcctcaccctcgcgctctggatccctgtcgacgccagtccggccggagtaatctgctacgcgatcctgtttggcttttcaagcggcgccgctatcagcctcactcccgtgtgcatatcgcaggtctgcaaggtcgaagagtacgggcagcggaatggaacgacctttaccattgcaagcgtcggcaacctgacgggtatcccgatcgcaggtgccatcctcgtcgctaataatggacagcacgacgcgctcattggctttggcggagggatgtatttccctacgaccgtggcgtctgtcgttgccaggggcctttgtgtcgggtggaattttagaacacggttttagttagctagagtagacacatatgagacggcttatctagattccagtagacaaatagatttctcgcactatcagccgctaaattgcaccaagccacctcccaagaccagtacggcccgtgcagctgtcagatgttagatgagatctcactcctccaccgaaccaagcgaaggggtgcaccccgtgccccgcgataatgataagagtctctagtcattttggaatttcttcgcgacgacccagttaactgattgggcaatgatgaccgcagcgctgggcgttggccgagattcctcggcggacgacggggggcctatcacacatagacttggccggccaggcctcgcacaggatacgggctgcgcgcccttataagagcatgtgctctcatctgtcagtctgtcatctgtccgtttgttcatgtttcaagcgccgttcaattatgggcaaagagggtgtcagagagaggatccgcactctgctggatccgcagccgtctatgcctaggaaggcagcggccgaggcagcttcagactctgatagcattgtctgcttgattgagtatgtcacttgtgaatagactgagttgttggctaacaattgcagaaaagaaccaaggagaccgcagaagattgaggcggcccagttgccatacaacggtttgtccagtcctccctcttcttgaggctgttatgctaaaaataaaacctatcataaccaggtgatcaatgtttcggctcgtgctgccgtggggaatatatacgctataaatattattatcagtggagtgatgttgcaactcaacaaggtggaagcgatggaagagtgtgatgagtataggatagacggttcatctga

SEQ ID NO: 4405 - DNA, 1690 bp, Emericella nidulans
aagaaaaagttcgaaaaggataacgaaaaacttttggcagaaggtgataaagagatgaaggcgagtgatgctcgtaacccggttggaggctgtcaaggaattagagaaaaaattcaacaaggagaacaagactggcaaatgagaagctgagggccgaagcccaaccgtagagaaactggaggcatccattactaaacttcagcagcggatcgagaacatgtagctccaggcccaagacaaggaagataatatggaagtggctcttggcaccttaaagattgcgagtgaaccgatacatacgctttcgatttaatcagcagctaatcctcagcagaattatatcgatcctagactcacggtcgtcttcagcaagaagttcaaagtcccaatagaaaagttcttctcaaagtctctgcgggagaagtttgagtgggccattaagtccgtcgatgagaactgggagttttgatgaactgcatttggcttttcctgattattgatttacctctgctgccgttacttctcttgttgaatcctcacgcatatccaagcaacgctgcctttgttggttctccaatgtttctattcctactctgcctatatgtaaaccacagactttttgtcagacgattgcctctgtagaatcttcaacctcatttttttttcttttttcctccgttcgacctgtggttctccctttggccatgggagaccataagcgaaagacatacggcaaactgctctaaatactctattttacaaggagttccatctagcgttagctagcttatcttacgaatagaagattcctacctttacgaattgaccagcatcctattaagacttgtttatagttgccaagttgccagatagcagatttagatcccatctgttacagtcctaaccgttcgtttcctagctgacccagcaaacggacctccgcaattcctccagatattctggaaaagcgcagtctaagcgcgtttcaagtgacgtagatgagtgccattggaagtagagtacatcgtaagaaaccagagattcgaaactgaaataaaaattcttaatccaggagtacgaataaatgcactccgttcaacagaccaattctaacagtacatgcatgcatgatatgacactgacatgactgaaccaaaatcaggatgaaacgctcatatagaagtaaatagcagaagtggtatgttcttgtacgaacaggaaaagatgtaagcgaaaatagttcagggagctgagggcacacagagaagtgattttccaagaattcaaataaagacggaacagagccagtgttccagccagctggagaggttgagatcaaagcgaaaggaaagaggaaaaggagagattataaattacacactggccgtcggggtgcgtcgatttggctgttcacaaaacgagagagaaggcgaggagaatgcgttctatatgtgggcacgtgcttttggtcaaaagatccgtgggtcgaagtgatctatggtagaatgatgcagattccgtagtcatacgcggcttttgagcaccacggctttcgtatcagggaaaggtcattaacggtgtccgtcgttctctgcgctgggtggaacgtgcgacacgtcaatagaatgtcgatatggtcaaggaaatacgttagcgttgcgcaatcttttacggccaccagcccatgcgc

SEQ ID NO: 4406 - DNA, 2078 bp, Emericella nidulans
ctttggcgctcgacgacaatggcatgaccgaaaaggtgaaggctcgacagctcgaacaactcgaactccggctgacctccgaagtaaatttgttcagtagacttacactgtgagaacattgtcgttagtatcgttggctctggctaaacgcgaaagcaaaaagagctgccctcgaggcaggcacaggtgcatccagtgcaacttaagtattggtctttgtgagggagggcatttcaatctcccttcagatagatatttgatactttagagttacttccttgcatctgcttcgcggccgcggggcatatcaaacgcgtccgtgagaactcagctgacggactacgcgacgccagccctcgatcaccatcagcgaaacttacggtacagtctcagagctatcatccatacccaatttgccggtagcgtggggagcccgcggcagggagttgcggagatctggttgagcggagctttggttgaagaagactcaatcctgcggcgacgtagattgagaacggtttgaaaattgaatcgctgaaactttgactgaattagctaggtccgtctccagctgtacgaaggcaggcaggcgacacaatcactcgaattctgtgacagcgaacaatcttgctattacggttaaatcttgcggaattctaccatttcctgccgttgtcaccgagttcgcggtaggatgcgacggctcctttcatacgcagtagaatcatgcagtcggagctcggggccctcaagaagatgatgttatctcacatggccggtgaggctttttctcagattccatgattagtacggcctaaggggcgtgatcgattctagccagagttatcctactttcagatcggatatagtctgcggtcagctacgagaaagatactgagggcactactcctgaccaagtagtagtactcgagcacatcgcacagagtcttacacaacgagaccgtcacttttcgacgactagcactgcaggagaggcgttactgtcttgaaggtggggtgatcgagtacgcaggaagacatacgtgggagcgccttcgacagtagcgacgaacatcgcgcaaaggcgcggagcctcgtcgccagtctcctcattccgttggcgacggttatatatccgcttcctcctcaacaacctgtctctcctcagctccctcatattgctggttaaacactgctaaccagccctatccactagaccagctcacctaccgtccttcaaaagctcaatccggacaaactattgactttctgcttacgactcagtccaactggaagcaaagacccctcgaaaacgtcgtcatccgacacataccaatgcccctccagaaacgcagccggaatatttctacgacctccaacgccaataatcataaacggtgattcagtcctctttttttcgagcgctttgtcaagcgtttggccctttatcttcgagcacacggtttatgagaagacagacgtaggtgtttggtggggaagaactgtgctgttgggatggtcgggaggtcggagctcaacggcgaagacttctgcggtcatagtggatctccaagcaagaagtagacaattatccttactatattgcgtcttaccttcctcctatgagcataatgtcgccttcccacccactgatggtgtcatgtgatctggcacgttgtgcctccaactgcttccccaatctttccccttcttggtcttccgcttctttcctccgccacttccttcttgaaatcagagtaaacaacacttgctttcatcaaccactctgaagtcataattgcaaatcatttgggattggcagatttcttgtacgctttgagaaagtcaaaatattttcgaaatgccagtcacaaaagccttcaacctgcccagcagtccagaactcctgccactccccgcagactcagaaaatgctaccacgttcttcatctccttccacgcctcggtcgacccaaatacagcaagccatggtgtcccgacgtcgttgctgcaatcccgcatttggaggaagttttctcggcccccgggtccccagacgttgcattcgtcgaggtggg

SEQ ID NO: 4407 - DNA, 2828 bp, Emericella nidulans
ttgttctccggcgtgaaggcagtgagtcacgtgcattgcctcgttgcgttgagcgcctatcattgatggtcgggacccgatcccttcggatactccattagtattcatcccatagtctaaaccattgagcgaataacggttggcaagtcatgccctaaacttctcatatcagcgggatgagatagtggaacaggcggatgggcggatgctgcacttgtgtgcgcggtccgcttccgtccccataggtaccgtagatattacccacctgaaccctcacgaagccttatctctgatgtaatacttatagaccgagatgccctcaaaatggtcctatcacctgcagttgcatcttcatcttcatcctcaagtacatgcaccatgggctccatctctggctggaaacgcttgaacgtcgccgtcgttggcgggggcatcggcggtttagccgctgctatagctctccgtcgcgctggccatgaggtgaccatctacgaaaggcacgactatgccggtgaggttggcgcgtcgatctcctgtgctgccaacggcacccgttggctgcatgaatggggcgtcgacatccccaagggcgaccccgtcgtgctgaagaagctcatcaaccgggactggaagacgggtgagccggtcagcgtttacgatcttgatgactacgaggagcgctggggatacgtttacaacatgtttcaccggcagtacatgcacgcgatgctcaaggactgcgcgctgcaggaggaaggcaagggggtgcctgtcaagctgctggttaaccactctgtacgccacaggatctattttgtagggcatcgctaatgtcaacagtgccagaaaatcgacctcgagtccggcgtggtcaccttcgagaacggcgtgacagcccagcacgacctcatcgtcggcgccgacggtatcggatccgctgcccgccgcattatcggcctcaaccccgagaagaaggctgctccctcaagctgcctgcatgcaaacgtcatgaccgaagatgccgtccgtcttggtcttgtcgactactccaaggactctgccctcgagtactggggtggccaggaaggcaaatgggacaaaatcgtcctgtccccttgcaacggcggaaaacttctctcgtactactgctttttcccccgtgaagtgggcgactacacgtcgcacacctggggcggcgaagaccgccctgttgaggagctgctcgcaccatacccagaactggacaagcaggtcaaggatcatctggccattggcattgaagtccggccgtggcgtctgtgggtccaccaaccatacgaatacatcagcaagaacctggtctgcctgctcggcgacgcaggacacccggtacgcttctccttctgcactacccttccgccaactaacagctgtgctcccagatgatgccccatcaaagccaaggcgcgtgcatggccatcgaagatgccgctgctctaggcatattattcaatgagacgtacttctctggcgacgtcgctgagaccctgcagctctaccaagagattcgactgccccgagcgacaaaagtccaagccgcttccgcaaaggcggcatacaacatcaacgagcggatcggtttctcgtccaacacgaacatcccgaaatacagagtcgaggatgagaagaagaagttgaccatcgaggaaatgaacgcatatgatatgtacaaggatattgaggaggtggttgcgcagaagaggggggttccatttacggagaagtttatgcgtgggctgcccattgggttgaagctgtcgaatggtgttacagttggagaggaggcatgatatccaggttttatgtttgtatgattatgcctaggtttgggattacggatatatgtagttatgaatccatttggtccagtacttcgcctcttcggattttatcgcggtgagccaaaaaggcacagctgcttggaaatcattttctgaaatcgcaatatgcttagctgaatatagtgctctaatatgtccacctacggccgctgaatttaagaactatccctgttgcttggatgaattcacgaatgatgtaatctaaggaataccgtcccggaaagtgagtttcatgatacaccagcacatattctacgagaatgtctgcggttttacatattcctgctcttaaggtggctgtatatggttagatgcccatgaggctatacgccatctcggggtttaaacgccgctatatagcccgagacggactgtagattagggtaactatgacggagcggaaggaaccagaagtctcaaaaaggacaaagcttgcgctgaaaggtaggtcgtgggtgggtatttagtagtatgtgctatttttcgttattctgcagtaatggcttcggtgttagggcacgatatgggacacccagcaagctgttggtaacattccttcaatcatcctcactactcccgttacaatactctgtaattatgcttttacttgctggaaagtagactagcaaataggtctacgactagcctcccccgagataactaagtaccggtgatacacgccacaactgcacaggcaatgccataggcttatttaatgtttccgatagtaatgggatgcatggaagaatgagcgagacaagatttctaaaggaagtgaaattgcaccagcttatcaacccgggaattctcccggaatacgggaagatcattaccctgtttatggcttcttacatcccgatagggaccggaaatccatttttttaaaggttatatggggctctagcacgggatttttgctttcacccgttttaagccacccagaatttc

SEQ ID NO: 4408 - DNA, 1488 bp, Emericella nidulans
gatgaccatgacctagcttcttcacatcctgacggagatgtagaggatgatgtgacttccactcacattactctctggaggaccagtctttctcagatgcctctacagattcgaacgatgagcaatcgcccgaggatggcattgcgatgcatcatcctttccgacagtcggcgagctctcttcatggacctaatgcgtttgcgccgccattctacaaccgacctcccacccctctcccgccgtctccttcactgacttccctcctacggcctcccttctccaccaatacttcgcgaccgaccactcccgatagctctgacgtggagacgcccaatgacactgaagcagccgtcgcaaagtctgcgaggagagcgacgactgtgcccagggcgagcccaaaggttccgacttacgagtattatggcttcgtcctctacctcgcatcttcactggcattctgtgagtggagtataattctcaactgggatgtcttttgagtactgacttctgacgcagtaatctacattctgtggtcttacctcccttcgcccttcctacatcagcttggaatatattactatccaaatcgatggtggtcgttggcttttccttcctggctagtcatgtcgatcatctatatctacgttgccttagcatcgtacaatactggatatttgactctacccatgaatagcgtggagaatattgtcgatgaagtggcaaacgtggcggtcatagacgggaaggggagacgccggcctggtggtgctgcgaaaatgcgccctggggctacctcttttcagatcatgggcccgcaaaatcgcaaagtcaactggagggaaatctggagcgaagggacggatgcggttctggatattcctgttgggggtgtatgcgaagttctctacgggccagaacgggatgagaaggatgatgactgtgtagaaagtccggatttgtagacccaggttcctttgcgatatagtatttaagaatcatgagtgatcaaggcagctaggatcattccttggcggacgtaataacaagcatctcgattgacaggcacatggtagacttcatttcttggtaggcgcgaaaatgagacacgttttcaacgatcgaagtagctctagactctgtcggtgattggtagaagcgaggttccgcatgaacttcgccattgaagtgaacaataccacgttccagcattcgatggctgagaaacttctcggcgattaccagagtcaagcgagataaaacaacccctgaccagcatctccagaaagccagcgctaaaggcggtaacactcgcgtgggcggctacgggagccaacgagaggccaacggcggcggttactttgctattgtgaggagactccagtgctcagtgcccatcccagctccaacacacagcccggcccctgttctctttcttgcgcaaggcctattgccttccgggccatctttgttgttgccttctactggtgc

SEQ ID NO: 4409 - DNA, 1099 bp, Emericella nidulans
cgtataaaagtcatctacatcagttaggatgtatcaaagtagaagaaacaccaggcatgggtattctactagaaaaccgccaagtctaacatagtcttgcaagttacaaacatgctaaaagacatctcgctctaacaagtaatccaaactcgaacgaaacgccgcaaacaagacgagggatatcgtgacattctccaacatgttgaaacactcaactctatatgcagtcagatgcatcacttagtcgaaaagcttgttcatgaattgatgggccaactcgacacccgcgctggaaatagttagcaattgtctttccgaaaaatggcacggtacatacaaggtagcagcattcgcgggaacagcacgcgccaaggcaggtccaaatccagggaagaacgccttgaatccgccagctgcgtagaccgtgcgaatcgtgccgctgattgtgggcttcccgggagcactctgaagacgggacttgactgtgtcgaccgggaagacgggaatccacatagcaataccggcggcaccaccggcagccagaacagcgggtaatgagagatcaccggtcgcgttgccgttcgcatccttgggtgtgagagagcgcttgatgtactcgtacgccgcaaagtaggcggcagaaccagggccatcacgtgccagcgtcatagcgctcccgcggaatacactccggataccaccctccttgtacagctgtcggacaacgtcgacaccgccggagtacttgggtttctggccgggaggtggagggttctggccttggatctggaggaggacttttacgcgctcaaagggtgcggtaatgagggtcatgggaatagcggagaagaacccagcggcagaaacctgggcaatggagtactgaggggtgttgttcttgacctcgacttcggaaaggttgctgacgagcgtctttcctagatcatagccccagaagctgacggcgactaagttcaccactgtgagctacgaacgaaccagacgggaggaaaacacttacacatgggagtgacgccaactagcggagcagaaacaccagcatagagaccctgcggcggtcaatggactatattccgtg

SEQ ID NO: 4410 - DNA, 1185 bp, Emericella nidulans
ttgacaacacctgcgcgagatgtcttgctcgcattcgtctcaggtaggtccaccggcaatggaccgtcctggtcgaaccctgacgcatcggcgccgagggcgattgacagcgacgcgatggcgctgtcataatgcactaggctatccagctcgagccgtttcctctttgcctcctcaacgctgtcaccaaccaggacgaatgccgcacgaggatcttgatgtgatccctgtttcgccctgcagcctcggcgcgctccttgatatccctatacagcgcctttgcaccctctaaatcgcgcggtgaacaaaacaccgcctctgcagtctcggccgccagttgtcgtcctggctcgctctggcctgcctgcacgattaccggccacccctggacgggccgtgcaatgttcagcgggccccggactttcaggtcgtcgccttgatggttgaggacgtgcagcttctccgggtcgaagaagatcccactctctttgtctcggatgaaggcgtcgtcggcgaaactgtcccagaggccggtgacaacgtcgtagaattcccgtgcccgcttataccgctcgctgtgctccagatgctcgtctctaccgaaattcttggccgactcggggttcgccgtcgtgacgatattccacgccgcacgaccgccactcagatggtcgagagacgcgaatcgacgggcaatatgatacggctcatcgtacgtggtggatgcagtggctgcgagaccgatcttctccgtgacctgtgatagcgcagagagaagcgtaaatggctcgaaggaggtgacggtatggctgcgcttcagggcctcaaccggcatattcagaacggcgagatgatccgccatgaagaaggcgtcaaatttcgcagcctcgagctttcttataaaggattttaggtgcgccaaattgaagtttgcgtccgcgtaggagtctgggtaccgccaggcgccagtgtggagactgacggggcgcatgaaggccgtgaggtgaagtttcttgtcagccatattctggagtcggggagttgtacagtaatctccttttgctagtctctagatggaaacagggtgggatgagggactacttatactacagtgcaagggtatcttttgtacagctgacaaattggccatggcgtaatcggggcaacgatcgcgacatgaggggt

SEQ ID NO: 4411 - DNA, 1966 bp, Emericella nidulans
ctatatccgtgccgacttcctgtccttgcgttccagcaccacgggagcgaaccatgacccttcccaccaaaaacggccgatacatgagtatcctaaaattgcgataccgccagcaaaggatcgcatgggcgagggcaaatttctgcggctggacagcaggctcggcgaagtaaggcgccaggttggccagccagccaccgatcaatgtgtcgtctagttgcagcagttcagttgccgaggggagaggatgagagatgatctttgagtagatggagcttgtggcaaggtggaattgcgcctgtgcgcgcagatgactgtaaattgtcgtttcataggccggcggtggtaggtgcctcgtggtggatgtgatatcctgtgttatttctcagtactggccgacgaatctaaaaaagttatagaaagagcaaggggtacgtacgctgtcatgagcattcatgggaagcttcacatcaacaccctctacggggaaatccagcggcctcgaaaatgtgatcattgccccaatgtcaaagatgtaaagacaataccagacccgcctcctcatttcaagcgttaagagggatgcatcccatgtaggaaactccttatgcaagccgatccccatcgcgacgcgccttgcgagccccatatagttatacccggagtttggcttgttgcgtttctggagataattggatatgagcgtcagcgcttggacgaggaccaagtttcctgtctcgagcacgtcgatggacagccgttctttagcggcgtcgaagagggcaaggtcgacatcgctggtgctggttgcggtagacgaagtgaagacgcccaaggctgagatcacgaacagtaggacctgccacgtattccctggcggacgcgggatgatctccatgaactgggcgcgaaaggttgcttcgtgtacgatcgggtaggagcaatggtatagccggaaaaacgcatccacgaagggttcgagctgtgacatggtgttcaacacgaaggggatgcttgctctgcattcatactcgtgaacttggccattgctgtcgccagcgtcatcatccctagtttctgtaagacggagcagggccgcaccggatgcagagcctacggccgtcaatcctcactgtactcccatcagtgaatcggggcgaatggacgtaccaaggtaaccaccctcgttcgaccggctggtcaaactggccattccatcaacgaatttgttgtccacgcccgccctctcgtcccattcgaagttgctgcttgacgggggcgtctcgagcgagaacgccgtggtcccagttgaacgcgactctgaagccggatgcatgattggctccgccccgactgcggccatcgttgaatgaggactcatccgcatctgctgggcgtgactgccgctatccaacgggctgggaagggttgcacctctagcgtcatggcccacatggcctaactggggtagagtgccgtccacgacatcgtggcacagggctggccctggctgaacggagggatggccgtctcctgactcggcagcattagcatcctgaccagccccttcgtctctcgaatcttctaagccatgagaatcttcgagagcagcagcgtcaggcataaaccgtctcagcaacgccttggtccgagcaagctcattctcgacccgggacaggtgcgtgcgcgtaagcggcgtacgcgccggtttctcatacgtacactgtcgcttatacttgctgcataatcgacaaacagggattgccctgtcgcacttggacttacgccggcgacactcccggcaagcctgttcggctgtacggtgactgggctccgcgccgggtgcggagcccggacaccggcggcaaaggtgagatgatggccgggctgcacgctagcgtccatggcggcctatgatctggatataatcttgtcgctgccccttgttgcatactatcagggaaga

SEQ ID NO: 4412 - DNA, 3930 bp, Emericella nidulans
atcgttgtatgcgatttgcgccgactgaggggtatcgctagatgggggagcatagacggtcacaggtcgagaaagatcggctgaatcggctgagggctcagactgctgaggaggactaactaagcctggacccgacgggccgttcgtgggttgtgttgcgggaacagggtcaccttggctgccattggagacaggcgctggcgattggacagcggaagaatcgttctctttgttgatttcttcagactttggtgtagatgtttgttctgttgcgatttcatcctcggatgacttgaagtattcgtgaatcttcgtcatcgcttcctccaatggctggcttgtccgacgaaagctcaatcgcacgagaacattgccgctattgaacccgtactgcgccaacgacttttggaaatctggtaacgttgataactcgcggtctaatatttgtacaacaggagtttcgtagaacaatcgtccagacccttgtccatcggtgacgggaacccctcgcccggtgagattgcgtatggatgcactgccggcgactcctgcctcaaacttgcggagaagcatccatatactggttgtgctaggaaatttgtccataagccgaccatttggcgcccctcgggcttctgacgggggaagttgtagcgcaaccgtgacgatggagggagaacgagaaagttgtacaagctctaatttcgcgccgggagagagtccagtaagtcgaaatgctagcgacagatcgagctgtttacttttatgcctgagggtcgagttagcacgagtcggatttcctgaatgttatacagagtattgcttacttcaatccatactgactggcatccagaccgaacttcttgcacgcctcttgtagaatatctgtcagatattttccaggggtcgttttgattgtggctcttcgagctgttgagtcgagaactacgacatgggagctcattattgcggggtcgctacccgagcaagttcaaaaggtgggagttgtgcgttcaactgagaactcggagtgatattcgcgttagactgtaagcgatcgcaagtaggttgacggtagcgtttcaaggtccagagttgttgagttgggataaggaatggagaggagtgagcaggcagcgggcggcgcgtcatcggaagaagctgagaggccaacgccaaccttccacctcagttccgctcagagtagagctccagcttcattcatcactcttccattcccatcctcgcccaccactcccccttcttcctttgctctcctgtctcttttcctatccggttctaccaatctcattttgaatatacagtccttcagttctccgtagtcatggtacgtgaactccctgctcaccatctccaaacacctagctgaccgacttctcagagcaatccattcgatatcagtacgctccctaccaatgtccctaatttccatcatatacctaggatatactgactctgatttatagatggcggtgcctgcgttgccatggtcggcaaggactgcgtcgcaatcgcctgcgatctccgcctcggaatgcaagccctgaccgtctccaacaactttcctaagatcttcaactatgcccccggaacatatctcggtcttaccggtcttgctaccgatgtttctaccgtttcagacctcttccgcctaaaagtgaacatgtaccgcctccgcgaagaacggcacatcgcaccgcagaccctcgccaatctcgtcagctcaacgctttatgagagacgcttcggagcttactttgtaagccctgttattgctggaatcaacaacacaacggggaagccttttatttgcggcttcgatagcatcgggtgtatcgatttcgccaaggatttcatcgtgagcggaacggcgagcgatcagttgtttggtacttgcgagggcttgtgggagccggatatggtgcgcacatttgatctattataatctcttgaccggctgactgacctcatcgtgtagtctcccgaagatctgttcgagacaatctcgcaggcacttctcagcgccgttgacagagatgccctgtctggttggggtgcacaggtatacatcatagagaaggacaaggtgactcagcgactactaaagggacgacaagactagacgctcgcgtcggagttatttgggtttactgtttctgttgatgccagtctcatagcctgtgaaatatacggttgggaacagcacggatatcttcgtttgctgtaatggcgcgcaataacatcttccgcgcaatccgcgcaagaaaggcaagtaatttacgtgaatacattgtaaggctatggtttgaagctggacgagctggtcgtggatgccggtggtaatcttctggtcagtggatatataaggcccatgagagccaagctgtgttctagcttgttggtcggctgaaatggcccgcctcgtaaacttccccaaagaatttactggattcctcctcgaggtgtttgggatgtcccatacacgaaatgctcgcagtaaatcctcgatgacagtggatcgcgagcgtcttgtaatctatcagtcagcccttgggttcttacatgtctatgaagctggtaatcggtgcgtttgcatcgacataaacgccagtagggtacggccacatccaaagtaacgaaggcaatatacctcgctctgcgccatttgcgctaatagaagcctttgaaggtcccatatcatcaccagaacatgtacagaaaacgcacatagtagaaccttcgaagcttgtacgtattactcctggtctgtcctggcagaagtcaacgtcggcagtgattatattcgtctcaggtaggaactcatatatgtttacatgtggcatcatgaaactcgtcagagctcctacaacgagttctgaaggaaacgttcagggcgttttccgtgaggaacatgatttaaacttcgattattcgacagccgcgattttgattagtatgcaagtgctcagtacccgcggttatactcaatggttggtgcacgtgcccaggctagccagcagtagctaccttggtcaacccaaactcaatagcggaacggaaccttggaaataataacctattgttttccataacacagccctgcaaatatcggtgtctcgatatatgacagagagactgtgagtcctgctgggtaggtccctctgtttgaggccatacgaagtgatccccgcgtctagaccgggcgatcggcccccaataatacgacagacaggctccatctcgacaagccactgactctaattctctgcgtttcccctcttcgtctcattacctcttcgccttttatcttgcggtctaaccgtcctttttgccttaatagcatctttaatcttcagttgaccattatcataattaatcattgtggaccgactgacggcatcttcgaccgcccttcactgtgcctggctcagcgatcattggagtacgaccatcgtgcgactgttttttacttggccgccttccaacgatcacacgagaatatcaaaatctggatcgaattttataaaacttccctgtgggaatccctgacgggacgcctgctctttgcgcagtgtctcacactcgccgtgggccaccgtgggttcgtctcctaagccgacagcgactgacgtaggtatctggtcgtcctctagacatgccctttactgacccgatgtaccgtgccagttcgaaagccatgcgctgtgtcttatctcgagacgtagcccgcaacttgttggtatcatatccatccccctcagtctcttggcgtcctcctatacctacataaaactgtttatacccgcgcggacctcaactccgcgcattactcccagcaccatgcccgaacccatggaatcagactggtccaactcatcagcatcgggccctaccctctccttccttccg

SEQ ID NO: 4413 - DNA, 3188 bp, Emericella nidulans
  unsure (1)..(3188): unsure at all n locations
gtcctgtaatagtatcttcaactcttaatcgattataaacaactgtaaaatctaatgtgtgaattaagttactattctgtaacatgccactccgtagcatacgtaactgttcggcactcttctagaacattgaaagctgcagcccacaccacagagaaatttccagaacaccacctttcatatcttaaccatctcgtccctcacctcaaccaccaaaaccaagcacgtcatctcccaaagaaaaagaaaggcataacatgcgcatgtcccgcgcaacaaccctcctcaagctccttctaggtcttcgaaccgcgacatcaacatcgacgtcaaccaccacgtcaaccaccttaatagctcagtcccctgcatcatacctcttcgcgcagtgccacgcgacaaatctctactcccactacaaccttggaaagccatcgacgtatttttacacaacaatgtccgcttccgactccaatttaggacagcctcaagaccaaccctccgaaacttccgagaagaagcctatcctcgcccttccttccgcctcacccgacaacgataccacccagttagacgtcaatggcgacggggtgaaactcgaccatcttggtccgttagtagttaactcggacggcacgctctcgcggatcgcgaactgggcgcagatgacggaaattgagaggcggaatacactcagggtgttggggaagagaaatagagaaaggagagagaagttgatggaggagggtcagggtcaagaacaaggctaagagggcgaggcagcgaaggtggagtaggtgagtttaggtgtgtctgctggacggccagaccatggagatgcacctagatgctacgtgtatattgactttgatataattatggcaagcaagcggtggttttactcaacttacgatgattgaatacaatgtatgtggggcgtttgctcgtctattgtatataccaaaagctcatgtttgatatcatgcaactagtagtctagccgaatagccagtctccgaaacgtgagacggggttactgcgcgttgtcagaatgagctgaatataaaccaagagatcaacatacctcgcttgctctggtctatagttcctcgtatactcctcgatctcatcgactcctgtaaagaggtcgacttcctcaggctttcgaaccgaagtccggtggatgattttccacccaacgtaaatcacaggaaagacgccaatcatcgtatacgagaagagaaaagttggtacgtcccaattgcccggtaggaagacctcgtagcccccaacaaacgccataattattgttgatactagagcaatgtacgcgacgtacggctggccgagacttttgtaagggagggtgtcacgggagataccctgcgcaatgagggctttccggaaacgagtataagtaaaagtaatgacggagaagttgatgagctgtgacgcagttacctgtagctttgttagattatgacctcttgcaagtcccaggatgagcagcataccaagctaatgatccagttcagcactactgacgcgctgttggagacttggaggaaagaaataagcccaataaggaggacagtagccacgcagtagatggggacaccggattttgtgcacctggtgaaaacgcgcggggctttgcgtcaagggcaagcccgtacaaggtcctgctgccgcaataaacatagctgtttcctgcactgaaaaccgccagaagaatcatggcgttaacaatatgcggcagaacgggaatgccgagccggtccattgcaatcacataaggggatgccgccgctccaggttcctcgttgtcaaaggcgtcagccatggttttgtcattgtacgggtcaaggatccccaaatatagtgctgccgatatgaagaatgcagtagtccggtagagcatatcattatgcgccctagggaggtgcctttggggatctccggattcaccggcagccatagagatgtagtccggccctgcgatcgtgaagctggcattgatcaagcaggcgagagaccccagccatcttcccaggttcccttctttgtagtgttgtgcagacgatccgggctcgttccaataccgaaatccgaaacggtcgttgagtggattgccacccagcagtgtgatgaaagtaaacaagatcaagcctacgctgagcaagaccgtactggaagcgagccagaattcggattctccataccattttaccgcaaagacgttgagaaacttaagagaagttaggacaaaaaacgcaggtttcgccgcggaagacgcacgcaaaaagaacaagtacgatagcgaatattgctgccagagggatcttgttggtccagtaatggatgagcaagctgcatgctgggccacattagctctaactcattctggcagtaagtagtccttaccagtaacttccataggaaccatggcagcttcgaagacgaaaaaattgtagccggcagcaactccaaaagcatcgtcaacgtaacgtccggcgaaacggataaagggtgatgagatcggtaaatatgtgaccatttcggccagacctaataagttgagtaccctaccaaccagcaaacgtagagcttaatagggactgagagaatgcaactggacaattgcgcgtcggttagatgtgcatcaggcgctatgggagaaaggacttgcgctggccgccatgaatattgggctaaatgggaatgggggttcggacaaacagttattcgtcatataacagcgcacctagcttgaagaacgctctacgtgctgggcctctctttgccggagctatgccacgagaggatggtaagaggacgattacgggcaaggggacaggccatattcgtacagcatttttcccttattgtcgaagaggttaattgtcttaaggctggggccacttttatntaacgagtgaaacttccccccaatcgtgcagcattttttttaaaccgtcccacggcagttccccagaagtaaacgccggccccttatcacaattttaaattttaaaagacatcccgtcctttttttgccactgttggcaaattggccccccaaaaaaattttcctttcttacaccccccaagggtgaatcccgggtttttttggctttttttttaaacggcctttccctttaaaaaattccggggtaattcccattttt

SEQ ID NO: 4414 - DNA, 2206 bp, Emericella nidulans
  unsure (1)..(2206): unsure at all n locations
attgttggagagttcatgggcgagccagtaagcgctgcctttgtctagattcgcaaggccctctacgacagcggtgatgctttccccttcgctgaccccatgggcaaggttgtcagccgaagtggggacgactgtgtcgttgcgtaccttggccaatggttcctgtactatggtgagaacgatgccaagtggcataaagacacccttgaccacgttgtgaacaccctcaacacatactccaacgagacaaagaacgggttcgagaagaatctctcttggctcaaccgctgggcttgcgctagaacatacggcctcggctcaaaactcccgtgggacgcgcagttccttgttgagagtctgagtgacagtaccgtctacatggcctattacaccattgcccatattttgcgcggtgaccgttacggtaagacgacaggtaagctcaacatcaaggcagagcaaatgatcgacgaggtttgggactatgtgttctgccgacgtgagatcagcgatgagctcatctcgaagagcggtcttagcaaggacgctctccaggctatgcgaagagaattcgaatactggtatcccatggacgtccgagtgtctggaaaggatctcattcagaaccacttgaccttcttcctttatatccacgtagctctcttcccaccgcaatactggcctcgcggtgtccgtgccaacggacacttgctcttgaacggtgataagatgagcaagagcaccggaaacttcttgaccctgaaagactccgttgacaaattcggtgctgatgctactcgcattgccttcgccgacgccggtgatggaatcgaagacgccaactttgaggagagcgttgccaacagcaacattcttcgtctctttactttgaaggagtggattgaggaggttgtcaaggatgagagtttgcgaacaggacccgcagaccacttctgggacaaggttttcgacaacgagataaacaccctggttcgtgaaggcaagaagaactaccaagagtgagtcaaccgatatcctagcctggggttccaaagctaactaatttagcaccaacttcaagctcgctcttaagtccagtctgtatgacttggttggtgcccgtgatgcctaccgtgaggcttgcatctccgcaggcatcggcatgcaccgcgatgtggtcttgcgctatatcgagctccaggcgctcatgatgtcccccattgcacctcactggtcagagtacatctggctcgaaattctgaagaaggtgcgtattcagaccttataacacagtttaatactaacctattcagcccgatactatccatcgcgctctattccctgaggttgcagagccctcacctgaactctcagcagctaccagctatgttcgcgcgaccgcctccagcatcctgtccgccgaagccaacttcgtcaaaaagctcgccaagggcaagtctgcacacttcgaccctcgcaagcccaagaagattaccatctttgctgcgaagaagttcccttcatggcaggagaagtacatcgaccttgtccgtgaagcctttgacgctgtctccctcaccattaacgacaaggagctaaacgccaaggtcggcaagcttggtgagatgaagaaggccatgccctttgttcagggtctcaagaagcgtctgatcagcaccaaggaggctcccgagatcgtctttgagcgaaaactaccgtttgacgagttcggtgtcctcaaggagatgacggttaacctgaagaagacaacaggagccaaggagattgagattgttgctgttgatgagggtggcaagaccggggaggttctgggctccggtgagaagagagaaggtctgcaggctgagaatgctgttcccggtcagccgacgttcctgtttgccaacattgaataaatgatataaatctagaatacagattacaattaagcgcaattaaaagacattatgattcccaatattttttgattttcggaggcgaaaagctgcttctatcccagatcaagtttgcttacgatacctggcaaccactttctancgaagtactggggcggtttacttcaactttttcaaacacaatccattgttggcgagctcatactctacanngcagacctgctagactttcaagacaacaattccttcatgcctacaagcaacacatacttacaaactttaaccctttt

SEQ ID NO: 4415 - DNA, 1587 bp, Emericella nidulans
cccgacggggtacatgaggatgtcggcgtttattcatcgtatacttccagtcctaagcgactccacgtgtctacaggcttatttagaagcctcggtgcggaatcccaacattatttttattggggtattctatagaactattactcgacagctcgacgtcgatcaattctttacactggcagaacgtcgctcccttccgtttgcacatgccacatcgtatttgtgactagcgctccgcctagaagtccgaagcgcgtcagcagcgcttatcttgccctacttaatacatctgacaactctctgcttcttcctcttctcctcttttctctttccagatgatggacgaaatggcgcgccatctgagtctcgagaatattcgcgcggctctctcagtactcgtatcctggcggaccctggccctcctcctagcgatcctcaatctcaagaacctccccttcgtctggcacgtaagtcgctcgcgctcatcattcagataaagccagccagaacataacgcagatatcttcatcttaggtccgcctagcccgacacttcctctcaaacatccgctggcgccccgactacccattctttcccaaaaacaaagccctgacaacctcaaccggaaaacctacgcatcctatcttcgtcccttacgcgataactaccacaacatctcttctcgaaacagattacaacttgcacaagtctaacagcacctacttttctgatctcgatgtctcccgcactgccctcgtaacccgcctctacagccccggtgtcggattaacaagcaaagagctcgatattgaacttgcggaaaaggcgcgcgcggagggcaagaccccaccgccacggaagaatatgtacatcgctctggggtccgtcttttgctccttcaagcgcgagatcaagccctacacgaagtatgaagtcgagtctcgcgttctgggctgggacaagaagtggatgtatatcttaagtttctttgttaagccagcagcgaagaacggcgggaagaggatgctttatgcgacggctatcagcaagtatgtcgttaagaagggacggctcacgattccgccggagagggtgttgcgtaagagcgggttcctgccggagcggccgaagggtctaccaatgccgggtgactccttggaatctactgctgcatctggcactggaacaccgtctggaattacagcgactgccagtggtgtggatgggtcactggttcgagaggtgctgaagttggaagacggtgattattccgagaacggaaactagaggcggagagaaggccaacgcaaaattttggattgtgagagtggacttggagcgcatcaggagggaagctaccggaatggccgtttggagggattttgggttggatgacacattgccgcgaagtgaagtttctttttttctgctacctactaggcttagacaatgaacatcccgccccgctttattttcatgctagggcccttattgccaggaggggttaacacattaattgatatccttttttcttgcttgaaccctctctcattaccttttttacatacatataatctaccctttttt

SEQ ID NO: 4416 - DNA, 4313 bp, Emericella nidulans
gcgcagattttttggtgatcgcctcaatctcttctgccgtgaactgaagcatatccaacgcatcagagggggacgctacgccgccaccacacatgatcttgatgaaatctgcgccccggcgcagctcgtcgcggacggcgctcaggcaggcgggtacgccatcacacacccgtgctagagacggcgagtgcccaccgcagcatttctcttcctcgccttggaaagcggcgcgggagtcgccatgtccgcccgtctgcgagagtgcctttcctgcgatgaagaggcgcgggccaggcacaaggccttcagcaatagcgtcgcgcagcgcggcgtcggcacctcccgtgtcgcgcgccgtcgtgaatccgcggaggagcatctctcgcgcgacgtatgcggcgcgatgggcgaggctggttgggctggcagaaaacatgtctctgagagcagggttgccgggcgttgcagtaagatgcacgtggcagtctataaggccagggcagatgtagtggtcctctgcgtctatgacggtcgagctggaagggggagtgtatttgccagtagcgacatctacaatacaaccgtccgcgatccggacagaggaattcgggataatcttgccggtttcgacgtcgacaacattagcattgataaaggcgatgtcagggcctggttcgcgcggaatccagggtttcgcgggaatggagcgcatttgtatgaggtaggcagttgcaaaatcaagatattggaacttgtaagcagacaggtagacagaacaacagaaatgttggaggagacaacgaaccctcccagtcttcctaggctcgaacagttggagaaccacaagcgggggacgtgatggcgcccaccagtcaaagtccgtacaggttggagaacaaattggccacgagtgcccccatggttctatggcatacgaagcgaggtttatccggcatagacatgtacaaagctggataatcctgccatgctggccttggtactcccatggattgggactctaaatgttgatccaagtagaggccatgtgacgggacgagacaaacagcattattagcaacagtggggttcagctttataccttgacatttctagattcaaggtatccttggattcattgccgagtcaaatgtatgttaacatgcagtcttggtacaacagtgtacaagtgtcaataagtggagaagaagggcagttttcatgactggaagacccaatccgccttgaacatattagtgaataatgatgaacaattaaactcagatcagccagtttaaaataatgtaaagagcaagcaagtaaattgtgcagttgcctgttcgaggattaaggataagagagggcaaaaaaaaaggaaaatgtagggcccgaaccgggatttgaacccgggacctctcgcattcgagacttggtagcccaaagcgagaatcatacgactagaccatccgggctactgttgacaacccatatcctctttaataacctatgatctaacacaataactcattatatcagtattcttcagtccttgctctgaacaccactgcaactgcactgtgggttctttataagcctttctaattattcttgttcaaatccttatgagttataccccaccacacagttctataacgcaggttcgacctggagaaggtctgggcacgcaccttctgaaactcgacttcaaaatcctgttttgcgaggcaacaggttttgttgcaatgagcaaggttttatcagaatgtatgaagtattgttattcttgtattctctaaagctattgctagtaatatcatttattattctgccccagccgaccgcctgggtcacaggcattgtctgggcatcgccaggcgtcgtctttgggatagggcaacaggtttagtatagcccaaaatgtcctggctggccaaggccacaggcagcagggtgccgaaaataggctgccatatgagacactatctatttgcaggcaggtcagacttttgttggatcgaccccgccctgagacccagcaatcggctgattccatggtttctaacgcgcccacgccgttgcaacattgaagatgattccattttacatgccacgaaaatgaacaagacttcagtggtattagcttctaatggggcagcatgatcaaagcactcttactagaatgttgggggataatgctccaccagcgattactataagtgactttgaccttattttaaattcaaggataagaatgaaacctactgttaccgatacgatgagtgtgcgaaccatcctctgcgtcaagttagcgagccgagtgccgactgcctcgaacgtctatcaccttcaggcctggtgtatgcccgagggggctgggggtaccacggacggacaatgttcacccatgcctcttagtgacgcaggttggtcatctacggtccagtctttctgaggccccgaattactgacggatcgatatcaaggtgttcagggatgtggcatggagtaagtatgaattcgagtccaggacggcattcgtcctccaatcaactcacaaagttcgaaagtgagtttcaattggacaaagggagttgtactttgctgggacctgtatctggctccgttacaaatatactggcagctagttcgtgactttcggtccttgttctgtcgtctctattgttgtcctgcgcatctcatgtacttggtggttttttggaggaaggaaatggctggaacaggtaacgaggcgaaatatcccaacttacctaagtgagtgcctgccggtaatgtgaaacagcttttctgctacttatttttcattattcgggtactgggctggtccctctgcgccgctttgtgctctattgatccttctagaggtgacttgtccgctacaggctgtgcagtgcgcttgactgaatacttgatcaagtcaacggctgagtgcatcagtaagcagatcagcagttaagcgattgtatgcaaatgtctttattattttttggccgtagatggtccaagggttgaggctgttgaacgagctatatattatggaatggcgacattctatatcactgcaagatccatggtcgacgcgcaatatttcccagcgacaaaagcggcacttcagccagctctactcagaataaagaaggccaataaagaagaaagttgggcgctccttcaacactgaatgcgaataatcaagtgttgcacctcgggtcggcacaaaaaattggaaaagataaaaaatggtaagggcccgaaccgggatttgaacccgggacctctcgcattcgagacttggtagcccaaagcgagaatcatacgactagaccatccaggcgaaagttaaatattttatcctagatggaacttacaagaattgctgatatttgtctcgatgtttactgccaatacgccatgttgacagacatgctacaggtatacatcttaagcctctacaagcctgaaaagcatatccaggtctctctgcatgttaagccattggtgtatatctccaaagcaggcgtatatactccaaagtatactaacgattctctagtatcggaaatggatccttgcatttcagtttttacagtctatcagtcgagtctctagccgtagtggccgtgggtatatggtctttcctctaatggcttaagcatcaggttttctgcaggttttagtaaggttcgcggctgagctgatcataggataacacggggaacagttccgcttattgatgttatcaaatatcagtgtccagcttcaagtcacgaaatgaactactaatcaggctccagatagtataccctcgagtagcaatgatggtcaatgcagagaccctgattgccccactgtcactgtggaagccagtcgcagtttcctcagatatttcatgcttgcttgttatcctcattggcattatcagggcagagacaaattcccggatgactacaagcacgctgagaacactcttgacgaaaaaaaacaaggtggtattaatcacaggtgttgcttggtcagttttaaacacaatccttgaacggaaattaccctttccgttggcatttatgacaggattaaaacttgtttaagatgcaaacatctgccagattgctttaacttaaccttcttgtgcctcccaatagctaatattcctgttattaagcttccaatttctcccttataaggttctgagggtcggtggtgttttactccggttgctttcaaccacaaaaacatatgtttttgtacacatactttttggccctcggctcttattttttgttatcttcacctcttctcat

SEQ ID NO: 4417 - DNA, 3218 bp, Emericella nidulans
gagagcgtatatgcgccgaatagaatactataaatgcctgtgctccccgacaatgtaaacccacacagttccatgcaactgaccctacagtgcatcggctttagatcccattatggcgcagaaatacgctaaagaccaaccctccggttttactaatcgcattgagcgcgtcgctgtcgtcggcgtatgacaaccacgtttcttccattagagcctcttcactaatttacgcccaggccggtggttccgtcggaaagcgtatcaccaacgagcttctgaagaccggcaaacacaccgtcaccgcactgagccgcaaagacagcaacaccccgctccctgacggcgtcaaggtcgtgcgtgtcgactatgatgatgaagaagaagaagccatcactgccgccctcaagggccaacagttcctgatcatcactcttgcagttaatgcggcgccagacacagagtcaaagatcatccgcgccgctggcgccgctggagtcccctatataatgccgaacacgtacgggggcgacgtcacgaacgaaaagtttatgaaagaaatcgttattggtggcagctacttgaaggcatgtgctgaggtggaagcggctggcgccgcgtggatcgcactcgcttgcgggttctggtacgagcacagccttaccacgggcgaggggtggttcgggttcgactttgcgaagaagagggtcactttcttcgatgatggtaagacaaagattaatgtcagcacttgggagcagtgcgggcgtgctgtggccggactccttagcctcaaggaattgcctgaagatgagaacgatagttcccccgcgctgaccaattgggccaacaaaccggtgtttgtggatagcttcctcgtgagccagcgcgagatgttcgacagctggctgcgggtttcgggagacaaggcagaagactggacgatttcttacgagcccgcaaaggcgaggtgggaaagaggtatggagatgctgaagaagggcgactactccggcataagcttgacgatgtacggaagggcgtttcttaatggggatggcaactactcgaaggaccaccagcttgtaaatgacctgttcgggctgccgaaggaggatctggatgagaggactgctgttgcaaagggcatgatggatcggggttacagttactttggtaacagagtctaggtcagctaaacttcgggattcgttccggattataaattatgacgtgcaatgaacattaattccaaatggtcctctatatacctgtaagagaaaccctgtagtcgggctgcaatcgcatgcgggtgctgagtcggggtaagcgttgaagaagtacttgagcacgtgggatgtccttaagagcgcgtcaatacatgagaacttccagtagctactgatgaaaggccgctgttggcaatctagtcgaaccacaagctgacttgtcgcctataacctgcagtgctcattcgtgccgacgcatactttgctgaattgtatattctgggcaggaaatgagctgattagaaatcaatgatatgtaaactctagctctgattatcaatgcatcgtctacttccagcttacttctcactccagcttcgacatcgatagccggtggcagttttagggctaacagtgcgtgtatagttatgcaggtatattcatagcgtcacgtgacacttgcgctcaaggtcttcgccaccaaccggaaaataaattctctccgcatcaattccggggttgagctatcgccatccatatcatatcagcactcttttcgctctttcgcctcagtcctcaatttctttcgctttatagggattgtcaagggcactaaccgcagacgatcttttctactcctttgtctctctttcagagaaccttaccatcatgaacttccctgggacgagcggctcttccgccgcaaacatgaccggcttcggaggcatgggagccggcggtacgcaggggatgtcggaacaagagcaggctatggtaaagatggttcgtctcgcattccattgaaaatgtatttggttgggctgccttgctaagtgtcgcgcagatgcaaaacgctatggaatcttgtcccctcaagactgtcatctccggcgtaatgggattcggtcttggtggtcttttcggcatgttcatggcgggtgtacgtaactaattttccgttccaccatcttgcactgtattcaatcagagctaataatcctcagatgtcctacgactcctcgcttaccccccagagccaaaccatcgccaacctcccttggcgccaacaactcaagcacggcttcaaggatatggggtcgcgctcctggtcatctgctaagaattttggtatcgtcggcgcgctctactcagggacagagtgctgcatcgagggacttcgcgcgaagaacgacctcacaaacagtgtgtcggcgggttgtatcaccggtgggatcttgggtgccaaagcaggcccgcaggctgcagctctcggctgtgcaggctttgccgcgttcagcgcggcaattgatgcctatatgagaatgccggagtctgattgagctgctgtgagctgagttgagtttgggactgtttcttcggcggcaatggcgttcgggtagatgggctgcattgtgtatggcgtttggctctgcgttgtgggttgcgactcgctgctcttttgtatagtacgaatgttatagaccagatttatattggtaacttacgtgtaatcaagaatcatcaccgatctactgagtgggcgcctaacaaccgttctagcactgtattccgacagaatgtgaaaattcagccggccagacagcgctgctaagaaattatctcgcctaccgaatacagatcctacaagacagatatgataaagccgtattgatcgttccttgctaaagggtcgtgtactgtattctccatagaaggtacgtgcgagggatatgagcctgtataataacagctgctgctgtttgatcaggtctttaaatgccgtccattctcaaggggcgcctttcacctgtagggcttagcacataacttggaaaacccaaggatggcttcatattacgagacgcatttaatatttgaaatctttcctctcgaaatacaatcccccttgctgtagaaccgccctttagatagagccatttgtgcctacgtcagcgagccgggttatgacctccgggcaattttgaccacctt

SEQ ID NO: 4418 - DNA, 2278 bp, Emericella nidulans
cagcggtggtatggtcgaccttgaaacagcagccatgttgatgacagatttccaacataaggctgcagcagctgccaccggccaggttcacgatcgtgccgaatccgaccgttctttctcccctggacgcggttcgctcctcgagccacctgtttcgtatctatccggcaatgcgacattgccgcaaatgccgtgggattcgttggtttcgccgaccgaatcgaaacatcacctgtctccgtttgtatcccaggatgctgcttcagagtctcacggactcatggaccgtcatgtgaccgactcgatggcgccgtcgctgcactcgctggtcaactctttgccagtttcaggcaattccactccgaacgcgttgtctccatacccatcaatgactgggcctgtcagccccgttaactacaggcgatccccgggtcccagccaggctctgactctgccgaaggcacctcaaattgccaacgatctagagcgcaaccagattgtggaacgcattcgtcttgctgactcgcttggtgtgcttcctgagtcgttccaactcccaacgacagccgctttgaacaagtatttgactacctatttcaacttgtatcatcaccaccttcccttcctgcatcaggagtcgttcaaacccactacggcctcatcgcctcttttgctagcagtcctctccattggagctctttacacattcgagcggcagcatgcattcatgcttcatgttggttctaaaatgcttgtcaaccagttccttcaacacaaggacaactttgactcgagaaagtgtcctttgtgggcgatgcagagcactctgttgaacatgatctttgagagctggagtggtgacccgaagggtctagaatggacttgctcaatcaagagtcttcttgccaatgtaagtcaaaaaatttgattccgtttatataacctgcttacaattttcttagatggtcgccgggaaccgataccagctcaagctccgcactgaagctcgtgaaggacggcaaccaaccagggaggagtggattgaggatgaatcttgccgccgtacttactacgctgtttacattttcttcggcatgcttaccttgaccttcaaccacactcccgcaatgagctttgatgaatttgataacctggagctgccctcgtctgaatccatgtggaatctagacgtcaatgatgatgaggcatggcgccgaaacttggcttcatctacgacaatgactgttcgcgaggcccatgactgcctctttcaaggcgatcaaacccggtacagcgcgttcgcaacccgtgtcctcatcaacgccctgtttctgcaggtgtggaaccacaagagaagtttcgaagctcttcaggatgtggtcacagaatacaagctccgcctcgcactggagacttgggagaactcgctggaggtttgcgagccggaaacaattgtcgttcctctcagcactcctcaaaacggacatccactcatctttaactcgatggctgtttaccgcaacactcgtgcccgccttgaggttgacctgaagtccatccaggaagctctgcgctatcactcttcctacgaagttgcggctgcgatgaccgtcgcccgcgagaaggtcaagcgatcgcaagagatgaacaaggttattcagtcgtgctttgagtgcattgagattgccgccatggggggaatggactgggttgccaaaacttcggccaccaactggagtgtcgaacacccgctctgcgggttggatctgatggtaattctcagcctctggctttatcgcctggaacatgacgaggagcctgcctccgaggcagaaatggccatttacaacaaggtccggaatttgtttgacgatgatgctgtcgactcgtgtggtaaactcagctccaccgttgcccgtgtatggggtaacatcctagacggtgtggtggtttgggggtaagttggcattcaagtttcttaaagtcctagactaactcgctacagaattaccaagcttatgggcgagtcattcaaacttcactcccaggctttggttggctacgaagactctctacgaggtgccaaagaccagccaatccatgctgtgccaacgagttcgtttgcgagtgtgggcaccgcatactagctcaccggcttttcatatggggttgaccctcaccgattaaaccgtcgctcgttcacactttggtgctgagacacgcagttcacccagcctctcatactggttgcgtaccatgttgggttgcatctcggaaa

SEQ ID NO: 4419 - DNA, 2946 bp, Emericella nidulans
agcttggtcgagataatcccaacgactgtcctgtactaccctacacgttctgtctattcagcatttgcttcgagctgttgaaaggcaagaagcgttgaataagggttgagagctttcgtttctgatctccaggatgtgcccgtcatttcccgcttcggccgtggaagaatgaagcttttcgagctttcaggtaggaccttcttgagaccttctacgcgtatgtagattgtaattgatcaggcacggtcagtcctctatcggttttcgtggtgaactggaaggtataattaggtgttatgagtctggtgttcaatagggccgtaaatttctagcatatatacttcatggttgaacagaaaacgaaaaattaagacaaaaggcatattctggttaatggttttctgaagcagatcttagtatataaaagggatcgggttttatagtaacaaataatcatataggaggtctctttataagtgatctatacttaaaagtatgccaaggcaggtcctaccaagctgttatacctggagtatgtagaatttcctagtgctgcgcaatgtaactgctataatagataaagaaaatatccatgtttaagtttttgagaagcttccaactgtataagcgtagctaatctctgtgggcggtcgaatgacccgtaaaatatatagtggggagagaggttgctggttgctaactagtcgcggttcatcaataatattctacataatgggcatgtcttttcagctgtcaaatcgcatattggaaatgtaccaaattgatatatagtcattttaacggcatgctagtcgttctgatgtatttctttgctcatccttagtcaactgtagacgacaccgaccatattggggcatcaagttaaccatcattcgttttattcataattcaataaaccaatcaatagtccttcaacaatcaatggagccgcttcacttggcaccatacctcgcccggtaatctttcagcctttggatctctccctctccgatctcacttcccagcttctcaatcaaatcatgcagaccaataaccgcacgcacaggaaccttctcgcccagatcccgctgagcacaaccaacagcactcttcgcttcactctcactaacccgctcctcacggtccagtagaacaactactccggagacaatgccgccctccttctcgatgatgcccacagcctcgcgcagcgccgtaccagccgtgataacatcgtccacaatgacaacccgcttgcccttgagcggcgcaccgacgatgttgccgccctcgccgtggtccttagcttccttgcggttgaacgagtagctgacgttgtcccaggtgcccttggcctgaccagcgagtgagtcgcgcacagcgagctcgtttacgaccgccgcacagatgggaattcccttataggcagggccgaagataatgtcgaaattgggggttgtggtgccgtctgcggcggtagtaacgaagggcgcggcggagaggacacttgcataggcggcggaggtggcgcggagcaaaggagctgtgtgtagtagcgaagaggtgaagaagtagggcgattcacggccggatttgagggtgtaggtgccgaatgagagtactttgttagagatgaggagggggagtagagcggctttttgttctggggcggcggacattttgattattgggttgtatttctgagttcaatagaaaatgctgagcgacagatgagttcagaaaaaagtcaacgtctatgcaattgctaggaagtatagggagaaagttggatgagttttcctcatctttttttgctcggcgatctttttggaggggcggagtggcagcagtgggcacgcaacgaggggcggggtcctccgagcttttcatgctcaatcaccctcctccgctttttttttttctctgtgtacctctccgcattattccctgaggaaaggttgtattcaattccattgcatcgctgattctgattttccgtctttgcttgcagcagtacaccggacttctatcggagaaaacacgtgccgctcatcctccgaactccggtcctgaggggtcctccattcctccattcctcttcttctgcatacctctgtctcacgtcttcagagcaggctttctctgttgaccttactgcactcccctgtcattgcgtgcttctgtctcgaatattcttcttgttctcttgtcttagccgcttcggagttgcatgctttcgccaaaaaacagaggcatttccgaaaatctcaccggtgggcagacctgtcagcagagcgaggaaagtcaagtactcaacatcgattatccccgaacatagttgagacggtttctcgtcgtactgtgagtagaatagcttgttcccctccaaactgtcatgttctctgctggccccaaaaaacagtgctgatggctcgagcagaataagcagcccgcaagatgcatatcaaagagaaactcgcccaaaatgaggctgccggtaaaatcggcatctcattcgagttcttccctccgaagacagcgcaaggtgtccagaacctgtacgacagaatggaccgcatgcacgggctcggtccgtctttcatcgatatcacttggggtgctggtggacgactctcagacttgacctgtgaaatggtcaatgtcgcgcaatcagtgtacggcctggaaacatgcatgcatctcacctgcacagatatgccccaggagagggtggacgcggcgctccaagccgcctacaaggcaggctgtacaaacattctcgctctacgcggcgaccctccgcgcgaaaaggaggtgtgggaggctgctgatggtggattccggtatgcgaaggacttggtgaagtacatccgggagaagtacgggaaccatttctgcattggagttgggggatatcctgaaggtgccgatgacaattcagatgta

SEQ ID NO: 4420 - DNA, 6355 bp, Emericella nidulans
tatctatacacgtagacgcgacgatggactaagcttaccaagtcgctctgtctgtgagacaggtttcgcgtcagcattgcgttcatagtcagggatcataaacactgcctgatacggacctcgatatcccgttctgtaaggggctcaattagcttagactggtaacgtatacatctaaatcttcatacctccattattggttttctgaaacagtccattcctcgcttgtccactgttgtccaggtacttttgtacggactcggcgaccgcattggcaaggtcgttcctgggtcagttagatattgctgtaaaatatgtctactagtgtcaaggacgtacatgtttgcgtacgggcggttaaccatggcgacggattgttaataagattcttggtacctaaatggctctagttatatttcgaggtaaggggattgattcgctttatactcagtagcactcagtggctgcatcgaatacgagagggtgcgggcggggtatctatattaagaatacgactatgcattgctgggttcagtcaccctagtagattagagtctcatcgcttccattttattctagtcaggctacctttggtcgtacgccatggctcgagcatctgtctggcaatcagtaggcgtctggatggttgcctggctcaaataccttcagcttagcgaacatgaaatcctaccttgcattacgtttatacactgcttacccactattgacttctgtcaccctatactctaactacatgcatgcaaaataccccgcattgcgggtggttagcgatgcagacaaggctgcatataatcagaatatttggctatagtacaaggtacatagctactcaaagacaatctgagattctttgaaaggcaaagtttactatgcctgttttaagccaggcgaatatatgtcgaatgtcgagaccgtattttcttcgcataccgcacggctttcagacccatcagcctacttattccctactgattcctagaaccaccataccctttcatcaatcaagattcgattatttaacgcgatagccattcaggcagcagagagatatgtaatgatctccatacagacgcagatgaggtgggataggtagtcatctttattccatcgaaacaaccatggaccctttcctctaaataccttcctctgacccaacagcccgtcatctttcatgtcatactgccataggtttaacttggcactctattcggagtacctcactcgaagggtaaagctcagcgaaacggccatagtgaggggcttttttttgctgttttactcgtagattgggaagaacaaaagctgaccagtaaaatatggagatttccagctaggaccttcagtgactgacaaaggactgttgaattttgcaatagatacctctcacaccccttataccccagagcctatagcattgctatataagcgccagaaagttacaccctattctcaccgtgacacgactggaatctcagccagcttgcttgtatgcttgctcacccgcttcgacgcgaacctctggatgaacagtgcggtattagatatcctcacaggctcaaactcaccaagtggatacatctcgatattattcatagagattgatagaaggaagaaatagcaaaggaaacgcataaccatcttgtgctttatggccacttagccggcaaaggagtgcgctcatgatctcagaggaacacctctgtccgtataaagcgctctaactgtaccattttgtgttatgcgcccaggttcctgattcagagttactttctggaagatcgcgatcatatagtctccagtgcagaaaatggaataccccagcggcatgcggattcagcacctcggatacattgccgacccagtcgaagcaagccgaatttgttggtttcataatccatgaacctcaaaatacctgtagagacaaaatatgaaacaccgagcgaccttcgcatgaatggccggagagtgcacgtgttcgatgtcgaatttagcaatgtggtccgtgggtggtccgtggccagaatttcccgattaagcaatcgggccgcggatatagcacccctgttgagtataaaggcgatgctagcgggaaacaacaactctctacatgcaagacctcaattcatcagagaatataatgttcttatcacggaaggtatgttcgccaacaaacactcaccaggcattcctaactcaagtaggcgatcatcatcggcgccggcccagcaggcctctctcgccgcgctgcgcctccaccaaacaacaaacatcacgcccgtaatatacgaactgcgacctaaacccacgacactagggggagcaattggcgtttctgcaaatggccttcgcctcttcgaccgtcttggagtgtacgagtccctgtccaaacggggcagcagccgcagtgacttcgccgtgcattcccttagtggaggacggctaggtggtcttgacgatttcgccgctcgcgcacgagcagagatggggtacgggtatatgagaatcaagcgggcggatgtggtcgacgttctgctggaagctgtacgaaaggctggaattccagttcatttcggacggaagatcactgggattgacgataccagcgcgggtgagggggccgatgttggtgttaggttcgaggatggatcatcagatagtgctgatatgttgatgggttgcgatgggatccattcggcggtcaggaggttgtatgtcgaccgcgatctgaaactagagtactctggtctgtccgggcttttctcgattattcccacggcacagttgccgagtttcgtgaccgatcagttgacgggattgaatgtgactctaactgagaaagggatgttcatggcagcgccatgcacggcagcgatggacgaggtatactggggctttcagcgggagattcctgtgccggatccgcaggatgacagagacggatgggaggtccgcggacggcaagaggtggatgggttcaagggtaatctgcatgagatactagctagcggaaggggagactggacggatgcgctgagacaactcgtggacgcgacagatgtgatgaaattctacccgatataccggctaccactcgggggcacatggtcgcgtggccgctgcttgctgctcggagacgctgcacacgcaacgcagccacatgcgggtcagggtgtctctctggccgtggaggatgtctttttggtctcccggttactggcagatccctctcggtctgttgaagaagcgtttacattgtttcagcagattagaaggccacgcgtggccgaaatccacgagacagcagcgcaaaatgcaggagctcgcaaggagacgggaccaattactcagtggctgagagaaaatgcccttcgaattgcactttccactcgcttgggcttggggattgggcagcagttattgggccagaggtacaccatctatgatgtcgacacggagcagatctgaatatattttgtactccggacggcagacaggcttgccttgggtaggggacttgatttcagggaagtgccgtggtaccggttcttcgaatttctttcttcttttccatataaatgctagacacaacgggattgtacgataggatcgaggacgtttcgtctttatatctttagaagtttagtagacggatagacaatagtaattctcaagcgttaagctttaatctgagaggtagcgaaataaccaaatatttagggattgtcatgacgataacacgagcagacagaatgtacgtgtagttatctcaactgtttacgacagtttagtagccattgatagtattgccagggccgaaatggcaaaatgtttgaagaccagcgtcacccggacggttctgcccggatgactttcagtatattcatcgctagctctctgtatcccaccatcaaatcactggggaattgctcatcccgtggcagagccagcaaccggctgtgctgcgtgaatgcttctgcacactgccacgcatggtcctttccagtggcaacgtcaagaacaacatcagctgtatccaccttggcctgcatcacaaaatcctcgatatcgtagagaaaaacgagctcttcagagccggcggttacccaggttcgagcaggaagtatgtcagcccacgatccacgcgcctcacgtccaagggcaaagttgccgtagagcacatctagctcaggagtcacatcgcgcagtaaccatttacagtacgtatcaagtgagcgcttgaagagccgctcttcccagtgcagatctagcacgcggggatgggatgtgtgcaggttggtccaggggctcactagcacggcagctgctgggcgcaagtctcggccattctcgtcgactgaacgacggcgtcgctcaaataacccgacgagcagcgacagtatgagatgcgctccagccgaatccccaattacaacgaccttcgacggatcaacacccatgtcgccgcacagccagtcatacgccgccaacgcctcatctcgctgcttcgggaatacccctctcggtgagagtgtgtaatccagcgagaatatggccgtggttatgttatgctgttggagcgtctcggcgagaagaacgtgctctggagcgccggcacttggatggcccgtcacatacccaccaccgtgagcatgaaagaccacgagatcagcattgcgaggatggacagcttcctcagacattccacgacatatccagtaaccacagaaggttggcgtcctatccggctcgaacagatgcgctcagatgtccataacgagtagagtgttaaggcttgaccggctcgtatccgaggctgtgtaccattgccagaccgagagcgggacgtggtttcctatactatctaggcgtcagatcaaggagacaatatgctacaaaggcaacgtaccaggtcatgacatgtcgaaacaggtgttctcgcacgggtgggggcttataggtctggttccagggcaaccaacgacggagcagcgttgttccaatgacccacggtaccctgaagcatagggtaaagctagtttggatcaggtcgaggatcgtgactgggaggtctgggtttggctcaaggataggccccatcgcgtgaagacatggtctaggtaagcaaccactgcaattcaaagtgcggggagaaacaatttattccagtattctatacagcctaatatccggttcgaaattggatttagccgacattgctctaatattcctgcggtcagtgcagacaatcaatgccatgatttctaccagcaggtgttggttgttggttgtatcacttgcaaataaacgccacgaaacggcttcagtatttgtggcacatgtccgtcaagatcgcaccagggccaggcctcgggatcgcaaggcattccataaggggaggtgggcctgttgatcaatcgtagcaactaggaaaagttccggtcgatcccgttggggtcaaaacatatatttctgacctcacctgcctcagccgcatgtcagcaagcaattcacttttcatccaccatggccacgaagctcattcttcctctgctcagtgcgctggtcttctacaccattttctacctcttcgagatcaatggcgcaagtaagctggtgaaagagtccgttgcgactggaaaactccccggcagcgatgcagcgctgcgcaaggtgtataccggaatcgcgcccattgacgagctcatggagatcctcgtcgtcttcttttggcctaccaccgatggcagcaacctctccctgctagtgcatacgatcggtttctcagggacctttggatccgcctgggttttggttacgctagagtcgtggaggaaagggaatgcctggaaaatggtggcattcccagtggtctttggcttgatcgcacaagtcatgacatttgctttttcagcgcccctctactttgccatccatctgttcacctcggcgacggcgatcagaccaaccgcggagaatattcgcgtccctagggcagttctgaacgccatcccgttggtgtttgtgatcgggtacatggtgccgtcacgctcttgcttctgccggtgtccgagcaggtcaccacagatctgaagcagatctttatcgcgctctggcaaccgtggcccgcatacgtctcgatcctgctcaccctggtccatgtcttcttctcgccgttcacccgcaacgatggcaatgtcgaaggcggccgtgcgaccctgcattcgttccgatgggtctacgcattcgctttcgccaataccgccctgacgcatatcatcgcatgggtgatcctctctcgaccgttgccacgcctcgctgttcaaggaagagtact

SEQ ID NO: 4421 - DNA, 3420 bp, Emericella nidulans
cctgataaggcgtcgataagatcgagcagccgagaacttgttgagaagccaatttcttcaggtgagtgattggctgttctgattgactgcgagggacggtgtgtgaacagacgatcccacccccgggttttatatttttaaggtgttgaatagtgcaattagtgtttacaatttacagtatctgagtatggtggataatcatcaagacgagtagggatagtatggcaaggatcgaggtccatggacgacagtctgtcaggctgtccctttgccagtcgctccagtcgctcgccagtcacgcgccagtcacgggacgcacgggcgaattggtggtatcatcgttcggggaggagggttgggaggaatttgagtggcgggcttggaaaagccatgcaggggtccctgttccgcgccattatttggtttgcacgaactgtcagcactttaggttactctttgatttcagtcatgtaagactaatatggtgatccagtagactgactactctgctcgactgacttctctgagcagacgtacagtaaacaggatatttatataattacccattttatatattcacaaataatgtattaccattttctatattttatattcttatactttactcatttacatatttttacgttcatatttcagttttggaggtacaccgtaccagcagtatcagctgcgtatcacgtatcaggaattcgcgctccaccgagtatactccgttcggcatttgcaaattgtgctggatcatcgcgggtaaggcagaacaaggaacaggtctcctgagccaatgaaacatagcgtacaatataaattacacgctccgtaacttcaaataccgtacgagatcgcctctggagctttgttgattccagcctttttttgacatttttcctgccgagtcgcctcagtcgctgctcagtcgcctgcgatggatggtggttatggactgtcgattttttccctgcctgtgatttgccagctgggtttcgcaacttcccccctctctatccttttctccccttaagttgcccgtgcctggacaccctcctttcgctcttcggccatccttgcattcattcctcaccaccacctccctctcctatccatcaagggctgtggacgatctgaagttcttgtccgttccctcaggtctcccggttgtgtaactggggctttcctgtttcctttcggtccattggtgagtgacaacaacgaccttgttagctctggaggctgctatacccgttgttcgggttgcttcggcttggccttgtttttcagtgcctcttttcagtacctttcagtatttcagtgctgtgcctaaccagttccagacattgccagctctcaatcgccgccatgtcgtctactgccctcccgaagcgcgttgcgctgcatcgcaacccgactaccgactcttcggtccccagctccgtctcggtctccccgctggactcgccccgtcagtctccgtcgtcgacttcgctctcgtcaatggcctcggatgcgggcaagggagacttgggcaagatgctcgacacctatggcaatgagttcaagatccccgactacaccatcaaggatatccgtgatgccattccgtcccactgctacaaccggtctgctatcaggagtctgtcctatgtcttccgtgatctcgccgtcctcgcttccgtcttctacgtcttccacaaatacgtgaccccggagaccgtcccttcgtacccggcgcgtgttgcgctgtggactctctacactgtcgtccagggtctgttcggtaccggtatttgggttcttgctcacgagtgtggacaccaggcgttctttacttccaaggagctcaacgacactgttggctggatcctgcattcagctctgctggtcccctatttctcgtggaagatctctcacggcaagcaccacaaggccaccggtaacctggctcgtgacatggtcttcgtccccaagacccgcgaggtgtacgcctcccgcatcaagaagaccatctacgacctgaacgaggtgatggaggagacccccttggccactgccacccactccatcctgcagcagctgttcggctggcccttgtacctgctcaccaacgttaccggtcacgacaaccacgagcgccagcctgaaggccgcggcaagggcaagcgtaacggctacttcaccggcgtcaaccacttcaaccccaacagccctctgttcgaggccaaggacgccaagctcatcattctgagtgatatcggcctcgccatcaccgccagcatcctgtacctgatcggctccaagttcggctggatgaacttgctcgtctggtacggtatcccctacctctgggtgaaccactggcttgttgccatcacctacctccagcacaccgaccccactctcccccactaccagcccgagtcctggaccttcgcccgcggtgccgctgccaccattgaccgcgagttcggcttcatcggccgtcacattctccacggcatcatcgagacccacgtcctccaccactacgtcagcaccatccccttctaccacgccgacgaggccagcgaggctatcaagaaggtcatgggctcgcactaccgcagcgaggcacacaccggtcctctgggcttcctcaaggctctctggaccagcgcccgtgtctgccactgggtcgagcccaccgaaggcaccaagggcgagaacgctggtgtcttgttcttccgcaacaccaacggcatcggtgttcctcccattaagctgaccaagcctaactaaaatgactggtccgtccgtacttagaaagggtgtttctgtccggcagttatttaatgtcggctgtctgctcttgcaatttctcttttgatttatctttcgtggtgtatctcgccggaacgaatggccacggttcgcgtttgcgttcatgttcatgttcatagagcagctgcgaagtttcaaatgttcgttcgttcggctcggcttggctaggcgtatgatggtgttatgtttaggttgagaaggtattcttagttgggagctagagaaaagattatttgttccctgcaattttgctgtaccccggaaacatagaactgttactgtaccaatactctgcgttccctccccaatgcaccccatacatatggagttggagcctgtacctttgtcgataagcttattctccaatcaactctgctattgcagcttttcacttgagctttcttattcgtatgtgctctacggacgaaaaataagctttgttgcctgcagatcaccttggcagctgtgctgcgcctagacttataatgcaacgtttttaactttttgtttttcttttttctttcttttttaaactagttttcacatgagctacccgttcattataaccatcagctctagctaggacag

SEQ ID NO: 4422 - DNA, 2971 bp, Emericella nidulans
cagcgcccgcattgcagttgcgagatgcaccggcgattactgcgatgacgttgtccttggaccggacagcatcagccagacgcttgagaattactacacccacgccctcaccacggcagtagccgtccgcgctgtctgagtacgtcttgcaagcgccggtagcgacaggaaacccccctggctcagtcctgcaaaccattccggcgcggtcagcagcgtaccaccgccgacaacggcggcgtcgtacttgcctgccgtcagagcgtcccgcgcaaggcacagtgctgtcgcgctggatgagcagcctgtgtcgatgctgtagaagccaccgggcccactggaaaaagtgggatagtcggccaggcgcaaaaccacggttgacaccggggagatagtgggtgtctatcccctgctggtcgttgatgctcttccagtcgtcgattgtctggccaaagtaggttgcaatgcgaggcggcgcctgctcgctgtcaccgggtgcggcgggggttggaggtgagtagcccgccatctccagggcttcgtacgtggtcatgaggagcatgcgctgcacgggatccatctgcatcgcctcgcgaggagagatgttgaagagtcggtggtcaaagtcgccggggttcttcaggaagcaaccatagcgcgccaggagcgcgttgtgctttgcgcgagtagggtcatagaagtcatcgacattgaaccggctctcggggatgacctgatgggttgtagttgccgtctccagcagccgccagaactcgtcaagagtgtcgctgttagggaagcgtccggacatgccaacgacggcaatggcgtcggctgggatgctgtcgaggtcgtttccatacggcctcggcgtaggactaagctgcccaagctccaccgcgaggccattcttctccaggagactctggattcccgacgtctcagttgaggcgccgatggcagtgaggacgatgtctgtgatattggccctatgcaggtcatgaataagggcagtgacggcctgatgaacgtcgatggggcttgttagcgacttcctccacagcaagcttccaaagctctgtggcttgttgtgacgaagaagccgcaatcatagtcgcgctgatagggggcagatgagccccatgcagcggcacctgggccagtgctgaggcagggctggtgatcgttgcatgggcgagttccggtctcttcgccagggcgtccaaggtggacggtggtccaaagacgaccgtgctttctgtcatgacctccccgatatatgcttggtttatcggtctgagtgaggcgttgatcctatccagtgcctgttccaggtctgcaatggtggtggcgctggagatcacttgcgcccatgggccattcgagtcttcgatgtcttttcccctccgctggagttctacccccagacgaaaggccaccgagacagcctccaggcccaagttgactatcccatccgctgacgtggcggctgcagctacaccagcggccaccagcccggcgccgaatcccatgggaattgcccttgcccctgcatgtccggataagatcgctggatcatcttcggcgaggctattggaatactaacgtcagaaagagacttcaggaatttccgggtcaagaagacgtacacaagcagctggccgatctggacggtggtcagaagtaccaggtcagcgacaatgctaccccgggtctgggtggtctgccgctcagcgagctccactaagtcctcaaaggaaccgatatcggcacgctcgagtccatcaagagatgctgtccagtgctgtacgacgtttgatgccgcagccaaaaggctctggagtctgcggcgtgacttagagcgcacgtttaagtcgtgcacggcatcaaaggtgacccgctcctgcgggaaaaaaagaacgtgatttggagccatggtgacttaaagagaagataattagatattgagatggggaaatatgtctatgatattatagcggcactgctgttctattgccgtgaagagtcaagctccgtgataactcaagctcaactccaaagcaggtgcaatgggatgttttatatagcctcgccttgtcaagtaatccgcctcccaaatcctttttcttctggctcacttaatcatggctggaagctgaagccgggcaatccttcagctgcgttgtagcctgcccccttaggcaagccgggcaagaggcatagccatgctcctctgggtactattcttgtccgtacgagggtccagagtgccagggtacgcagtttacgaaagaatgtttcggtagtggagtgtacgcgactctggtccgtgagtatctgttgagtatacacatctgatagagccccaatctggccgttgatgtcagcccagaagcgacatcagcgttacaacgatagtacatcgtaagaccacacttctgcaagcttatccttgggcaagtttcagtgcgatacgaaagaacaaaagacattttccgggtcagatcatcttgtgggcgaatcatcagccctatgacggcatacgcctccgctgcagcttatactctggtccagatgtgaatcatcatagatactctgctcctacagtaattcagaccgcatttcattcatttgcagcctcgatactcagcaatgtttgacgaggtactgcggtcgagcccgctgataaggactccaaaggcctactcccataaccctaccggcccaccataaccctgtcaaatcgtctcattcctaaacatggctactgagattgccgagatcaccaatcttctgacacgcgagcgctactaccgggacactgctcagtgggagctgtgccgggacgcctatcatcccgacgcgagcatgacctacattgacgtttcctggtacgcacaaccacgccagacaacagtcggctgcacgctgactacgaacaggttccagggaaatatcgacgagtttctgg

SEQ ID NO: 4423 - DNA, 3016 bp, Emericella nidulans
tctccgtaaatacgatcgctcataagttcataggaatttgcgacttgctcgccagaattctacgaacatacccaacggatattcttgatgctatatgagaaaggccttgcgtatcaggcggatgcgatggtcaactacgacccggtcgataagacggtgctggcgaacgaacaggtcgacgccaacggttgctcatggcgatccggagccaaagtcgagaagaagaagctgagacagtggtttttccgtatcactgagttcaaggaccagttgttgggggatctcgactctcttgccggtagttggcccgagcgagtgctgacccaacagcggaactggctggggaagtcgtatggcgcgaagatcaaattcccccttgccattgagggcagcgagggcagcgaggggctgcatataaatgtgtttaccacccggccggacacactttatggggcagagtacctcgcgctcgcgttggatcatcctctcgttttggaggcagccaagacggatgcggctttgcaagactttttgaatgaggcagcgatgcttccgacagattcaaaagtcgggtataagctgccgcatctcagtgttacgaatcctctgcgcgtgattgacaaggataccaaccatatcaatcgtccgctaccggtgtatgtggcgccgtacgtcctcagcgattatggcgagggcgcggtaatgggagtgcccggacatgactctagagactttttgttcttcaaagagaacgcggatcccaaatcaattcctgtcgttctgagcgcggagaaggacatcgcaaccagtaccgatgctaatagtgacatcccaatcaacgaggcacggcctttcacccacgaaggcttcctaacgacaaaatgcgggaaataccacggtctccattctcgcgaggccgggaagatgattacgaatgaccttagagcgactgaccatgccgactttgtcgagcaatggaggctgagggattggttgatcagccgccagcgttactggggcactccgattcccataatccactgcgataattgcggtccacagcctgttccttcgagcgaccttccggtaaaactgcccgagcttaagggagactggcttagggaaaaaaagggaagccccttggagtctgatcaggaatggattaccaccaagtgtccgagttgcggaagcaaagcaacgcgcgacgcagacaccatggacaccttcgttgattcttcttggtactaccttcgcttcttggattctgcaaaccaagagcggcctttctctccctctgtggctcggccggtcgatgtctacgttgggggtgtcgaacacgcaatcttgcatctgctctactctcgcttcatctacaaattcctcgtccagtcggaccttttcccagaaattgctcgcacgggagatctagccgcgccaccagagcctttcaaggttctccttacccagggcatggttcatggcaaaacgtacacggagccatctacgggccggtttctgcttccctccgaactcgacttttctaatccagagaaacctgttatcaaaaaaacaggcgaaacgcgtcgtgtatcgtttgagaagatgtcgaaaagcaaacacaatggtgttgacccaacgacgtgcgtatcaaagtatggtgccgatgcaacgcgtgcccatgtgctcttctcggcgcctgtgagcgagatcctcgagtgggacgatacgaagatcgttggtatcgaacgctggtttagccgactgtggaagcttgttgtggacgcagagcaaactctggcttcatccacgtacaaggtggaccgtgccgatttagtaaaagcatccgtcaacgctgcgagcctggaaccgttgcaaagcctgagtgataaagatgccgacgctattctcaccactcaccggaccgtttgttccgtcacgagctgtctcgagaaaaatccctatgctctcaacacggtcatctctgacttgacgaaactcaccaactctctcatatcatctacccccacttcaccatatatcctccatctcactatttcttcccttctccggctcttgggccctgtggctccggcattggcgtcggagtgctgggaaatcctccattcttccattgtcacagagcagccggaatctggacccaaagctttgacagtcttcgattgcccgtggccagccgctcccctaaccacagaacaagccgatattctagctgcgcgtggaggacaggttgtggcggtccagattaatggcaagctgcgattcaccgtcactattccaaatatgctctcaccgacaactccggaaggtgccacagcagagcaggactatatcatcagtcgaattttggaaaccgaggaaggacgtctctggttacgggaaaggaacgactgggagaagcggagaagggtgattgtagtcaagggcggaaaactggtgaacattgtcttttgaacggtatgttggtcgcttcatcgacctgtgtatattagatttgtcatgatagatagaagtaccttgcgaatcaagcccgcatattttctcattttctccggtaatggtatcgcatagttgcggcatgtataaacctccgagtttcaccctggaacgtatgattggggtaaatggctcgacctttgggctgatttggggctggatttgaactgggtgttggagaatgcggttggtggagccgaatggagtcatcccctcatgcatacaacctcctagcagatggtgaggcaaacattggagaaattaagtcggtgatagtacggctttgacggagttgactcggttgttgggacgatggtcgatacttgactctgtctcttgaatctgagcgtagtgggattgacgcaattattccccattccttgatatccgggacccctctcagcgggctccgaaacgtcattgttattgtgcgggctgcacagcatccaacgacctgtattatggtatgatagtagcaacttgcttggaagcttacttgtgt

SEQ ID NO: 4424 - DNA, 1409 bp, Emericella nidulans
catatcatgactttccgcctccggagagattagcggaggatgaaggtgttgaagctcgtttgcggacgctagggttcggatatcgcgcgaagtatatatatcagacggctgttattattgcaaaacagaaagagaacgggtggttaaactcactgcggaaccctgaagcgcctgcttttgggctggaggttgttgctgggcaggaaggggagatgccgccggaggggcggagtgggtatcgcgaggcgcatgagaaattgctagagctacaaggagttggacccaaggttgccgactgcgtggctctgatggggctggggtggggagaatctgtcccagtggacacccatggtgagtctttccattctccctttattaccaaactgactggtgtagtctggcaaattgctcaaagagactacaaattcggcaagggatctcacaagtccctgacaaaggctacgtacgatgccgtggggaatcacttccgcaagctttggggcaaagaggccggctgggctcatagcgtgttatttacggctgatttgaagacattttcggatcgattggttgctacaaccaagcaggcaaaggttgatatcgaggtgaaacaggaagaagaagggacaaagattacagcaacaacgacggaaatgaatgtggccttgaagcggactgcaggtgaaggcaagatcaagctcgagtcagacgataagcaagtggaactagtgacaggatctaccactagcacacgaaggacttcaaaacgacttcggcgatgagctgtgaagccagttatgagggaaaccaattctgcaacactcgtgcgcgagaagtgctctgtcggtcgttgagcaatctcgaaacttgcgtttcgcgcatctggaagaaaaaaaattgccatccaatatgcaaattggcgtctagccagttttcaggcgcttcagtaccctcaatgttcccggcagtggatctcttatatgatttgaaaccctcgccgtaggtaaagggactaccaatgtttcaggatttgcttctaaatagcgattcttggccatcccctcagtcgaatttcgcatagagctccatgacggatcaagaaggctataacgacttgacagccagcccagtatcgcctgcaaagggaaagagctgactgcatattccccgccattgaaatttaacttggacaatgtacgaaaacgggtcatggaagtgacacttgcagggagcgccatattgttgccaataatcccatctgaacccatctttccaggtcgttctcaaaccagatcgggtacccccaaaacataaggcggcgcgataaccgactttgcgactttttacacaatccaaataatctccagtatattgagtaccccttcagagcttgcttattcccctatata

SEQ ID NO: 4425 - DNA, 2248 bp, Emericella nidulans
cagccattcttctgctcaaggtatcatacccttgggtcccggaagtattcaaagacgggccatatcacaaagtagaccaagaccagaagcccggtgatagcagcgtaggtaagcgtaatcatcgttaccactatttgagttgtcgatatcctgcctatccttctgagtcctgagatcctgatcaagggacctctcttatagctaactctcaccttcgggcgggccaaattactctggatgaagcgggaacaatttccactctcagcttccccggcttttgatcatcggaatccagattcagtccgtgcattgtggaggattccccacgcgtttcttcagtccacttgtcaagggtcagctgcctgacccggtctgagattgcggagttgcttaccgtcttctcctaggatggaggttccttcccggcccgccctttatgcatgcatccttaaacactagagggctcgcaacctgggcaatcagattagacagctactgcatctacaatacgacaagaagcataagacaaacaatgtagatagctcgaaggaaattcgtctcatcatggtcataaataaagccggccgcaaacaagcataggcgtctagcgacagccgaaaagcggagaggcgacttcagaacgctgcacaagaaacagacccagaatacacatcctttttgcaagtcatcacgcaactttatggccagaatcccatgataaacctcaaccatgccaagaccaggcgtcccagtcatgtctaacttccatacggcgcgagtaagcgttgtagtcgagtcatcaagcctgatgctcaacaatgccagcgtgttctattagagaggaaaaaccacaatgcaccccgagaaaatactcaacccgtagcccaactcaaccaacccccgcttgctccttgcccgccacacctttttttttctttgttgatattgagctctttcgcaattaacgacgagcacttatcagactgccacccgccttcattggctgcagcccaagaggaacaccacctactggacccccaaccggggtctctgtcaaggtcttccggcgcttggtatcgaattcaccacggctgtccggtgggacaatgcggtcgtcatcatcatcacgcatccgcttgttggaccccatggagccgttcattccagtcgagtagccagagttagacgcgacggaatagttgtcagaggtgcttccattcgcgcctgacgttcctcgcgtgtcactgacaatgttgtacagactactggcagcggcggggcgaggaggggtggtgtatcccggagcccactgaggagcagtattactcgtgcgaggggtcatgcgtccagaaccattctgctggggagatcccgtcatgtctggcgtgactgggaatggtcgtgggcgagaccgccgaccgaggggttggtggtgtagtacgagccccgaccagtgttgtatccactgtcaggctgagcatactcctgctcttgctctggttcggtctttgcaacggtgccttggccgtagcgctccgtcttgacatcagattcgatctcggtgacagatccacgctgcgacgagggcggcgccatgtcacgatacgagctcgttggcatagagtggccatactgcgccatggactgttggggcagtggttgttgtggggcgtactgggggtgcgtggacggggcggccgagtagtatggtttcgaatcgtagccggactggggttggtaggactgcatgccttgcaggttgttcccaggtggcgtcgtagcaggggttgtgggcattgatcgtgcattactcaaactcgtgtcgatcgacagaggctgggtgttgggaacgctcgagttcatccctggattccaatcgtatgagttattctggctggtgattcctatcaggctcgaggcactggcaggtggcgtaggaaacgtatgtgcgcggtcaaggctaggccgaccgccgggttgagacatatgagaaggaacgggtgtctgaagagaatggtggtgtaggctgggtggttgctgtgcttgaggggtgcgaacaacaggttgggggccttcaagacgtctggaatctggcactgtcatgttcctctgattctggttcgccgggtggtacagcaggttgctgatgtgttgaacgaacaaagggtataacagatctgtgatcttttccttgttggcgaattccacgcgcggtcaaagggaacctacttgggttacgatattatgg

SEQ ID NO: 4426 - DNA, 3275 bp, Emericella nidulans
gattgagcagccaaaagggaggatagcacaaggtagatgatcagagaagattgagcaagtagtacagtcaataggagcctatgatcaagcaagcaataacagcaatagaacaagtaatatccaagataagagtaataggcagagggaataagtgacacagcaagagagaagagcaagaggaaaagaaaagagcaagtataaagggagattgtgcaatgtgtgttatggtgaatcaagcaagctatgttataatgcaatactaaagccatactatagcaatgcccatatccccagcaacagtattgtaataagcttatttactatacgactgacgagctgtgtatgcgccagcaaggatgagcaatatacaatacttctgatcatgtaaaggtggttcctgacagtgcaagagcctaatactaacatcaatgctactgtacaacaacgcgacgatagcaaagtaacaacaacatgacaacaacagagctctgactctggacaaacatgctataaaatatggacagtattgcattgctgtcagctactggctgattaaactacagaggttctgcttgttgatgatgtaatatattgtcatacttgctggcatgacatgatcgcaatgctggcaacataaagagaagattataattattaaggcatagctcggtcggcagtattatacatacatcataaatgcttgcataaactggtattggcagattcagaatattgtgcacaatgctgggggagtgccagggtgacgccggcgtgtcgtgaacaaggcatggctgagggttgtcacagttgcaacatgcagacaggaggtattggctggcagatcagcatcttatatagcttagggtataatatacaagcagacaatgccggctcagacaagctttgtacaagtattataagattaggcattgatgatcaatactaagatgccagcatcagatcaatccagtgcagatcctgccccaccaaccatcagcctgcaatataaacagctgaaatatatctattatagtagggccagttatgtagtcaggccattatacagtccagtagttgcaggctgtgggcgttgtactgctatagtaatagagatgccaaaggtaacagatacatgctatacaagaatatatatattactacccaacattgccaggttagtaaagctatccttggattattacaaatactatacactgttgtcaggagactttgacataatattagggattatattaatgcaaagggagttgcactgccatagagaggtaggtgactagttattgccagctggcaagtagttgtagtgtgattggctgcacaatgatctactctgatattgatcaggactggccatcctgtatccttctgctagccagagcactaatataataacagcaccatattatcataatagcagagcccacacagtgaatagaggctaatacaaagtagatataactactgcagtacacgcccagcctgtacagacctagtatttgacaaggtcctagctggcgcagcactgatgcagcgccctccaggaacctatccaaagccagccagaacttgtaggaaccggtaccaaggccactagagccggccaggctagtaactgatagaggccctccagaggctgctgcagcgcgctgccagcacaggccaggaaagggctgggttcagcctgttagttgccctaaatatgtatactgcccatagtacaagcaaatacctgcaaggggctatagcaaactattagcacctatacaggtccaggatcaagctagagccagtaccagcacatagaccaagaaggcatgttaccagcacagcaccagggaccaggagggccagccaattatcaaaatcaagtcagggggtgccagcaaggattcagcatcaagccagcatggagctagatatgtgccaggaacaagcttgaggaaagcctgtacagggctggtagcaagtcagcacatgcccatagccagcatggcgccagggaggagcaaggggggaggcggcaaagtcatgcccgaggcgctacgccagggcatcaggggctccgcgcctggggagagcctgcagaggtatactgacaggttattgcaatgcaagaaaagtgccagcaccagtacagagcatgtacactgccaggacatactagtaatatcacaaagccagcatactgccaggatcatgctggcaacctgccagcatagtaccagtgcagaacctaagaaggtacatgacctatacaaccccaggagagtgcaagggaaatactatggtatatagaataccagcacagtatcagggagaagctgggattagaacagaacagggtcagggccggtgcaacgccagctaccagcagaagggcagagcaccagcatcacaccagggaagtacatggggacgagccagcaagacagcgcagcgagccatgcccgcgcagtgccagcaacacgctgggggcataccaggggatttatatcagcagcacagcacccaggggagccggagaacaggaggcactggatcagagccagggctacactgggcaagagccagggaggcgccggggagatcaggatcatactagaggtggccacaccagggcagcgccgcgatcacgctggcaacaagccagccaatacatatatcccgcattgcactggggaggcgccagctgggcgccatgacagatcagcacaatactgaagaagagcagcggcaggagaaccccaggccaacgcccgggtggcaccagcaaagagcttgcataggtgcacagcccgcgtcgccccagggcagcactgggggggagccagcaaaggcacaacaccagcagtgcgctggctatgcgcccgggacaagcaggccaggagcattcccggggcgacgccggggaagcaccagccatgcaccaggactgatgagcataatgccagaggagcgccagcagaactcctggctaacgcccgggcggcgccagccaagaacctgcataggtacacagcccgcgtcgcaccagggcagcactgggggggagccagcaaaggcacaacaccagcagtgcgctggctatgcgcccgggacaagcaggccaggagcattcccggggccgcgccggggaagcaccagccatgccccaggattagggtttaatgccagaggagcgccagcaaaacatcagaggcagtggagggctggcaccgtgcctgggccgagcccatcatacaacccagtgtatg

SEQ ID NO: 4427 - DNA, 5357 bp, Emericella nidulans
  unsure (1)..(5357): unsure at all n locations
ccatatcatccagatcttcggacctattcatcaactcccttattccgccctttgattctactttgaccgctgaattcgacatccctcctattcctttgcagccgccttcacaggttgtggaccgagacgggcgaggcaatgataccggcctactatccgcgtttacgtcttacctttctagtaccgctgcggatgatcctccagaaccttcagatgaagagctcgataatacactttgcactgtagattgtgtcagcgcttgttcaatcaatgacctcctttcaaatatcaggtgagattcctaatccgcacaaaaaccgacttgggtacttacaaggctgtttggttagatctctccccttaccaacagtgacgaggatcgtagaatcattattggctcagctgcctgaagaaagtgcaccagcggtcattgttgtcaagcccgaacggccacttccatccacgagagcgagtgccagaccagacactagtcggggccaatacgaacccgggatgatgtaccttctggaattggcagccattcttacgcttcgcgaccgacaaacgattgagagtcttggtgagggacttttggcttctctacaaggtttcattcgagatgctaggaaccttcactccctggcgttatctcgggtgacgacttacctactgaacctgctacggttgagccacgtattgccccttgactcgctcaacgtatgcgcactatactgataatttctaggaccaacctttcatacgtgttcccgtcattctccatgggatttctagcttcgatcaggatactctagagagtgtcgcggtgcctattgtcaagggcctttcacgatgtgttcatgacggcagtcttttgcgaaatgagatcaccgtttcacctgacttctggtccatcctacaacgcgtgcatcagcacaaagaagccgcgcccctggtcttcagtcttcttaaggcagttattgattcaaaccctcccattgtaacagctgacaactacgagtctgccgtgagccttgcaaatgagtttatcactgcgggtagtgtaggttatattgaagaacggcatcgagacgcgattgtgcgacgttcaaagggtgtcaagcaaccaaggcaaaggtttgtcacggcatttattctcccagttttctagtattgactgacctgttacttctagcgaaaatgaggtcgtcttacgcggcgtgaccgctatcgggcttatataccatcttactagtcgggctccgattctgatcaaacagtcacatctagaggacggtgaaggtatgtgcacacccttttactaactagcatcacaatttactatcaacttttctaacatcattcagcttggtcagcatattggtcgccgatcttccattcccttacttcgcaatgtatcaacccttgtcgagacatacgacatcacgccatatcgactttacaacgatcccttctatcagtggacattgacaccgacaaagaatggacagctatctttgatcaggttcttttccccctaattctgcgattgttagtgcctgatgtcttccattcagaccctctcggaatgggcgaaacccgagttcaagcagcgactctcgtcagcaagatcttcctgcgtgatctcgatcagctccccaacgcaagtggcatgctagaactgtggctcaagattcttgatatccttgaccgaatgatgaacagcggtcagggagacagccttgtaagctcttcctctcccaatatcgacttcatattccttgctgatgttagctaacttacttgcaggaggaagccatcccggaaagcataaaaaatatcatcttggtcatggcggatcaaggccaccttgtcccaccccaccaagactctagcaaggaaaacatctggaccgaaacaaagaaacgcctagagcgatttttgccagaccttttcgaggaggtcttccccaacgtgcccgcacctaaagagaacctaccagtcacgtccccaaagtctgattctccaccacacggtatcgttccaacctctgagcataccgccgacgaaaaggagaaccaggcgcttgttcctgaaacttcaaaagctgaaggtcaagatactcctgaaagggagtgataattttggcaaatgtgctttacaccttttacttgaccttaccgttccctttccgtctcttttgggcatttatagcgcggatcagctttgcttttgattcgaaacattaggtcacactaccagatcaaggcatgtaaatatactctccgtgttcttgtaatgcttatgcgtctctgagatcatgatatataccctatcgtattcgtggcctgatggttcaaatgcttgcaagcaagtgtgaatacaattaatgacgggagtttccacaaccacagcattgtcccggacatcgaaagggatcgtgtagccacaccacgcaatcattctcagatatcctacgtcactgtcagcaagcagatagactgactacttttgtgagatctctactctaaccctagattaggttagctgcccactatgagcaaaacgccataacgacgccaggaattcaacttcggtgcgcaagagagacaggtgtgtagaagcactaacccgatgacaatgatgcattacttttccgtgaaccccgtacttggacaacctatgaacaccgtcagttgctagtagttaccggaagatagaggacgtattgaccatctgcttaaacccaggcacaatggccgtgggcccaaaatatctaaaataaggaacatgggtacggccgctggagctaccggaagtgcgatctgagaaaagaaaataatgagcaaggctagagaccgacgcaaacagtttgttaacagtttgtttctgggacatactgctttctgggctctcgcccgccgcttgttgatcattctcctttgtcgcattctcgtttgccgttcgacgcaatgagtcctcaagtggtgaacggcgttctattttcaacggttctgatctctcggaggatttatcaaaagagtcatcgcccgttgtctgtgtgtttcgtctcagagatcttagtggctgattctcggtcttcaagagtccccgcgaagcagtcgattcaactggagtggcttgcgatgctgtggtggtgggggtacaaggcgcggtgtcagattgcgctcgaacatgggaagattcgctataaccgaggcacttgtgattgtagtcaacgcatgtccggcacactgttttaacgatcatatgggtcagtctaccgtaaagcggtcgtcaaaaggcgcagggcttcttctcacctggctgctcaccggaacatcgtgtcttgcgcttgcggcatgtaaggcacctgctcaggatgtcatagtattagccagctattaatcgcaacaagcacactcaatgaacgcgactatggaaagaaggagcttacgcagcgttaactcgtcgtcgctttgtctgcggttgtccgtctgtagcaacgaagcgaatctgctttggagcggaaggatgactgccgccgttcttccgggatggaggagggctcatcgcgagcaagttgtcatccgtgatcacaacacatcgggcatttgagcgttgtcaaacaggtctaagcaatcaagcttcggcggtgatgcgcttctggtatcgcgacagaagggaccagcggtcgaaggtatacgtagcgcgggaagtgtcttgatggcagaacttgtccaggcgaaaagtccatgggcgtgacttggacgcacgcgatggtcgttgaggtggtgccggggataaggataggatggctgttattagatggaggggagtggaaggacgagccgggaccagcgccggtggcttgatgaggggagagcaaggttagacgagcacagtgacgatgcgcccggtggctgctcggtgatttctgtgtgggctttggtttgccttttgccccaaataatatatggtgtcttaagattgtggtaaatgttaaacttaggaagaaaaattcttggaggagtcaaggggagggagattggcgccgcgtaggtgctggatcggtgggattccggggaaattggcggttccatgacaccctacctacggtgccctggataccttctacacttccctggcctgattttgaagaaccagcttgcaagagtcgatcaggatttttaaatagaataccttcttgaccgctgattaacttctcatttgtttcgtttctttgtatgctgcgtactcttctatgcatacatgtggttccccacaatattgtaccagttgacagtgaattaggaggtccctgacaactacctccggcctggagagaaagttcaaactgtttttttttttttctttttttatatttgtgcgatatcgcaggtgtatcgaccgtttaaactgcaatttacgacaggaacaaaagcaaagcaagcttactgagactactctgatgcaacaacacccagctactccaccacgatcaaggaccaccatgtgaccaccagatttttgactccgctgagctcggttcctcttctacacggcccaacgaatgttcgatcgcagctggccttgcaaatgttcaacgctaatcactaggcgcttgctactggataccggcacgaagggccgattcttgcagtttgcaaagctgcaactctcagaaaacgcactcggagcaagaccgtttcattcgcaagctcccgactcacgagatcagtcgcgcaaaaaacaatagagtctggacccaggattgccaggggtcatgtgaaccgattctcagtttctccagaatctcgggccagaccctggtcacacaacttcgcactggatggagcacgaggacgaacccacttaaagttgaaagctggaccccgtcgctcgggggaagcccggagtccaagcttgaacctgaccgtctgatctacaggctgaacttntgaacttctgtttcaacttccacagtccgcgggttgtcagagttcgaaaattcggtgtgccgatccgaacgaagttgatgcgacggacgccagtcataggagttctcgggcttttgggggagttatacgaaggttgaggtggcttgagccaacaactagcctgaaaatgaacacaattacatagtctagatgctcatctaaggttcgaaattacgtggcccaagatcagatancctgtcccagcttgatgggagtacccccagcggtagcccagacgatttcccaaactcggccggtggattcccacggccttgggtggttggccggaatccaagcccccctagacggctaatcggctttagaaccttgagatccctatagtgagtcgtattatgcggc

SEQ ID NO: 4428 - DNA, 1981 bp, Emericella nidulans
  unsure (1)..(1981): unsure at all n locations
attcaaatatattttctcatcggacactgcacggtaaattacagcgctgtgggccagattgatggggaagacttctgccatgctgagtctatgattcaactcagctgagccatgtttggtgtcgcgttgacttggctcgccgcgattgttggcagcttcgtatccgaatgctactctcctagatcactgtaatcagctcgagagtcagacgcagtctgcgtgcctgtcccagtcacagtgttccgctgcaacacttctcctgtgcctccgtgccgcttcgccgagtttcttggtcttgctctctcgtaccttctcctggatgtttctacgttcaccacttgcattctcaaacgctggtaaatcacctctagatcattctgtcgaaatctagccttgaaacgcgacactcggtttctttctgttcgcgctgagctttgcgtcaataatggcgaccttcgacaacccattttatagttttcccacctcgcctttcacagaaacattctggacgagttggaacttggatgatttccccgttttaccccagaatgacgaattgaagacagatgcaagctggcagtctgccatctcgatgccggattattcttgtctgcccctcaataacttctcaagcttggtccctactggcgattcaatctatatcccacaaattccagatagccaatttgatcccccaggttgggtaccgccagccgacacttttggggctccagtgttaccagcggcttccacagcttttccatgcgcccataatttcacaaccgactgcaatccgttccaagactcgtcgcacccgccgtccggcgtatcaaccccaaccgatcgctcctctccatctgagtctagcagcagccgtccctcgcccacgccctctgccgttaccaggaccaagcctaaccgcgacataaaaggccctatccgatgctgggagcacagctgcggcggtcgggctttctcttctcttggaaactatgagcgacacctacgcgagaaaagtggacgagctaagagctttacctgcgagcagtgcggccagcgcttcacccgatcgactgcgaagaacaaacacataaagcacggccggtgccgagcgcaacaggcctgataaactaccaaccaaggacatcatcacttacactttatacccgatttcttttgcgaatgcacatatatacatatattgagctgggatttggagcgacggcaaaaatttttcttttacccttggaatgagataggagttgatacagcacgcaagcgctgtggctggcatggactggcaggatactaattggaccacaagcatctgtagggtattccacctaaataagtaaatatgtaaataatgcaacctgttgcgatattgttgctgcgatttggtacagtttaatttaaggggctcgactaaattaagcttacttcagcggtgcgaacatggttcggatagccgatgctagttccgatctcatgaacgccctaaaggtgacgctatttaaactacccttattgcaacagataattttctccagataggagaggcagagctatatagatctaaagcatataggataccagtagcattgaaggtgattacttcagacatgggcacgttcgattcgaaagtgcgctcaatgatattaagatcgtccaatttccccatagcgtgaatataaggtcgctgactgctgataacagatatcctggagaaagaaatagcacccttgatttattaggctctaacactctacgaagaatagcaagcttgctaagatgttcttgatttcaagactccacaaactgatgtactatattgaggattccaggtatggagctgtgctatgctagtacctggtcagtcacttatgcgcttttcctataacctaccgcagncgaaatcatcattttgaaagacacatgtgtgagcatcncagagataaacattaatatctaagaatagtag

SEQ ID NO: 4429 - DNA, 4675 bp, Emericella nidulans
tgtggataggttattagtaacccccccaccaaatcaagtttgttattgccaaagccccaggtaagagggtcaggtataggcgtaccgaaaaacactctcttaagggcacagagacgggttacaaaaggcagacccagcatgattttattagtaaatggaatttgaatttttagttccgatttaagaatctaaaaacggcttggggatactagaccattagccaagcgacgaaagagcgcctgcagtcagtctttgataccaacgaccaatgccgggaagagaccgaccagcttgtcaaagagaaggatgcaaggatacaggacctggaaaaacgaattgaagagatctcctctgagctttctgcgaccaacactgagctctctaaattacgtgacggacagagtgaagttgctcgacgtttagaggagcaaaaagccagtctggaagcagatattgcaaggctcacggaagaaaacgagcgtcaaattgctgcagctcaatatcaccaggaggatctgaaagctcaggcggaaattgcacagcacgcccagcaaaactacgagagcgagctagtcaaacatgctgaagccgccaagaatctccagacggttcgggccgaagccaaccagctgaagctggaagttgtcgagctgcgaactcaggctgaaacttttaagaaggatcttgctcaaaaggaggaaagctggaatgagcgcaaggaccgatacgaaagcgagcttctggagttacagaagcgccgtgatgaagtcttacatcagaacaacctgcttcattcccaaatcgagaacattactaagcagatctcagccttacaacgtgaccgagccaccattgctgagaccgagcaggataatggcgaggcggttgcgccgaacctagaaggcctgcaggaggtcatcagcttcttgcgtcgcgagaaggagattgttgatgttcagtatcacctgtccacacaagaggccaagcggctacgccagcaactcgaccacgctcagtcccagcttgatgaggcgcgtctcaaacttgaacaggagcgtcgagcccaaactgacagtgagagcgctgacttgagccacaataaacttatgaatacgctgaacgagctcaacattttccgtgaaagcagtgtcactctacgtagccagcttcagcaaaccaagactgcccttgctgagaagtctgctcgcgttgatgaattggttcagcagatagcgcccctcgagacccagatccggcaacttgaggacgccgttgagaccaaggacgaagagatgaagctcttgcagcaagacagggaccactggcaacaacggacgcagaacattctccagaaatatgaccgagtggacccagctcagatggaagaattgaagcaggaattggagaaattgaggacggaaagagacgaggccatttcggctcgtgaagcccttgagaaacaggttgaagcgttccccgagcagttgagcgcagccgagcagaggacgcaggaccttcgttccaagctcacagaacagttcaaggctcgttccagggaacttatgggtcgtgtcaacgccaagcaaaccgagttagacgccgtggtcgaggagagggaggtactgcaggaggagttgaagactaccaaagaggagttggaagcattgaagagtaagctcgccgaaaagcctgaggcgccagcggaccagggcacagtcgttgactctacgccggcatctgagttcccaattcctacgacccatgcacccgcaccgacggacgacaaacgagtcaaggcgctggaggagaaggtgcagcgtcttgaagccgatcttgccgagaaggagagtgttttggctgccaaggatgctgagcacgagaccaaggttaaagagcgggctgagagattgaaggaagttctcaataacaagatggcttaagttagggcaaaccatcgacaggagattgaacgcttgacagctactcagggtggagctcatgaaggcgctgaaggtgcccaagaaactccagggacaccgcaacctaaacagcagcctcccgcaacgccaagcaagtccgaagacggccttccagacttgacggatgcccaggctagacaactcgttgcgcgaaacgagaccatccgcacaattctccgcaacaacattaagcaacaactcgccaaggagagagagaagcaaggacaagaaactcaatctacccaggatgccatcgcagctgcagagcaaaaattcaacgatgagcgggaggcgctcaggaaagcgcacgaggagggaatggaggaaaagatcaagtctgctgttgagctgtcggataagaaatatctggctaggatcagcatgcttgattccaggtacagaaacacacaggccaaggtcgacatcgtgtcgaaggcggccactgagacgccgcaaaaacctgttgtcgaagtatgggagattgcaaaggttgctaaagctccacccgcccaagcacagacacctaagccttcgccagcgaccccggcacaagttgcctctcccgcacctcaggtggcgcaacctgcacctactccagcccaaaccggcgctgcaagtcaacaaagtgcccctgcacaacccccaacacaagcacctgcccaagcgcctgcccaagcgcctacccaggctccgacccaagctccggcccaagcttcggccccggaagctgctcctggcgcagccgcagccgctccagctcaacctcagccaagtgagcagccctcgcagacacaacaaccacagtcagaagaaggttcttcagctgctcccccccctgccactgccacaagcggtgttcccaacccatttggtcaaactcagaacaaacaacagccgcagccgcagccgcagggttccaacctacccaacaagccaccagcaggcggagtgcttcgcacgttgcagtctgggcttccagtcgcgcgaggcggacgaggcggtgctcggggcggatctcaccagcagaatccgttcggccaactcgcacaacaggcgcagtcccaggcaccccagcagcagcaacagtcccaacgcggtggcggcatcgctcgcggccgtggcggacgaggaggccagggtagaggcgcacaccagaacacccaggctcaaggacaagcacaaggacaagcacagggccaggcccaagcccaggcccaacccagtgcaggccgaggtgggctgaatgctggtgcacgccagtttgtcccccagggcaacaagcgagctagggaggatggcactgataatgcaaacgagggcggcaatgccggtgggaagaggatgcgcggtggtggtcatacacggggatcttgagtggcaagctgcattttgcattggaatgtgatttttgtctatctatgtactcttgattctagcatattcgggataaggttttatggaagatagtttcacatgatctcaagtcgatatttcttttgtcaatggagttgtggttaattactatgtcttaatgaaggggcctagaacaagtcaggtagccgaaagtaaccccataacttggagtctggtccatcccggtaactgctgaaagtgtctggagttcagcagtgttgccagtattatcgctgatgagaagatagctttaaatatgtgcgctagtgttccttctgttacttgaagttgtggtaagtttggctttgcaatgttttactgaacaagtctggattgattagggtgaaatagtctatattaggatgttggagtatagattgaacactcttttacaacggccaaatcttcagccctaatttccaaattgtgcccgtaatcaattccatgttccacaacacgtcatcgacccaccaacccatctagttcactggatatcgagatacttcagcatcaagcctactcgggcaagcctgccagctcacctcagtccagctttttgcttgaagtggaacgaaagccttatgggatcacaatatcgacgactgcggtgcgttcttgtttactagtgatgagtgcaccccagccaaaatatttatctatcccatcttctggccgacgaccatagatggctctggccctggaggcgtgcctcgtgaaatgcggcgacatcctgatagtatacatataggatggaactcatttactacatacggcgggcagaacgccttcttcagaaggctgcaatttaatccagatccatccacgggcgctgtgcttgccccgcggtatgatctggtcgacgtcaacttgcttcacgatccaattgggctatccatcctggcgatcaatgagagaggcgagctggagctgcactatgaagctatcagtatcggagagctgcgagggttcagtggcaccggtgacgagatcctctatctcggagctacccatgaagcgaataactttgacatgttcgccgtgcatgtcatcaccggcaaagttcgtcgattgacaaggcatcccgagtacaccgacccagtcgcgttctcactcgataacgaatggttcgttgtgatggataccaggggctcggatcgccagatgtggctgtctggcatgcgaggcatacccccactggtagatctagtcgcagcaagcgcagctgcgaccacgcggaataaccgtcatcgtcgctttttccggccaatcctcatagaccgtca

SEQ ID NO: 4430 - DNA, 1278 bp, Emericella nidulans
tctgtttcttgtggttttggtttgactgcaggtaatgagcgtttccatgccccgatgccctgttgctcttctggtaaaagaggatggtacaaggtttcttcgagtatcattccgcgttccatactatcagtgaaccatttgagagtaaccaccttgacattccactgcgtcgcgtacttgtatttttcccctcccgcagttcgcgcaataaggtgcgtcacctgctttgtgagatctttcctgaaatctgcaccattgagttgggccttgttgcggatgtagtttcggaggttcactacgaaggaggctggtcactataagtcggatcttgtacagctctgcttactcactgtcttcgaatcctgtgatgcagattgcggtccctgaaaacgtcggcaacctatattgctcttccagagcacgtatgtctgtgtcaccaccctgcatccaagactgccgtacggcttctatccattctggtcgaagcaccacgatgtctgatcgctcgcgcgcaacaaacttgtatttttccgtgctgatttcaccgactattaaatgagtgacgtcggaggtgaggtcataattgtggctcgcgcccatctggcttgcgatagaggctagttcagtctgtaggcgttttagattgtcagcgtctatcttcaaattgctggaatgaggtgtaaactcacccgctgctctggcacaatggacgtaaaacacagaaccgcccccgcaagagggcgctccttgtctgcagaagcgtcagtaagcctataatataagagtacaatgtaatactgactcgaggcagcctgctctgccatgcttcatgattaacggccactcggaggcttatcgtaatggagttggctcgggtcctgctggcggctgcgcgtctcgatattgtattatcgcgtgacagtcatgtatttatagtatattcaagttgccatggactgcgagacaagaacaacacctgtaaccagggcgaattggtcgagcagagaacccattttgttgttttccccacggaccagcagcagaaatggaacccttatcgcggtcacgtgcattaagtcgcagcgtgtatccttcggacgcaccatttctggacgcccagtcttcaatgtcaataaatgaagtccgattcctgttaagtctactttgtctgccctcaaactataatagccaaccctttcagtagatgttcttttccacggcatccccttggagatcagctgctgcaataccctcgttcccgaatgaagcggtcctgac

SEQ ID NO: 4431 - DNA, 3412 bp, Emericella nidulans
gatgcttcgttgaaggatcagccgagttaccatacgtgtataaaaagcgggttatgtgtatagaatttgtttccagattatctattccgattattacctaccttgtcaagcccttgtcactcctgagcttctcatctgtttgtccttcacttgtgaacattgaattatgttgcgtacagggtctgcacttttgctacccaccagaaagcagggtgaaaacaagcagtgacatccgctcccttgactgcaaggcacactgctgcattgccgacagtctaccatccaagggtagcaggacaaacaacggctgtgaggtctagccctagacctctcagcatagtgtcctctagctaaagtaggctgggtagaccttcctggactagcagccacacaaaatggagctggctgaagatgtatcgggtcctggacatttcgaaagagctcttgatgcttgagcattgctagcattaacccaattgcagcagcaagtttattggcaaatgatcacgcatgaagcaagccacatttgcattcaatcattcagaatgacagccgaaaactccactcctagtcctgcagcaatacgaagcgaaattgctgccagcatcctatggtttcttgtagaaatatcacacaagtcccttgcatgcgcaagctcgaatttcgaggctccgcgagccacggacaaaggcccagcaaagaaggatacaatgctgactgactgacaatctggccatggccaaccttggctgcccctatgctgtgccttctggtagataatgtatgccacctctgggcctagacctagcatgtctcgggatagcagggggttacgtatacatgaaacatatcattccagttctggagaaacgaggggtctacgtgggctactctgcttcccactgctggctagagttggaagcaactgactccgatgtacctcgttactccgggttaactttcgctcttcatatgactcgagcaccctcgtaagatccttacgcaagaaaaccgggacgttgtctgttcgaggcttaacgggtcgatcattgctggccaagccaatggcggtttgtagacgatgccaaaagaacagcgattgagacacggtttcttgcagagtcagaggctttttcttttattttttctctttttctctaaagaaaaaaaaaaaaaaaacagcagagatcttcgaaaaggaaggtgaagagaggatgattgtggcctaaaaagcaaaggagtctcagtgtcatttgctcgctcagacagcatgggccgcgaagccacccaaaaatagaagatgcatacgcaaaccgcctcggcgaacctccaagggcaacctcaatctttcgcctctggtcagctcagctgaccgagattgtctgacagacacggtagaatcacctacgtatccctacttgttggatttcgttgctaagaatatgctattgcagatgttcgctgatttgatgatctcgcctgagcatggccgaacttccacctgtttcggtggccgtattgcaatactgggctgccagggcccaaaccgtgcgtcagccactcagatcaaggagtccagactcatttttttgacctgagcaatgatattccaggaaggaaatctctggatcatgccagaagcgggtcccgttcgagagacatcattgatccatcgctccgctcccatggatattgccactgggaggtgagttgcggacagggctgatgatcgatcgttggctcggccgctgatgcttgttttgcacgataccccgtttactattttcgtgtcgagtctggctggagtctgcggcttgccccttcacttgcgcaatggcctgtcctgcaggaggtgaatataaaatccctctccatccccggccttaaggatggtttctccagtctttccacatacgatctgatatcacgaaaccaacaggttttgcgtcttaaatcccgtcattgaagcatcttagcatttagtcgttcgctccagagtatcaatatgcgtgcttcgctcattctcctcgccttctcggctctcgccgctgcccagctgtcttctgagcctgtggtaagttcacttccttcgagacattgccaggaatatggtctgaccagccctatagaatcaagagactactactactgagacgtccattgagactcccaccgatactgtcatcgagacccccaccgactctactattaccggtactactggtctcgagactgcaactgaaacctcgaccccgacaacatctcagcctctcattcctaccggaagcaccccggtcattggctcctccagctttgcaacatcccctagcccgaccagctctacaagcacccgatcctcttcaagtacaaccagggactctacctccacttctacggcgactgagtctgctacgtcaacctccaacaaccaagacgccgaggagacgaactcagacaacggcgcattcgcgctccccactgctaaccctctgctcggcgttggtttagctggagctgctctggccgctttcatctaaaatggcgacaaattgcccagctacgccaagtcaaagccagctgaagatattctcctgaatcggtgttagctggcttcatgtaatgaggaatatggatatggacatggtttcgaatttgctgtgctctcactccacggagtgccatgtattaatgtttgggatcctttctcttcgatattattgaatttgccggagatactacgataacggcgcatatagatttttaataataccagttatatttcaaccacctgaatggcccaggcgtagtacgtcaatgttcgtaaagtcaatataaaccataccacagcgttatcctgctaaatatggagggactaagccttattgggattcaagctgagcataccaacggatcaatcacatttcctaaaacgcgtcgcgcgagagtcacgttaaaacgcgcacgaagctcacgcgctagcaatgctcggtgctatccaacgcccaaaacaacctgctggtcggactgagcaacgcccgaagcgttcggattcaaacctcctcagtcgacaacggtcgcattcagaatccggtcccgtcatcttggtacccgaaatatctattggattgatctgatactggtgaccattttttggcgcagatcggatttgtacaggtggacagagcttatcagagccgccctcgttattgctataccatcattggccgagtcacgtttgttttttgaagaggtaaatacattcggggataaatataatgtaaagttggttattttgtgtacttaccaatcctactatttctaaaagatcgatctgtacgctgcaaacacttcaaaatgtgagacttccccaatattctttctccgagatccaaccgcaaataccagttacact

SEQ ID NO: 4432 - DNA, 1447 bp, Emericella nidulans
aggcgcgggtgtcttccgtttcatagcacactgacggcgcactagcagaccaaagcctgcaaacagcatcacccccatagccactccgagtcctaggccaatttctccatccttgttcaagctattgtcatcgcgtacgacgcgctggggctggggctcggagtgtattgaccacactcgtaggtcgattcaagcgtgagtcttgtgtttggttcaagactagggagatgaacactatggatagtcagatcatgtaagtgtcgattagacttcattgctaggagaaatagggaatgcccagacctttttatcttccctctctgggtaatcgaggaggcgctcacgaggggtaaagacacacgtaacgggcgtaaggcatcaatatgaacggacccttccgcgtattgcaaagcagttactgacagacttcgagcggatgagggtataagcggagatcagagggtgcaaaacaaacttttttatctctccgtggatgggcaattgcagctcgtatgaactacacattccagtcatgtgtagcctggtgcccgagtcactggaattagggcgcgtgtgcaaatctggttatggctcatccggagtcattggcggtccagcagagaccaatcgaggcagtgatatgctgcctgggttagctcgtgtattccccagatcaacaagggaaaccgaacgtggatattactccggctagcttgatgaaacccacaggttcgaggctggaaacaaaattgctacagggtcgggggtcgttggattaagattgccggttttacatccttcgcaatttatcacgatcaaatcattatcaaccctttgaaggcggcggaagcccagccttccgaagtctccgtccagataaattgacttgacatcctccaataccggaaagtcaatgttaacatattgctcaaggcgttcgatacggatctgaccggcaacatgctgcagcttagggaaggagagattggctatggacccgatactgttaaggtccaagccaccgagatgcacgagctgtggggcctctatcgaggtcatcaacggcgatgaaagagctaatgggaccagtgccgtggagtggatggcgcctgtgatattgaccacatcagggagaaccagtcgaccactgccccgccaatactgagtttgtctgctataactgttgtgcatccagctagggcttcatagaattcttccgagctgtctaggaactggtcttcgaggacgcatccccgggccagcgttcctggaggtgtaacccgttagtatatgctataagcgattttttcttagggcctacggaggaacaagcctgtcagagtcattggcacccagggccggatatgacaagagcgcattgtactgtgacttgcatcgggtgtgtctcgaagtccaatcgcggagtagggctagggggctgtatata

SEQ ID NO: 4433 - DNA, 2845 bp, Emericella nidulans
tgagaagtatccctttggtgaaggcctcatcatcagctccgaggctctccggattgcaagcgaaatctttgacccagctgaagttgatgatgcatatgacacgtttcaccgcgaattcgcagagttcaagaaaactgctgtatagagtgtcgtggtttttgttacatttgcttaggagcctgcgcttttcatctacgtgttagaatttgtcttgcctgttgacggcatgtctggagctttcatggctgggaggaaacgaggttattctgcgatactttttatctggtcggcagtgggctgttctttattgcagcgtcccccgagttggcggcacatgaattggcgttacacatgttcatgtatactttgttgctggagtacggaatgggttgattctttctgtttcttcgtcatgtcttgcgcattgtttctcagccatgttttcagttctttatcgttgtattgtttgacagtggcctatgtttctattccacgtcatatgattatgatatcaagttttgttactgcgtgtttatcatggcatgccaatatcagaattggattgatgatagaatatcaaatctggcttcttcgaacttgcattcaggcgtaacgaaaaccccatgaccagtcccatacggcaggcttgctgctggaagtgagtgagctcgacaaagagaactgtttgccttgaaccttgtgggattgtgggatatgtacgggtgagggcgtgcgagacggagtgtcttgtcttagccagccaacaaagaataagacggccgccgtttccattcaacagttggtgattctgcagctcttctagaaagcctgctctcacattttttttatcattaatgacatctgctcccttccaattacgtctaataatcgacattctctcctcgaaaacctaccaaccttcctctatcactcactatcttccaccggtacagcagaagaagacgtcgctgaagccaacccaaaccctgcaagagaaaaaataaagcgaagaaaaaaggggaaacaagatatgtgtttttaccagccgaaccctcccggctgcagctgcgccttccaccaactcattcagccctgtccaagtgcgacaacatacccgcctcccgagccgaccaagaacccgaacccgcttgtgaaggtctgtggtatgagggagtttgcaaagggcgtgggcatgaggatttgcctgggctgtcagtcggggtacgcgggtaatctgggtgcaggagttggagttggaatgggaggaagactgggaaataacgtgactctgggaatggggtatacggggttcaacagtccgggatggattgcaggacagcaaaatgagcagaaaactggtggggctctcaagaaggacaaagctaggtttatggagttggcgatggagaggaaggtggctactgcgactgcgcctacagctatgcctagttcagagactggaactgtctttgccgctggtcccggcactggccccgaaattggaactgcatacggttctagcttgatggttcgacggagagagcccaaaccggattcgagacggatggtaccatacccaaatctagtctcgaaagcgcagacggccgtttcatcgcctatgccggagtctgcgaaggaagctgcgaaggagatacctacgccgacgccatccccgatgccgaatgatctgggaaatagcaaggacaacggcgagagtcagggacagggacaggttcaggaacgtagccaggttaagggtgaactggaaaaggctcccgagtcgcaatcgcgtttgttgcaagatgaccctgttcccagagcgacggttgagagccttgctcctagtgttgggcgcagacctaccactgccactgccaggaagactggcgctgaaatccgtgatggaaaagataatacggttgcagagaaaaatacagaggacgtatccgacctccctctgattgaagaggcacatatcatggggattgacgatgagagtcaagtgggaatgaatggtaggcatggaagtatggatgagagtgtcgagcgcttagctatggcgttggcataagatgaggacttcgtttttacgtcgatattgcatagcaggtaggggggcattgcttcgagatgtttgcacatttgcttaagtagacgcgaaaatagaactacatattgctataagcttattgcctagatcgcgatatgacctaattgggacatcacaccgatacaataagttagacccatagttcaggatcatctctcaacctctccatcgcctctgtcgcaattgaaaccgcaacatctactccatcatcacaccaatgcatctttccctctttgtctttcaggcccggccgaccttccatcaaacacaacagcccatccaaaactggcatataaggctcaacgaatctcggcgtccctctcgatcccccaaaatcaacctcatagaggctcagatgtgcccaggatgtaaaaattacatgtctgtaccctagatacgcctcccagagccgctgaggcgcgacctcaaagcaaagatcgtgcagtcttgctttgagattgtcgggggtgtatagagatatattattgtgtattttggttgcgatgtcatgtctctgcgatgtggaagagctggcgttagcagcgtctttccctggcatctggactgaggtcaggaggatcggagatcctatgaattcagacgggagaccgagacgtttccgtaaaccgaaggtatagtgtaaggagacgtttcgctcatcataacctaacccgcgcgctcggttgatagcactccagacgtgcgcaacaatagcatcgtgccggctaataccaa

SEQ ID NO: 4434 - DNA, 4478 bp, Emericella nidulans
gggatggccgcaacaacacttcacagcctttttccaggtcgttcttctttcatcatctccttcgtcctagagcttttttcgtcggattacaagtctaatatctctcaagacctgtcaatactcgatctgatatcctgctaccatgcgcaccaccagcttctccctcttcggcctcaacctcgtcctgttgatttcctccacagtcgccaaaacgacaacggtacgactaccggcatgatctatcacatttatcacattctgtggtctttccatcgactcctgctaatgccagtcatatggtgacaggtcggtgtggaaacagagacagagagccgcggtgtttcggtcccgatggatgactgcttcgatatcgatgtcgagtaagtcacattttacatgtcttcctgccctggcgtccaccattcgagacgagtagagcgaccagcgaactaacatatccatccagggatgtcacaactttagcaatcacgaagaaatgtcgcgttttcacgtcagtcaaccaatcctggctctgttttaccttcattcatagtcaacacgtgctaatgagatatcgaacatacagaggcccaatgtgcactggacgtacgaccctcctcgaacctggtgaacattcatccccagaaccggtcatgctaggaagcattctctgcgaagagccggaagtcttttcaaccgagctgtgatgctgtctagctcttacctgcaagtctactctaaggggttatagtcacaactgctggaatgggtctgtctcggtgcctacccaattactgagcaattgatggcacttacattaagtgtcagttcggtgtcatgcagtatccctgctacgcaggtcgaacgggtatttgcataaatgtgtgctgtatatgctgtaagggattcataagagagttaatattgctggttagaagtatgttagaagtattgatccttttattctcctgcctatcgactgatcggccctgcgcattccctcctggtcccaaacattagccttcccagtcccttttagtatctagcagccggcagggttagttagtcatgcaagacgaagatcgactcgcctgcttgaggggtctagatgtgagttaacggtatagccctcagccgccatctgtggtatcggagcactgcggtctggggtacctattcaccgtaagcaaggcgttggactccattgatcgatcgaccccgtatttgccgttttagagtattcgttcaatattcgcctgtactctttcttagcggtcatgattccagaatcatgcgggttcttgtctggtctatataagccagagctggaactctgcctttatttctgtctcgcccaggatcaactctcttgtcgtgtaaatcgaggacatcccaggaatgcatctcctctcttcgctcgccgccctggcggctgctatcacagtggccttcgcggatgttcagcagtgtaatgcagagaatgcctctgttcgcaaagaatggtctgcccctactctaccgtttttctctaagtcggaatgtttctgacagctacaggggctctctcacccccgacgaacagctgggctatatcgacgccgtctggtgtctgcgcaccttccttctcgcctccctaacgagcagtaccccggtgtccaagaccgcgtggatgactttgttgcgtgagatccgcccttgcccttcattggaaccacatgctaacacatccagaacgcacatcaatctcactatggtcatccatcgcaatgctccctttctcccctggcaccgccagtacattcacctctgggaaacagctcttcgtgaggaatgcggctacaatggaactgtcccgtacgtcctatgcgtcctacttaagccccaccccgtcgataatcctataatcagatactaacgatgatggccagctactggaactggaccaagaaccccgatctctacacaaatcccgtcttcgataccacgcaatcccccgaaacttccctctccctctctggcgacggtgcctacgtcgcacccagccctacagacccagatccagacccaggcctcgacttcgcgcctggccgcggcggtgggtgcgttctcgacggtcccttcaaggactggccggtacgcatgggtccgttctcgcgtgcgcaggcatacccgtacgcaccagttccagaaaacgccttcgcgcataacccgcggtgtctgcagcgcaacttggatgtcgcgcggatacagtactacaacaacccctctgttctagagtccttgctcgtgcgcccagtatcgccgttttccaggatatactggatcgcacgatccctgggacttggcaacaggcgattggcgcgcatgggggtgggcatatctctgtgggaccgacgttggctgatgtttttgcctcgccgcaggatccagtcttcatgttgcatcatgggtttattgacctgctttgggatgcgtggcagagatctgggtctgatactggggagggaactgatagaatgagggcgttgaatggtacaacaatgtatacaaatcctcccggggccgaggaggcgacgctagataccgtgatggagtttggggttttggggagcccgaagaagataggtgaggtcatggatattcggggaggcgagtattgttaccggtatgagtagcggggctgttctgttcctcttacgccggcggcacagatagaatgtgtatacagatgatatgtcgtgaatactgataataatgtctaataatcaatgcatcaggctgttccaatctaaggctcaacactcccagaccccctcggcgccccgttcttccacctctgcaaactaagttcgtatgctccactcgccttccaggcactcagaatcagattcacaatatgatccaccccctgatccttcttgacaactgcaaacaccgtcggaccgccctcccgcatctttgctgcatcccgctccattaccgagatatcggcgccgaccgcctccgcaagatcaatcttgttaaccaccagcaaatctgaccctgtaatgcccggtccgcctttgcgcgggactttgtcgccgccggcaacgtcaatcacgtagatgatgaagtcggcgagttcgcgcgagtagttggcggccaggttatcgccgccggactcaataaggagaaggtctgtctggaattggcggtgcaagttctggagggcgaggaggttggcactgatgtcttcacgaacggcggcgtgcgggcatccgcctgtttcgatggcgcggatccggtccggtgagagagctttattgcgcgtgaggaattcggcgtcttcgctgttttacaaaatttcctatgtcagaacgggcttgtgaagtaggcgggactaatgctggggagcacgacggaccgagtgaagatgtcgttagtgacggctgcgatgttgtactcatctcgaagggctcggcagagtgcgagcatgagagctgttttgcctgatccgacgggtctgtccaagttagtcaggtacaaattaagccttgaaaaataaggctgtggtgtttaccctccaatgccaatggtaaaggcccggtcactccagtcgcggtcctcaatcagcggttgttcgcggttgaggtaggagcccgggccatcgaggatctcgtgggagtggccatggtcggctatattgtcatgagagtgcgagtgagagtgggagtgtgccatgatctctttttctctttatcctggggcggtgtttggttgagaggtgtggtgtggtcactggcagtgaggggtttgttgtctgtcccttagcttctgccccgctccagcttccattgacactgacaggaactgtctccatcggagccttccgttgcgccaacttccatcccagatcctttcagcttcccatcatcattaagggtcagaggattctttcatcctatacaataaccatgcttgcaaagtcgacgttgccataaactcagaccaaagcccgtgcagacgttaagtgagcaacaaatggtttttcagcccccatccaacctcggggtgtctccccgaccgaggctaaaacggactttatccagtcctcgcacgagcaaaaagctcggcatctaagccaaatgcaatccctttatgccgctgtggcggcatcgcggtctcagaccttaccgttggcggtgcttggttggccagctgatggattttgggcaggtagccaaccccacggggaagctgaagctgccgtatccatcaaggaggaatgccggtatcctgagatcaggcatgtcctcgacggggattttacccgtttgtgcattcgattcgatgctggttaaacattgttgcgccaatgcagtgcgcattcctaggcatttttggagattaaccatgtcggtccctacagctcctcgaatatataacccagggatctgccaggcactcccagctggggcgtggcgacctttagttctcat

SEQ ID NO: 4435 - DNA, 2720 bp, Emericella nidulans
aggcgccgttattatgctacatctaactctctcggtcttgtacgcatattcactcacccagctagactgccaggatgaccaggacgagggcggagatagtcccgtcattactgaaatagcgctccatcgggtcgtggccgtgttctctggttgcatctggggtattatcatcacgcggctgatatggcccattagtgcacggaagagattgaaggacgggctcgcgctgttatggcttcggttgagcttaatctggaaatctgggccgctctctgcaactcacagttccaagcagcaaactgaattcatgactgcaagggataagcttgaggttgagcgattcctagcccacctcgagtctctccaggtgtctgcacgatccgagtttcagcttaagcaagcttttccggacgctgtgtatactaatcttcttgcgcacacacgaaacatggttaatgcttttgtggctatgaaccttgagctggccaagaacatgactgcttcgcaaggcgagctagccattcttgattataccgtctctgagagacgacatttgtcatctcgcattagccatctgctgtcttgtgagtcgtgcgaactttcgtaagctctttaactaactcttgttttagtcatggcgtcgtccatgaaaatggaatatcccttagtcgataacctgcccaacgttgagcatgcaagagaccgacttctcgcccgtcttttccactaccgtaagaattgggaaatatccaagtcttcgacagatgaagattattcactgctctatgcatacggtatgtcttgttcaacggttatgcacctatagcaggcctaatatttgagacagtgctggtgactggacaattgtcgaaggaaattgagagaatatcagaagagattggacgactttttggggtcctcgatgagagcgcagtaaaactttatgcctagagtgaaaaagaataatcgttgactgaaactgtaccgcgtagactttatcgtaattcgcctggagtaagtttggcggggagagatcatgaatgcacccccagacgttctccttcaacccatctaacctcgtctatctctcttcggcgttttccatcgcgattcaatctatttctcagcctttccatcgtctagtgcatattttctggctttccacacgttttggaatgtctttttcttcatgaagctctaatcgtctgccttctcggcttcgcgcagcccgtcgcgtccccgtgagcctcacatctccgaccatgcagcagatcgacctagcggccttgaatcgagcagcagaagactctgcgtccgctgtccctccatcgagaaacgcggcacctacgcagaaatctaaagcgttgatatctgtgtcgcggttggacttggggcctccctatcttgaactcaaaagccgaatcggcgccaactgggctgagtacaaggaggccatcacgctctttttactaggtatgtggctaacacaatataattctttctgcaatagtatgtacagcacaattcactaagtggtgtttctcttattgtagggcaattgaatcaagatgaactctcatcacggatcgatcctataatatgctccactccaaaaaccgaacatctacacaataattccatatgcgcgatcattgccaatctcaccagagatctccctgatcatggagttgctagttgggtatcggcgaacgacaagccgtctgtcgtgtcgaagcccacctccggggatgctgctgaacagcgactcaagacggaggtaatgcaattaccaccaagagatcgccggcggattaaagcgattccagaggtatgctacaatcatttcttagctgtgaaatctcgaatgaatcagggaagactgaccataagtgtttgcaccagcgcgacccccacgatgcagtacgcaacgaattggaggagtaccatttggccaaacagataaaactgccaagtcaggttccagcaagcgcgggtggtctaaacatgacaagtaagtagaatcatgtacggcttgactttcggccgaggcttaccaatatgggtgttttagactgggagttagaagtccgaaaacggtatgtgcagccgctcgcctcggagaccggtgaatttccggacgctgaatcgatacacgcccgaatgacacctatttgctacgaagagtcggtcgttaatggtgcgggtgtcgcatgcgccgagttcatggcaatagctaccgaaacgttcgtcaaggaggtactttcagtagtgttttcccgaacacgatgcaatggtccttctggtaccatcaacggcatgatgaaacgatcatataagcaacaactcgagcgtgaagagcttgccttcacgcgcggtgaaatcgccaaagacggcgcaactggcttgcttcccgtggaggccaaggaagccaggactcgcagcgcccttggggttcgggacctccgtttatcgctagagctcggaagcggagtcctgagccatatgccattactggtagaccaaattatgggaggctatttcgaagacgagttagaagccgacagacgaggacgtactgatacaaatggcacagaacccacggacatggatgaaatggacgtggatgaagcagtctggggctgggagggagccacgacaggcgatcaccaacaattgggcactctactggacgaatgttggcgaggcctgatatatcttcg

SEQ ID NO: 4436 - DNA, 2018 bp, Emericella nidulans
acttcagctacaaccctccgccaacgcaacaacccgcccaacaagcagactttccccctccaccttcagtgagtcctcctgcaagtgagaagacctacgtcattcagaatgctcaagcgtatgcggcaaactccggactcagtcaaacttcgtcggctgcggcgaatgagaaagcacatgctgcaaattcgatacaccctcaatcaccgccgccacaagcattacaacgtgcctctcagtctttcagcggtggatcgtttgttggagctatgtcgaccgctgcggacgacgtgggaacctttaacggagggagttatcgaattagccaccgcgataccaattcgattctgactctccagcttgctgttgggtgtccactccaggtgaaaccaggtcagtccattacttcattcagtacgtctgtactgggccagggtcacttataagaatttaggtgtcatgattggcatgtctcctacgataacactaaggggtaatctttctttcactttcgttaagctcattgcgggaggcgaaatggccatgtctacctatactgggcctggcaaaaatctaattgccccaaccctgctaggtgatatcaccgtcatccgacttacagaagggcaagaatggatagtcggtagagacgcttttcttgcagcaacaagcgccgtcaagcacgaacacaaaacgcagggtcttgccaaaactctcttctctggagaaggactttgggtgtacagattttacaagacgggcttgctctggatacaaagctttggggcaataatcaaaaaagacgtaagtactccttgccttcccttacatccttggcttggatacatcatgctaaaatctcggtacacccagctcgctgatggagagtcatatttcgtgaacaatggccaccttgtagcttggaactgcaagtacaaacttgaacgcgtggcctccggcggtatcatctccaacttcagcgcagccgagggtttagcatgtaggtttacaggacctggcacggtgtatatgcaaactcgcaatgtggcaggctttgccatgcaaattggtgcggcgaagctacactaaagatacccatggatcgtggtgttcctctatatataaacaacctaccacttcgtatcgtgtagcgttaccttttgatttccttgtaccttatgcgtgatgtcaatgtatccttgggaatatccagtcgcttacaccaaaatcctaaatctggcgggagaagaacctagctaacccagaaagctggaaaataacaactgttgttgcctgaaccatcatatcattcaatatccttctaaatcatgacatgctaagaatatcgtcatcatcgcttatgacccgtttttcgcaggcgcgggcgttgcgcgcctgctgctgcctccacggccccatttcatttcatggacaacccatccctgacatcaatcactcaaaagaaatcaagagacaacaagtgtttttaatggaagagaaggcagaaagatgagaaagaggcaaaatgagaacaaaatacttccattctccagacatagaaagaaagacgagacaaagaaaatgaagcaatatttcctctatctccagacgatatcctagcacccacaacagaaaccacgcaataacccagagactaaatttaaccctgtctctttctgcgaccgacttgtccacggaaaccagtcttgatcgcggcgacggaacgacgagatccgcaagagttacaagtgacgaagtaaagacggttctcacccttgttaagctctgtgtcgggactgcggcaagttttgcaagtgacgtattcgactgtttcggttagatggcagctcaacctagaggagataaaagagataggttagaaaggagacataccgatatatcgtctaaggacgttctcaatctgcttctgctggaaacgacccttgataaccagacgcctgcttccgtccacactaccacttgttcccaattccgcaaacaagaactgcataacgtgg

SEQ ID NO: 4437 - DNA, 1924 bp, Emericella nidulans
tgctgcattctcatatttcgttttattggcaccgaagaagctgaaggcccccggagggactttgaagcgctttatcggcctaaggtgggaggttagggatcgctgttgatagcggggcggcaaatgaatgaacagcgtactttctgaagaagggcacgggggtctgcggtcatgttgttgggagtaggagtaacgtgtatgaagacttgaataaatggatgtaaggtcaaatctagatagacacgctggctatagcgaaggttgttcgaattggggagctgttcgcatcatcgtcactgccaagaactctgatcctctgccggggcggtgtcccttgaactttcaatccgctgtccatttcttgttgcttgacttttttttttttccaccatttgaggccacattttaaacaacaaggagaaacgaatatcacagtcccttggcatcctattatgcttgccacaatgttccatcgcgcaactcctcgctcactttccctaattcccggcctacggattgtccgcactagaccgcgatgttactcttctaactcgaacgatactgatatcccgtcgatcctagcaaagccaacatggtctgtccgctcattgcttcccgatcacgccgcgaaaccgtccccctctgtcacccccgcggagctcaaacatttacttcgcctatcggctctgcctcagccatcgagcccagaggaggaagaacagatactcgaaactctcgagtcccaaattcacttcgtaaaagagattcagaaagtagacaccacgggagttgagcctctgcaggctattcgggatgagagccctgaggcaatgagagagaatacaattggattggagcagctcagggaggctatgtcgaaggaacgagtgatcggccgcaacaagagaatccaacgcattgaatcagctagaaatgaaaggcccgatggggatgtctgggatggaaatgcgcttggctatgcatccaagacaaagggaaatttttttgttgttgacactgcaaattcctgagctattgcttggctccagattccccttgcaccgcggattcattttcgctcgagactccggttcctcaatcatcaattgttgcctattttgagcctccgctcgttgcgtcactggcctagtttggctgactcatcaccctcacatggacccatcaactcgacaatttgcttctttctccattcaatcgcccgtatagggcagcagttgttcacccaccattgataggatctggtgtaactgtacactcaatgtggaaaaaattcaaggactttgggtcggacgctaaggggcagctgagggacaaggcggattcaaaaaatgaccaagacctgacaaccattctcagtcggccccagcgcgcagaccttacagttctcatcgctgagatcacacagcatatgaggaagtctctcgacaagactttcaaggcaccagatgcacagcagttcgcaaccaaacacctaattgacctgaacgatgagaatgatgcttcaaccccggatacgcagaaaccaaaagacctaaatgataaagcgcgcatagaatatgtgcctaccgctgaagacacaaaagctgaggccaatatcttgactcaatttgacgattgggcagactcagtacttctccgagttggcgaggttgtaaatcgggcctctgaggagcagaacgaaaacgaagaagcagggttcgatttacagtatgaacgaccccgaagctcatatgatgatgaggacgataacacctggagtcgactttctgaggtttatcatccaattgagacggcgttaatccatcttccgaagcccaagaggttactgatcctgcattctctgctgcttttgatgctgagtctggaacattaccatgcctactctcgagttctcatgttatat

SEQ ID NO: 4438 - DNA, 3666 bp, Emericella nidulans
  unsure (1)..(3666): unsure at all n locations
cggacttggagtcgcgctttcagcttcggtggtattacaggtagtcacgctgaagcgacttgtaggttcgttatgctcattatcagcgagggtcaagtcagtcaggctagcgctcaggtcggggcttgatacaagatccacgcgtggcggggtagtgctgctgacgctgacggcgctagcgttcctgctctcgggtacgtcatgtccataaggccttgtccaaggttgctgcctatggttttgtttgcctgcggtgattatcgtggtaaatgtcccagtacttcccactataggagatggagtgttttctcttagccggtcgctactcctggacaggtgcaagcgggatgatgatcggttccttggtttctcctggatcggatagacaatgggtgagcgaccgctttgccctctccatggctctcgatcggcaaatggagtcgcttcattggcgtagaatcgattacgggactcggatactttcttcctcgaatgaaaatgctccttgccccaatcgataagctttgaactgttagatcgctggcgggtagcagatacatgtgtttcaaaagatataatgccggggttgacctgtccgattctccccagaccactcgtcggttctccagaaaaattgtcccattgtgttgcctttgccctggacgggttaggcgattggtcgagtttcgagtcagcacgctttcgaaatacagggatatggcttgaaaattttgctgctgatccgtcaacgccagttgcttgtatcgaaccattttctataggggagactcgagcgctgtcttggctgcggggagcaccgataggagagtcaggcggagagatgtcgacactcctccttctgccggcgtagctatcgtcaagctgcggcggagactggtatgtgtcactgatcgagcgttgacgatgatggtcgtagacaacagtatcccgcgaatagattgaagacgccacccgttggctgggctccggctggtacgtggtgaattgcgaactgaagggaccactggaatggctattagcggcatgcgaggacggtaaataggggcaccgtacggtgataatggcaaagtcggcaatgcttttgcagagatgtctcggttgtgattgacggtagatagctgtgctcgaatatcagtcggcgcaggagtgtcgccggcgccggacgtcttgcgagttctaagggatgcttttgcccacatattggcctgtcctgagattgagagattaacgactgctgactatgctccgtaccacggtctcacgataaaatggactcactttggtttcgtcaagacaaccagcgaatatagagagaaatatgaaagtagaaaatcctgttcaatggacgcttggaaagggatttgcgaggtatgcagctcaagcgaacgacatgcccgcacgtcgtttacaagggattggaagttggctcgaggcgggctctcgggcaacggttcaaaacaaagaactatagtaaagaggggaaaggccgacgtcnnaaggaatgaaacactaaggaggggagtaaaaatcacagattgaaagagaatggcacatataataaagatgggcgcagccacaggcttggtgatgaaggagagaatgggaaagaaatttgtttgcgtgggaagtgaaaagaaatgaaggcccaggccaacacatctgggagatcaaacgaggatcgactcgggatatgcccactgttcacaagcacgagatggaagaccccggccttgtttcgggctagcagttctgggttagcaggcccttgttggatattgtggccccatccatctgaaacttgcttgttataaataggtggtctactattaattgtctccattcgcgcatctgatcgtcgttgttactctgaatatacggtaatcaggggcttgtggtctaagcgcagcagttgcatttgtcaagataggatcattaagttgcagccaatacatgctctaggctcagggagttgcaactcactggcgaactgattatcgccaaacattgcgcactggaatgccagccccttctcgccgttcctgccgttctcgccgtatgaggtgtccacatacatacattacaaacaccgctacaaaccaattcatctcgaactgtgtgtctacaaaggacgactgatcttgttcaaacactctattgctggaaaaaaaaaatcccataacctactcttataatactcgcggtatgtgactgatatgatcgtgggggtactcgacacagtgcccctaatgcctacactgcttgactccttgtattactagaacgagcgctatgcaaacactagtattgtgtatcaagaactacctaggctgtatggcacccatacacgacatcaggtataggcctgatcacagacactagaatatatatatgccattatgtcaaacctgtacttggaggatatgttcttgtcgtatgggatggctttatcctgctcccttcaactcgggcctcttccgcctggaatatatattccaaggtggcgatactttctcaggctcaactgtattgtataaactgtattgtatttcaccaatgcgtcgaagcttcgttcagaacctcgctcagagtcttgtattctgtatagcatgttgctatggcatccatggcacgggactgggacaagctgaagtccaagagatcgaatacgaactgaaatcagatgggattgttctagatgagtagctgtgttagacaaagatgagttcgtgctctaagtttgagtgctttaagccgcatgcgggacgctgcctggtgcagcaagacggacaataagatgcccccctaagcaggcctatctatccagacgtctagccattctcccgctatctcccgtacttttcacttgaaaaatacgtctctcctacccaacaaccatcgaagtcgacctcctccctcgaaatgagacctacaataacatgaccggattccctatcgttttcgcgctccagaacgccgacgccgcaggcacattcggccgggacatcgactggcaacccacatggttgggggaagcgaagacgagaagtttctcgactactatacttgcccgcaattagtcgacgcctcggcctcaacgacttttggatatctcgccggcgaatatccagcaatccgggaaggatataccagggaaagaactactacatacgccccggcatataccgtgtagcttggagatacctgatatgacatgctctgagacggaaagcaccacgtggattgacagaagtacaataattgcacgcgctagcagcagcgcgactacaccgtcgttgccgatgggagtgggctcggctttgataccccgtcataagtgcccgctgtattccggcagtggacggaggggagtgaacgtccactgactatcgggtccggatttaagcatatgaagacccggatacctgtgagacacaactcagccagggacagctctcttatctgaaaaacttgtttgacggacataatgcatcagaggtgagtctagccttgagaagtgggacgtgttgggtgaatctgttgcggcggttcttgcgccagaaatggcatatatgttgcccgccgccctgggaatagctgcgaaagctgatatttgacaagtcaggtcagctaagactcgtttaacca

SEQ ID NO: 4439 - DNA, 2868 bp, Emericella nidulans
aaaacgaaaggtacgcaaggaaattctcgctggtcggaggagagaagaggaggtttgaggtcgcatggtacaacgattagttgaaggcttgcggtagtcatttgcataagagattgcggaattgacgaaccattagataggactcgagctcgtatctaagctgtcctgcagcttgctgacagataaatggtgtaccaggggctatcgccgtgaagttgttgacattccagttcaagagagccctgatattcaaggctcttatagagccctgatattcaaggctcttatagagccctgatattcaaggctcttatagagccctgaagccccagccccagccccggcaagatgccgaagatcaggcggtttaccctttcagttgccctcgcccgttacatcacaccgcaaatccaccaaggcaagccagtgaaaagcatggtattatccatctgaagtggataaggacgtggccgcgggtatagggatctctggaattcgctcggtcatgagataagccccgataggcgtcagtatgatgtaggtggatgctgttcgcattgtcaaggccacccatcgtgaggggttccacctcatcaacaacattatggacaagaggattcattcacaaacaatgtggacagacaacaaattccgtatagataggttggcgggctgacgaaggacgaaggaatgtgcgggattcaagacaagggcggacctggtgccagcgaacacctcattggcacagagaggcgtttagcttgcaggaaccaggagattcgcagcccgcgcatattgttaccgaaatgaggtctgttagtcgagtccttgcagtgctccggcatagctagagagagctctaagtccagtcatgtttagggaaatcatgtcaagttttgtagtcacctgagcatgtgaggcttggccagaacagtttgagtgtgtgatacccctgcatttctttcatttatctcgtgaacatttgccagcaatgcgcagtcagttgtggccaaatcctataggtgctcacctacagataggggcttggaaggaaagataacttccaactgtccccaaaaaaatatggcttgttgaaccgatcgtggttttgctggcctaaggcttccgatctggacctaagacgtaataggtttagctcaagataataagctagtcttctttaggtagttatgggcctcgaccgaggaggtgggactatctatccccttccagctttcttcctcgttaaaggtccatggttagttatcaagtttccagcatctttgcccataatcaaccagaatctatcatattctcgtatggaagcctcatgtcggccatacaatgttcagtctagcagcggttgcaatcggtgtctcgtcaatgggcagatggctggccaagccggctaggcccgctttggactacaagtgtcaaacgctggccatccccgaggcaacgttggatctacaaacagtggctcccgcagtatagcgttactggggcctggttctgtcgactacaaacctggttgttcatcgatcacggtaattcttctcaagttattgacgctgtccccggtagtcagttgaagtgtctttcttttgtttagacattgctcttcaactgtgccgctgtcgctttcttttctctgatgtgagtctggctacaagaatttgtcgggatgacggttaataataccgagcctgtctctagttctagtctgttgtcgactcaccaaacattgatgctatccgcctgatcataccgtacgagtgacgcctctgggctctcctttatgcgcatcgccgtcgcaagatgaaatttgttggcacagcaaagggccgttcgcccaaccatgacgtgcagtccgatcgatacgtgtcgcgcgatgacaccttagatattgagaaacaatacggccgcaaagaataccattatcgggacctgagtcatagttcaatggattcggatagcggcgacgattcgatagcgtcttcttcatcggccgcttcgtactatccgatgttgaacacgacagccactgggcggcggacgcgggctacaattggcttttatcgcgtgccgcacagaatcatgagatggctttgcctcgctctgttctgtgccctcttactttttgtcctcactctcttccgattcaccctctcatcgcaaagcacgccggttggccttgaggtccccaaagccccgtcgagaccgccgacttgggaaaactttccctttctgaaaaggtatcatggtggtatccgaacactggtcgcgcggcgagagaacgtcgcggagtacccaaacgacgaccctgaaggcatgatttcagacaaaggcggtagcgcgaacagaaccattgaggctggtgatggtgcctcggaccaagcccaacaaggcttgccttttttaagctcagcgttcaacccttacccgaactacacctctccggaatatatccagaatcatggcgtcaagggagaatgtttcttggacgaagacgagaccattcgtcttccgttagttcattcataccccggagtgccgcgcggctttccggatgctgtgatgggctccaatgagatgctaggaatacaagacgatatctgcttcgatcgcttcgggcgacttgggccatacgggctgggttacagtgtacggaaaggcgggacaggcgctggcctagagggacatagagaaggctttgagcgtgtgtgggaggaattccctccagtggacttccgacgggtgagttgggcggctgcacaaaaacgttgtctgcacaaaaacattcatcgttttggggatctgcctaaggctcagcccgagcgtgttttctcagaacaatggatagtgcgt

SEQ ID NO: 4440 - DNA, 1777 bp, Emericella nidulans
agatgaggaaggaaagggatttgtataataagttcctgagaaaaatggagcggggcaagtcaagctgaagtgggggaggggaaggcctcacattcaccaattcaccggttcagcctcgggggccgaaggaatggagagccgggagttcccttgttagccaatctcatctaccgggcaattggagtgggatcggactacaattctgcatttcaaagactttcataggtctatgggggactccatgtggatttgtattcatcgcgtgatgactatgatctgacaaggctggggcctctaacaatctgctctaagttgacccaacacgctcgtattttcacaggctgaccaatatgaccattataagttttgacagtcaactggcgcgaaacagtcgacctctccagggatttgttattgaagcatagcatcctggaagccgagcgaatcaaaagattgacgtcagcgtctgccaccggcggctatccgcggtgtgccacagatgtcgacaggtatatgaatcggttcctcatctggctcgttgggtggtaaagagcagagatcctgcctctcacaaaatcatgttttccattcaagcacagcatccagacgcgcgacagggccgaccttctggccctgccgatcgagaagccaacgagagtggcgacccgaagaacaaatccaacaaacgagtcccgacggcctccagcctagaaggaagcgagacggagctctcacattatctccattacgaggataacgcctgtttttttgcgccgagttggcaggaccgtcatgcggggcatgatcgagctcatactgcgcggtcatagactattcggtatgtagaccatgcagtgagttacagctggactgatattgagggctgccagtaccgtaaacaaagcaaggatgcagtggtattgaagagtctggccatattcagtgcactttgtggcatttattgcatgtgatctttccgcattagattgacgacgaaatttagctggactaaacagtaagattcagcttagcatggcgctactgcatggttaacactgcggaaaacgcttgtcagctgtaagccgccacctcccatttcctagaatgagatgtaatcacctacaaatccgctggttcgatgcctgacccttatctcgttatcaggatcgtgccgaggcactgcattgactgaatgcggaagagtggtctgctaagggaccgtgggctgatcttctctcttttggcgccattatacgcaacagtatgtcgtctatacgctactttgccacgttgtatgttactattgccatttttggcccttttctgaccaccgtctgtcgtcgcagtcctcgatctttttagcctcggcgcaatggaggggctccgtattcatgctgttgatagtggggacgctgaagaaaatgaagatatttgagtgtcttcttgaacgctgatttgctgaaaatcggcctggggaatcggctgctccaggctagcctgctaccttgctctttttggtaagctacgacgccagtactgcaatgctccggtgatggctgccactttttttctcttccgctgtcctgcgcggcatctctctttctctccctttcttttacttttttcccttttcgtttcaacgttcccctcgttgcaagtttcttctttttatgtgcttcaagccgcctctttgtttatcgcatttttatttaaaccagcttgctggttggtacttccccgcatttacaacgtcaagcgatgtctattcctgatccta

SEQ ID NO: 4441 - DNA, 1952 bp, Emericella nidulans
atatatctctatgttctgagatgtaggtggagttgattttgctcaaccttcataatcacacatctatataaatcatcaacgttagacaaagtgtttattacaatgaagattcaaggtatgccaaacatgaatcgtcaaccaagctggactttatattgctaacaaatttcatactctcaagaggataaaaatttggagaacggcgagagtgcgctaagttccattaatgagcgtcggctaatgatgaagattgatctccgcctgttgccgatgctctgtgtgatgtacatgattacttttctggataggtgcgcttgcgtctggtcttagatttacgtcaggtcctttattaaatgctatccatgagacagggtcaacatcggcaatgccgccgttttaggaatgcgggatgatctggacatggtagagggaacaaaatacaacgctgcgctgatgatattcttcattccatatatcctattcgagattccatccaacattctcctccacaaactgaagccgcatgtctggcgtgcgtatctcgcaaatccgggagaccgtgagcgctgatctgacagctggtagtctccttttgcgtgttcagctttggcctcatctgtgtcctgcaaggcttggtacagagttgggccacgctcatggtaacgcgctggttcctggggatgtttgaaacggcgatggcgccaggatgtacctactcctctgcctatccattaccttactctatctaatcaatgggaacaggcgtatacctgctcggcatgtggtacaagcggtcagaagcgcaaaaacgatacagtatcttctcctgctcgaccatattagccggtgcatttggcggtcttctgcatccgccattggaaagatggatggggtaagagggtacggcgggtggcggtgggtgtttatcctcgagggcctggccaccatcgtgatggcggttatggtctactttgctctgccagactttccggaagactgtaagtggttgagtgagagcgagtacgaccatatcagggacaagatggggggcgagacaggacgcttgaatggggatgtgcgaatgggatggcgggatatcgccggagtcttcaaggactgtgagtgctgaggtgttgaagcctcgcccgccagatcctgacgcgttctagggaaggtattcatcggtgcctttatgctgtttggacaggttgtcagtggttacggtacctgctccttgtccagaaagaaacgattcgagctcattttctatggagatactgatattgcaggctacgcctatttcgcgccaaccatcatccatacattcggctatgggggtactcgctttccatcccgtaaccacacactctctaattggacaatacagagatcaaaacccaactctactccgtgcccccatgggccgcggcctttggctgcaccatgttggtcgccacgctctccgacttctttcggcatcgctacgccttcaccatgatcgggatgttgattggaatagccgggtacggagtcctcctttcaatccgggacacagcacaccatgcagctcaatatggcgcgctattcatgatcacttgcggctgctttagtgcttcgccggtgttcctttgttggtttgggatgaatctgggcggacataccagacggagtgtggggacggcattccagatagggtttgggaacagtatgtcttcacagctgctgttgattttattttctctctttcttctttttatcttttgccttggactaaagaagggttctggggatgcctgatgctgacaagtgcgcagttggcggtattatcgcgacatactccttcttggagaaagatgcacccctttaccgaaacggatatattatcggtctgtcatttgcctgtttatctgctaccatgtcgacggtttatttcttcgcggtaaggtacgaaa

SEQ ID NO: 4442 - DNA, 2951 bp, Emericella nidulans
gcatactagataggggaagcgagccatagtctgcggcgattgcggagtgcgggggaagcctattgcctttttagttccatgggtatcccctgaaaaaaccccaaaagccttctggtaaggcctcgcattgggcgagacgaagatcacttaactctatttcaagcttattagggttgatcaaccccaacttggtcttccgggcgctgctatcggcaattggggttctctttaggtagccactatggggacacttaaaattgagctttatctctaccgacatgctagccggtcaatgagatctacagagccccagattcacgtaccccacattttcgtgctttggactgctgaagaccgcggcgctgttgattccgctcctccgctttgtattcgcctgcgagcggagatgtttccatgcgtccgtggttaacatgctagctaactgaagaccgtggaataagtccgcacggcgtaggcatagaacctggaaaagggaataaattttgttttgttattccatgcatgtaccctcaacttgcggaatgctggccattgtgagcagacaagcataagtcggcacgcaagatgatgccgtaggcattgtttctgcggtgtgcaccgtagccaatagtacaatgggatgtgctgaccgaagactgtcatgcaattcgacttttcatgagtccgtctagcgattggaagaaactcggctgttcccaatggttagatctgttgatgtttgccgacaaagcttccgacttttcaaagctttcaaagccaagcttccgtttatagggtcattcccagctgaaaagctagtgcggttctttgatccgcgatcgtattcgagtttgctgaggctatcacacagcagctctggataacctctgaatggctttaaaccgagagcactgtggcgtctgagatttcagagcccatactaggctcaccatgacgagaatccctctatagcctctcgagcaattgtttcttgccattagagtccttaacagtcaagtcctgggaaaattggtcgctgagtatagagtataaatcgggccggataatgtgcgctgttgtagaaccatccattgcggcaatagagacatatctctgagcttaaactagtcagtattagggcagttcaagatggtcggaatgtgtcatactcagcatgatgatgtcggaccttgagtgtgttgctagcggcccccctaaggtacgttcaaatcgctgcgagcggctctcgcattcgtattcttagtcggacgattgtcgctacttcttgcaataaagcgcactgcaggtcatgaatattgattgggattggctcaaacaacgggttgtcagactttataatggattacttgttcaggatttaggtatgggaacgggggtgggggagacgaggtttgtgtggagagagaaaaacgatttccaggtgcgtcacatgatgggctcttgcaaatcactgaatcctctaataaagtcagcactgtaggatgcagtggctccgatgccttgtccttgttccttcgtactaacgttatgttgtcacctgtccagaaagaaagtggcgctgacacgaaccacaggcctgatcctgttggatgtacacaataacgtgcttataaaagccggcaatgccctatcaactagaattggaggtaccagtgcagattaccaatcaggaatagtgatctcgcgcattcactctcttaaaaccactgaagtagttacccccaggatctctacatcatctcgcagctcgacatgaacccaacaagcccaaagtcaaatccatcttcatagctcaagagaaactattgagatataagctgcatggcagaggtctaacaagaatacccggatgtaacgtaagaccaactcgaatggcggttcccatcgttaggaatagtgtgagttgaatgaatttccctgttatggatatctctagcgggtattcgatactgaggatatagtaccaaatacatacccgttaaagagaaacgagatggtttgtgcctgcattacgataatgttttgagcagtagtacgctcccaggaccgtgggcgaagcccaccagaggcataattgaatctcagggataaggatgggttaaagcgagcacttggagtgtcaactacgaagtgaaaagctcggttcgaagaccaaagtatgagaaacgtaggggagacggtatgtcctagctatgcttacgccttgatagctgtggttgcatccggttgactgacttgacaactacctgacaactacgtaactaaatcctcgcagtaagcttctttaccgtatcctccaatggatagtcggacttcacccgacttctcaccctctctgcatcggcgggcctaataacacgcgcctccgtcgcaggattatgcccaacccctgaagcagaagcaacctcctcgtcagaaagcctcctgttcgtgcccccatcagcccgcttgtagactgtaaccacaactgcaccccccaaacccaaattatgctgcagtgccactgaagtattctcaacaagccggttattggcccatccgcggagctgccaggttagctcagcacactgcgctagtcctgttgctccaagtggatggccctttgagatcagtccgccggaaggggttgattaccgggcccttgcccgcgtaggtgatatcgccgcggcgaacaagctcatgggctttacctggttctgagaaaccaaggcaatccagcaggataagcttgtttgcagagaaacagtcgtggagttcgcatacggtgaccgcctttggcgtgatgcctgcttcggccatggcttgcgtgactgcgcgcttggtcatgccccaacctactaagtcaaatgcgctccctgaagagacagacggttcgtcggtgaggagtggttggcccggcatgaggatggcttgggattcaaaggcggcgg

SEQ ID NO: 4443 - DNA, 5338 bp, Emericella nidulans
tatcagagcgcattactggtattaaaccactcatggccaaactctcaaagcacccagtagagagggactctatcacagcagtcatagcctttccaaaaaggctacaacaccccttgcaactctttggcctgtccggcctatcaaggcccacccgccccaagcaaaggcctttgcaatgcacccgatgctactgcttctatgatacacgagcctgccgctccagcgaacgctgtatctcctgcggatcctcaaaacaggaacacaactgccgtgtgcagtgtatcaactgctgcggcccgcatgcagcggacttccaaaaatgcccagccagaccccacgtccagaggaacactgtcacccgcctctcaaaagatgctctagctgctatccgcaaggcaggccggcttgccttccaacaggagcagaagaaagcagaagaaagctctaaacaacaaatagataatacccacactacaaaccagcctacaagacagctcacccaggagctcttaaaccaaaccctgacctcccctgaactatgaaaatactacaagctaatgtaggaagggggggcactgtacatgacctgctactctcctttgaagcagatatcattcttgtccaagaaccttggacaaatacagcaaagcacctaaccaagacccacccacgatatcagctgttcagtcccccgacccgatggactgccagacccaggactctaacatatgtacgaagggatctcccagcccattccctcccggaaccaatctcaccagacatcaccacaatctacacggcaggccttactatcatcaatgtctaccgcccccctaatgacccagttgcccctgctggtgctggctcaacaccctctacactttccacactcctaggatatgcacccccagagaacaccatcctagcaggagacttcaatacccggcacccattctggcagccagatactgagtctcatgctgtcacacctggcgcaacaggattattagactggcttgatgcccatgagctggaacttcgcctcgagccaggcacccccacccgtggaccaaacaccctagaccttgtcttctctaacctaccactaagggccctagtagaagaccatctaaagactccaagtgaccatgcaacaattggaataatactggaacaagaagagcccccgcctatatacaagcttggatccaccaactgggagaaagccagagccctggcaagcccgcctgacccaaccctaccaattgacctactagccaaacaactggtccagacatcccagcttgcaatacaaggcgcatcaagatacaatactcgcagactccccaggaccccatggtggactccagaactaacagacatactacaccaaacaagacagcaacaaaaccccgactataaacagctccggaaggccattgtacgggcaaaggctgaatactggaagcagcgaattgaacaagccacagcacctatagatgcattcaaacttgctaaatggatacaacatccagaccagctcgctgctcctcccctgaatatacaaggggcacaggttactactccacagggcaaggcagacgccttccttaatcacctcttagagaagggggccctgcttccaaatcagacagaagagggacccccaaacaagcccctgggctcactacacctgccaacaaaagagcactgctgggctgctctctgtgccccacccccgtctgcccccggggaggacggacttgccaccactgcttggagggagctctggcccgtactaggggatacaatcacacaactgtactacaggtgtatggaggaaggctgctttccactgagcctgaagtcagcaaaggtaataatgttaccgaaaccaggaaagaggggctatacccaactcaatgcctggcggccaattagcctcctctctaccctaggtaaaggcctagagcgcctcctagcacagcagatagctgtaagagcaattcaggcagatgtactagccccctgccacttcagggccctgccaggacgctctgccattgacctggtccaggttcttgttcacagggtagaggaggcctttcaacagggaaaagatgcttcactactcctactagatgtgaaaggggcatttgacgctgtaatacaccaacagctcctttctcacttatgcctgcaaggatggcataaaggcttactccagctacttaaggactggcttactggccgctctgtatctgttcatatcaaagaaggcactgccacagcaccaattaaaggcggactcccccagggatcccccctatccccaatactcttcctgctatatgcggcaagaatagtctctaccttagagggctccttctgctatgcagatgatatgggcatattattaactgggaataccctggaagagagctcacaacaactggtagaggcctacaagcaaattactgctctagggacagagacaggcctccctttctcaatagagaaaacagagatacaacacttctctagaaagcagcagcagtatctccccacagttactctacctggtataggggagattacaccatccctatatacacggtggttaggagttcttctggatacaaagcttacttttaaagcccatattaatttggtctttagccgcgggaaacgactcgcccagcacctaaagagacttagcaatacccagcgcggctgcccagtggcctccatgcgggcagcagttatacagtgtgttcttccaacagctctgtacggggcagaagtcttctatacaggcaaacaacaaaaaggggtagttaactccctgctttctctcttccgcacagcagccctggctattatcccagcctacaagaccacccctactgcagcactcctccgcgaagcagacctaccagacccagaagctctactcaacagcatcctccggagggcagcagtgagatacatgagccttgatactaaacacccaattgcccaaatagccgcagagactaccgcgggcaggcccaaaaccaggcttaaaaggatcctacagctcctcctcagccccctgccagagcgcgctataatagagctgcctctccctccattatacatgctcccaacagacaacaaaggctacagccctgcccctttacagatttcagtgtactcagatggctcacggaccagccagggggcagggtatggctatgcaatctactttggccctatcctcgtgtccaagggacatggtcccgcgggccccaggacagaagtctatgatgcagaaatcatgggtgctgtggaaggcctacgcgcagccctgggacaaccatgcgttggctactccacccagctagttatcctcctagataacctagctgcagcctccctgctagcaagctataggccaacccctcacagacatggtctgtcagagacctttagccaactagccgcccagtggatggaaagcccttcaatcctaaccatgcaacggaagccccttcaggtccgctggattccaggccactctggaattgctgggaatgagctggcagacaagctcgctaagctagggtcttctatatacagccccgacatccccccctccccagcatacctacgacgggaggcaaaacagtggctccgtacagagacatatacagcatatgctaataaggcgcctgaaacctacaaagccctgaatatcagaccccatacaaaagaaagccgctcccgcgagcacaagctgccccggtgggtacttggccgactcgtcgccgcccgtacaggccacggagactttacggcataccaccagcgcttcaaccactcagactacctggagagctgctcttgtggtaggaccaagaccccagtgcacttcttcttctgcccatacaccagaaagcgctggaaagatagatggagatgtataagggacggcccgtcaaaaacaatagactggctcttaagtacagctgctggggctgaagaattcagccgcatcgtgcaagaatcatccttcttcaaggatatatgcccgaactgggcccgccggagcgcttgatagtgcgacagtccacacatctacctggataaagggtacggcccctccccccaatctataggtagtcaaaacgggcatctgccctcgaagaccaggccagggtagcgccggatgcttcttccgctcatttccaacatatattgtccatagttgctgcttcaaacctgtatctagctagttttagggagttctgtttagacagcacgtccagatgccccctgggaggccgcagatcacgtgggccccgtgatccgccgagtgacgttaaataataaaaccaaaccaaaccaaaccaaaaccaaaccaaaccaaacctagcttaccagataatgactaagcgagctgacccctaggggcaggcggtgccataggacagacagtatgccccgacattctacgaagctattgtgtgtctaattgttgaggtggttatgtactcaatgtctataacggacgattgaattgaaggtcttgatctcctaactacgatctgtataggcaatttataccttttccaaggcttcaaaaagaaggttttcgcttatgcaggagatatccttgtcatacaaacagtatgagtcaccaaacagatatccttgccatacaaacggtgtaaagcatcaaacagatatgcaagcgaacgttgtgctgaacattgattagtaaggaggaacctcctctggttgacatttgtggttactagtgttgtgacagccggtaagctagtcagaacttggctctccaagagggttagcactctttggctgagtagttcttcatatgttggctttcgtgacgcgtgcggtgtctaccaggaacgaaatgtattatgtcgtagtcacttgagtactgtgtgtatggcgttttatagtcttctagttgccttttctgtccaagataggactctaacgctggtatggccatattgaaagggggggaatggttcttagaggttggcgtaacctataacttggcttgtggcgcgggtttttaatttaccaccactgcctgcttgaaaaacacctacggggggggcttaatatctttcctcgagatgacccccaaccgatgggtggtttttggactcaagagaaatcatttcggcggtaccctgttctccctacttattgccccactttatctataaataaaactataactcaacctccagtgtaaagggcacccactactcttttctttctttctccccttcttcattacctaaacctattaatattt

SEQ ID NO: 4444 - DNA, 4010 bp, Emericella nidulans
tttagcccccatttaagaacccaataatggattgatggggtaatacgcaattggtactgattaaatccagttcgacaccggccgcctgggttccccttgatactcttggatgtggtctgaaagctctgaagttcaaggagtgcaccaagctccttggaccggttgttgatggcactgtcgttcctaacggcactcgcgttcctggtactccctaccagctagaccctgtaaatggtgccttcaacatcggtgcaatgatccgctggctcgattacaatgactgctggctcgctgctgagtggggtcatccttccgacaacttgggcggtattctcgcagtcgctgactgggtctctcgtaccaaccgcgccggtggaaacatcgccggtggtaagatcttcaccatcaaggaagtcttggaggcaatgatcaaggcccacgaaatccagggtgttctcgccttggagaactcctacaacaaggtcggtctggaccacgttgttttggtcaaggttgccaccaccgctgttgtgtccaagatgcttggtctcagcgagaagcagaccgccgacgccatcacccaggcgtgggttgacggtcagagtctccgcacctacagacactcccccaacaccatgtctaggaagtcctgggctgccggtgacgcctgccagcgcgccgttaaccttgttctcaaggttcaaaagggtgagggcggtctcaagaccgtcctctctgcccccgtctggggtttctatgatgtcctgttcaagggcaacaagttcaagttccagcgcccatacggcagctacgttatggagaacgttcttttcaaggtttcctatcccggtatgtgtcccttgcctcgctcgtgcctagggggttgctaatgtgtgtaaagccgaattccactctcagactgctattgaggctgccgagatcatcaacaagaagctcgccgccctcggcaagagcgccaaagatatcaaggaggtcactaaccgcacccacgaggcgtgcatccgcatcatcgacaagcagttcaaggctatggacaactttgcggaccgtgaccactgcgttcaggtatgacatcttaaacacgaatgagaagttggcaaatactgattgcactcagtacatggtggctactatgctcgtcttcaaccgcctgactgccaatgattacgccgatggctccgaagccgccacctctcctctcctcgaggacctccgcaagcgcattcgctgcgttgaggaccctaagttcaccctggactaccacgaccccagcaagcgtaccatccccaacgctctcaccgtcaccctgaacgacggaactgtgctcgacgaggttgtcgtcgaggcacccctcggccaccgtctccgccgcgacgaggccaagcccgagattctcgacaagtacaagcgccacctccaagcccactttgaccaggctcgtctccaggaactcgtcgaccttggaaacaacaaggccgagcttgaggcctacgaggtcgacaagtacgttgacctgtacgtcagggacaagattgttgctcctaccgcgtaagatgtatgaagtgtgaaaaattagacatttagcgtgtatatgttcaaatataatatcgactgcgcgttccagaatgaggatactatcagcttctgatttttagccccagccgaagcgatgttcctggcacacgttggtgctagctaggggcgggccttataaacatccaactttaacctaaaccacactaaaataacctagacagactgataagtcatacacagacacaaagggcttgcaaactgaggtaattgtaaggtactgaggtaattgtaaggtgtcaggggtgagggtgaatcaaaataatagataaaagataaaaaaagacagccgaacgggggggtcgaacccccaaccttgagattaagagtctcacgctctgccgattgagctagcccggctacttgttgaaaggctacttcaacaataaaaataagttgagcaaccttgagcaaccacagttttcagctttttggcgcgaccccacgggctgtatagtcctctagaatttatcagcaccttgcataatacccctaactggttcaatagtggctcctagtacttatggtgcttataagactgctaggtattctagagagcttatttccatcaacattctttataattcttagtccccgcagtgatcacaacgaatatataattctgcctttgtgcaccaagtgcgcgcgtggcttattgtgcagctgaatcggcgaagagacacaacctgtattgattcatcgaaaagaggcgattgctgctgctataatgacccacctcgcaaaaagtcttcctcaacctgcctggcgaaatcatcatcatccaaaaaatagcaagcggtaacagccatgccggccgcacaatcaagcgctcgtctatacgcattgggagatcccgccccatcagtaaactgcggagtatggttgccgcttttggccgaaatgaagaatatcccgtggaagccggggattgcgtaggatacgtttccttcaggaggtcatgttaggagaaactgttgttggaggtagttgctactctggattgtaggtaatgtgacgtacccatgtctgtcgacgcactgccccctgctccctgggggctattgaggaggacatgttggcccatggctcgcatgacggagacgtagctctcgcagatatgctcgttggatttgacgtcagcgtatgagggacccctataccagacggtgagtccgagattgcgataccgaataagaccccagcgaaacacctaccactggaattccaccttacaccccgtagcagtcgccgcggcctcaaaacatttcacaaccttctcggtcagtggtttcagcgttgccaaagtcggggagcggatatagtagtccacgctcgctgaccaggggatgatattcggtctgtccccgccattgacgataatcccatgtacccgctgagagggtagaatctgctgccggagaagagagatgtttacataggctgctacaacagcatcgagggcattgaccccttcccaaggcgccgcggcagcatgcgctggtttcccggtgaaggttacgcggactttgtcgtttgccaggaacccgccttcgggcggcttcgctacgctcaggaggttagcttgacccggtggcagtgccgcaggatggaccattaaacaggcgttgacgcctttgtatgcaccgctgtccagtagacggatctttccgccgccagactcctctgctggagttccgagtaggcggacggtatagactaagccagcaggagcagcgattttcatcgcctcgcaggtagcgatgaaggcagctattgagctagttgcaatcaggttatgcccacatgcatgcccaatgcccggaagggcatcgtaggcggcgttgaatgttagcacgcggccattgtcggcgtcgccatgcttgtattcgatctcgaacgcggtgtctaatccgtaggcgtggcgtcggacagagtagccctccgatctgagcgcctcgaagagctcgcaaatgttattatgcgcctggtgctcgttgtatgcaagttctgggttggaccatatctttgactgttaatgcatgtccattgaccacgacattgcgggacgattgaccgactcactttgtggtttatgtcctgaagcttctcgtcatactgtcggagagcaatctgaactggtttgagatagcgtaactgagatgcgctgagctgcattgtgctgttttgtggtcggctagaaggactgttaaaatgcgagaaggggtactagagaccgtctacccaccgagcagagggataacactatcctcagttcaccaagcagatgaagacccgtgctgaggatgctggtcttttaaaagaagtccaggccaggcgagcgtgctcttgggtagcctgatccggtcaaaactcgggaccccgcacatggttggaga

SEQ ID NO: 4445 - DNA, 1396 bp, Emericella nidulans
ctgaggagtagacggcaaggcggacgattgcaatggcaataaggagtaggccgacggaaaagagcaggacgtattggaggcgtctgcgttcgttagtactcatatcccggctaaggggtaaggctgtatactttaaccatgacttccttactctcagcagccagggcatcgggagcaggataagcatcgcatcggtggtgatattgagcgcgacgagggtgacgagttggatgtttgctttgacgcagtctcctgatctattcgttaaggctgtccggagaggactgttggcaatcggagtctacacaccagggtcaggcagaacctgccagtacagatgcgcaggccggcactcgccgaacgttgttcccatcacagccgccagacttcccaaaaggacgatccagtaaaccttcccgatcatttcaggttccggaagacccgaaagtacacgctcgcacagcaagaggacatttgatttctggatccacaggctgaacacaatcagcaccattcaaccacatctttccactgaaacaatgaactggagggcatactaagtattatagactgcccggtttgcaagcgtcagcttgctcccaaccgtcctgtggtagatctccgtctcggttaggttcaacgcaggcctcgtcatgttattgttcccccaaagcaacacgacagttgtcagcgcggaacgagccagcacaaacacgatgcataccatggtcaaatagtcgctgaggataaagtcctggttgcgatatttgcgcatgaacaggcggatagccatgagaatgatggagaggccgccgaagacgccgacgagcgccagagttgtcgagaggtcttcgtgcattccgtcaactgttactgaggtgcccgtcccgtatgcatagtattcgttccgttgagagactgcaacacagctgcaaccggggctgggacaagattgggactgtaaggctgaacggacggtggttcctggtcatggcggctgtttttttttcatctgacggttcttattcttctagattcgcacagttcacacacgaataacgatcggcagtcccgtcgaacttagtaccacgattttgattttgccgagacagctgctgtggagatttcgatccttcggtttccaagtgagacgagttggagcaggtcttttggtgttgatccggcttctagggacgcttcggcaggcagagcaaaagcccccgtggcaatttgatcctgagacagtattgcaatgctgcaaagtgtatgaaactgacaattggatgttgtgcatgaatctgagttggtcggtgcgaggatggagatggatggagctggatggagctggatggagatgttgagatcgaaggaggcagggattgacactagtggagca

SEQ ID NO: 4446 - DNA, 571 bp, Emericella nidulans
gcacatcggtaattgtgtaatactccctcaatgttatctccttcgaagttgcgtcaccccgatcttcattggccctggcagattctgctgtagtgttccccgtctgaggattctcttccgcgggctgaccttcgtcttcgtcgtcctctccccaaccccaagcatccccggtttcatcatcgtcaacccctgatgcatcattaggtttggtgaccttcgggtcatctgtatcatcgtccaagccccaggcgctaacgtcttcttcgtcgtcattgttttgagcattttctttctcgtcatcccagccggcgtcccagtcatccgaagttgagttgtctaataatacctcatctgtttcagagacttgtctcttttcgattctctctacctgcctcgagtcccctttactagcagcaagcaccttacggacctgatccaacgagtcaactcttcgcctagtcagccataaacgaggggcttgagtggtccaggaaaccagttcctcttgaccgtgcagaccaagtgactctatcgtcttggtaaattgaaggacgtgctccaaggtggcctc

SEQ ID NO: 4447 - DNA, 1995 bp, Emericella nidulans
atcagtacaaggtaagcaaacgtacggggtactcgttgcacaaggtcatgttcttttggccatagcactgtgtgatttcaatcgcccagtcgacgttctcaatgtacatgtcctcgtaggtgatatttgagactgatccgagaccgcctccgccctgaaggtcctcggacatggcggatgcgacgcccggccagaccttgatgcgagccatatcctgcattgttccattaactctgcgcgttgtagagggtttgatggaaggtgaggcatacagaagcattatacatagagatgttatagacgagcacgttcttgacgatatcaacctcgccaatgtattgacctagcgaaccaacggagataccgtgcgagccattgcagtacaggttctggacaagtatttcggtactgttcggtttgaaggagacgcagtctgtacataacatatcagcacccgccatacattcttctatggcagggacaagggtagaatacataccatccccattgttgataaccgaattctgaataacaatattcttagaccggtacgtatcccacccatccgtgttcttcgcctcgttctcgcttttgctgtacccggaaatgtcgatgccgtcgaagagcacatccgagctgttcgcaacaagctggtaccactgcggcgagtagcgcaacttcagcggcccaattgtcccgccgtgcaggccgatcactccaaacaaaatagggcgcaggataagcgggtcctcagcgtacaggtcgtaccagatttggccattgccgtcgagagtgcccccgccatagacgttcacgtcttcgccgccaagctggaagaaggtcgttgcgttctggaacgtgtgtttgaaagagttggcttgccagtaatccgtgtcgtttgtgaactgaatgcggccgaggatttctgcccatgatcagcatacgtgcaatgcagaaaagaagctgggcatgtataataaacgcaccaagatcaacatgcttcaggaacgtcagatctagagccgtgccgatggtatactccttctcttcggcgaagacgacctttccgccgttattgcagctcttcaaggcggagaggatgaacgccgagtcgtcgcggccgtcgccatgggagcgcacatggcagactttcttgcgtgggtggctgtaggggagaggcttgaaaggccgcttggggcctacggcatcatttcgagagcgtgagaagtggccttcgactgtgaggccgagggagaggacgctcacggcggaggtgaggaggtgtgagagcttcattctctcaggaaacaaggatgggatccttaaggtttgcagaggttcaggtgaattgggtgtctgcagcgagcccatgcagcaaaggggtagctgtaggctttatttataccaatttttgtacattcttctgcttctaccgcggtctctgctctgatcctggcaaggctctccaccggcagccctgcggagaaatcaatatcgacccctcaaaagcaatcattttgtccgggggtagagcgagaaactggggagattgtggagaactaagctccgtgctgaagcttggattgggtatcaagaagatgttgaatgagtaggagcttggaggttgtgaagagaagatgtgataggagggataattgtgtgtttggctgggtctccaatacgccgagtggcggagaatcccctaagctgcgctacatcactggatcgtcgctggaatttccgtttcatatagacttgtagggtagttggcataggctatttgttttattaattagaggcgccaaacctagggcccggcaagaatgttttctgcatggtggttctactcaatatggcaagccctagaaagccgtctcattagatgagtccaagtgcagagagaaattcgctcagtatacaattggtgtaatgcattgatggtggatcgcccggtcgacggttcgcatcctacgaaatctatagggtttaagtaga

SEQ ID NO: 4448 - DNA, 5460 bp, Emericella nidulans
gttatataagaggtagattcttatggcacatttaaacactataaagatgtatttgatttaattattatcaagcgaaaaaaaaagggaacattacaagttctttagaagtggaaccccttgggtggggtttattggaaattagatagtttagtcactgcgcacccagtatagtgtttaatcacaagacttggaagaatcacacgtcgagtaattcctcgcaaaatccggtgcacaaacgcaacccctaggtagttaaaagacaagcaaatgattgcgacctttccgcaaaaaacggcctggaatagtaaataggatgtgtctattttccgctgcaggttctaattgagggcacccttggagcagaatccaaaggttccctgcacccgagggattatagcgatggaaaacgcagaccttccgtatcctccacgacgccgcgcccctcgtactgtcattctttgcgtatgtaaagaggtactgaatatctgccaaccagatgtcagtggagattcataattaaacacccaggttatgttgaagtatagtaccgtaagcgccatcatccctctgcttaaaactcatagctccatgtcccgcatccgaagtccgtggcttgtcgccgaacgaaacgactagatcgaaaaatgaggcatcaatatcatagtgggtcattagcttgcacatggcctgttcggtaatacccagtggtcgcagggagttttggcagcttattgacctgggtgttgtcagaatcttaaaacgagtaatctaaatcggtgtccagccacatacactatacgggtttctggcttcgctgcgtttgcgatatgcgactcgaatatgtcgctgttagtaaatgaatatgctgcatgttgcggggtcgtctcgaaaacgtagatattggacttttcaggatgggaggcaaacgtatcatagcgtaggtaaggtcgaagggaccggtagtagccggattcaaggtcggacatgcttggcctcgagattattttgatttcctgataagggcgtgaacaataagagtgattgtacggtcgagttcgataggaatagacgctgtaggaataacagagataaatattctttatcgccttctagaattattgtcgaagacttccagaatcaaagcaattccttcgttacagacagttgttgtcaaggcagcttacaaggcagcttacaaggcagtatggaggcggcgaggagaagctctgcgcaaagaaaggtctacggttgaggcgcagtgccagaacggcagggcacttggcaaagctatagtcgctgtcgaaaagaaatccccaacgggaattcacgtaaaaagtcatctgatatatgtagaccacactatggaaccagccatcgtcgtccaattttctacctgtccctccacatccatctaatcgcgcaggtcgctatacagcggggcaatcagtagccgaagcggaagggtgacatcaaacaaggcgcagtaacgtacgctatctcatcctgtatccccggggcagggcaccaaggatcagcgagtctataccaaagcaggataccatgcggtctgtagcttaccatatccacctttctcggagcctcaaagacgtatcgaccatttatatgctttgagataaaaaggcatgagcggaacggggcaaaatcagtgtggcagtgctaggtcaatgctggtggtcatcttttcttacctggactttgataggatacccgaataacacgtacagccggtcctcgagtttttcctggcggatgtagcttgtttcatcctcgctgatgatattctggactgtatggctcatggtgctggcgatgtctcgttgcggtatacgtattggcaggtgatatgacagctcaaggaaggtcgctggaaattgggggccgcaattatctgtcaacccacggcaagagccgcacactggccaggcaagcaaagctagtgcggaattaatggtgcgttgggacggagaaagatggtgccgctcgggtgttttcgccagaattgctcagcttgttcaaaatgagacagcattaaagagactacgatactgacctgcccatctatgacgttgaccctggcattgggtcgagctctgactggacaagtccacgttagttcgtatttctcctcttttgcccgccccgtggaaaaatgaggcggaagagctgggtttctcggcatactgttcagcttacggaatttgttttcagataaggtattgggcggtcgatgctgaaagtaataacacatcaattcaggtctctagatgggaactttctatgtgggaagtggtaaggggcatgcgatgatacatatatatacctccccgcttgtaccaaagcgacgtcccgaaacgccctacctggagaaaagacaaacattaattggaataccgaatcggaaggactttaataggagcttagaaaatgtagaacaaacgagcttgaagcccgattagcgagcgatcgcttatagtaagttgtatttatagtgtacagccgctcgcgcggtttgagaaattgcgacattactaacagaatacagggattcctgaagcccggtcttggacgtgggggctctctttagtcctaatagcctttaattgtcgtcaagaagagttgaagtgcagacattattcaggaaggctttctgcggttgtaatagggttgcctgacaaagttcccccttgcgtccgacgagcctcaagatcttctattgcaacctctcctcttgtggccatgactggccgaaacggcgctcatgttgaacgacggtaatcctttgtttattcctttgatatcctatctcaatttgtgcaattgacgtttgtacacttctctaaccatagaaacacgcagtaacccaaacccgctgaccgagcggacggccagcgagctggaacaggatgtgcgcgatttccacagacgaaaagagcttaccagcgttgtcgatgtcgagctcctcgtgaaggcagcacttatagcccgtgaccgaatctacatgcagatttgcagcctgacggagcccgagaagcgcgtgttcgagtccgaggagaagttggggttttttcagcagacgaaggagctgaaagtcagcatcctgacgactgcttgtgctgcgatcattcagtaagagttccattcaactgttgtactcctatgtgaaagaactaacttttgtggaggggatggcagcagtcaacgatcaacgccagctcgcggggctggcagtgccagttccttctacccaattcgaccgaagagcaacccatggttaatgttgtccggcatgtaatgtatattacatgcttgattgatgcggcgccgtggatttcagggagtatcgtgtcagtttgagcttcagataatcgatatatttgggcgtatactaatacagcgtctagtgggacatggctcagcgaccccctccaggaatctaaatttggccgtcggtctgcacttttcgtatcggcattattttgtgctgcatgtgtgctcggtacgtcactgtcagtgacagacatcggtcaggaactaatgctgggtgtataggcaccgctcggtgtgatacatggcaacaactcctagcttgtcgactcatccttggaattggggtatgctgtatatgaacttacagaccatgataccaagctaactagtcggaatctagataggtgcaaaggcgtccattgccccagtgtttgcagccgaagtagccgcagaccatttacgaggccggctgctgatgatgtggcaaatttttgacacgttgtacgtttttactcagaatattaccgccatctgctcagttactgagatattaatctattgcaagtggtattttcattgggttcctatgctactggattgtcggccgaagctggcgcggccttctcggcagcgccgcagtccctgcccttatcctccttgtcctcgtcttcctgtgcccggaatcgccccggtttctcattagaagagatagatacccagaagccttcctgagcctccgccaactacggggctccgatatccaggctgccaaagacctatactacatccacgcgcagctgcaaatagagactgaattgattaatgggaagcggccggaggagtggtgggccaaagaggtctatcaggaaaaggtaaaggcacagtcattcttccagagagttggggctcttttcagtgttcggaggaacctgagggcttgtattgcggcgtttctcgtcatggcagcgcagcagctttgtggggtgagtgaagtgtggccatacatactctttggtgctctaagattttatacagatcaacgtcctttcgttctactcgtctacgttgtttcgatcagcatcttcaacttctagtactaataacacgacgctaagcgatttctcgaatcccgctgacattgtcaactgcgaaatacccatggacgatacagtcgcgtggctgaacttcggtaggctacccacaagtccagatcggttccaagcactcatatgatctaggattcggtctcgccaacttcctattcacaatcccagcgtatatgttcatcgacagaagaggccgtcgtatccttttgcttgtctctcttggggggatgttcttcaccctggtcgcaaccagcgggttcttcctgatcatcacgccagacgatgcacgtaaaggcctcgtttctacgtttacaattgttgtgtttacacttttctacgggatcggggctggtcctgttccattcacattcagtgccgaagtcttccctctggcattccgcggtaagtatgctctacaaacttcttggtgcatcatgcgcgtttctgacagcgagactgaattacagaggtcggcatgagtttcagcgtcatggtgaacttcatcggcctgagcatcttgattctctttgtgcccccgctgactactgccttctcgccggatgaccccaacagagataaggcgcgtttagtaggccagtctaatttgctctttttctttacgtatgtgcttctttcatcttgacactggaaaaatagcgtaatgactgttgcgtctagtggcctgaacgcccttgccttcatcctagtctacttcctcgttcctagcggaacagcggggattagtctcgaggagatgaattctatatgtatttccccccatacctctgtattctgcttataagccgtactaatagatggctgtgaatggcagtcaatactcggacggccgtacacgcatatgaacacctccctgctgcggtgagaagaagatggcagccactggttgtgcaaaaggagggacaagaacatcagcgagatcaacaccatttgcaaaccatatatagtaatgtctagagcgagagacatgtaataaaaaatgatgcggcatgagactgcttcgtggctttgacccgtgtgtttgtaacatgttaggacacaagggacg

SEQ ID NO: 4449 - DNA, 6703 bp, Emericella nidulans
gcgggctctcgattatcagtataaccaaaatgccaactactgtcttcgaaaccccggctatcgctacgtgctggtccctgagacagcctcgagcctcgactgggccggcttgaagacactggatcttgcaaagtatgatttgctcgggggaaaacaagagctggctgtagaactcacaaaggccattgaagacgtcggtaaaccactatcccttcatcatgctatttgtcagatacattttcgacttgactaagccggagtacagggtttcttctacgtcgaaaattatggtttgagcaaggaagaagtcgacgcccagtttggtctagctaaaagggtcctccccctgcccaacgatgagaagcagaagtatcgcgccgccctcgaacaaggagactacaacggatgaagccagccggtatacagaacctgaaccccagctgtgaaggataatctcgaagtctacaacaccccgaaattctcccagagcacgcgggtcgcccgcatccagaggttgtcagggcgctttggcatactattgaacggttctcaaaacatgctcactaccatattttcaggaagctgccagttatctttgcggttgctcttggccttaaggatgaggagtggttagtgaagagacatcactacgaccgaatgttgggggatcatctgcggtacatgaagtactatgccaggagtgaggaggagaattgaaagctgggaggagtctggcttaaggggtcagtatccctggtcttaatatactgcaataatcgtctcgttgattggtatggtaggcatttcgatattggcagtcttaccttgctctttcgccagcctgttgcaacgccacaggtgttgaccgaaaccggcgagtgaaaatatgtccggccacagatggaagcgcttacggtcaatattgctgatgtgcttcagttcaggaccagtgagttacccaaattcttcaagtaaagtgctaagctaacgctgagccctgctagacgggtacctcaagtcaagcatccatcgcgttgtagtcccgccaaaggaccaggcgcacattgacaggcttggggttctgtgcatggtttggattgaatatgactatgatctcatccaaatcaacgaatatcccgtcctgcagaaacacagtctgactggcaataaggtcctagggagcgatggccagcccctcaaggcgggtgagtgggttaagcagcgagtcatcaagaacctgggagcgtccacgacgaaagaagtagacaacgaggtgaacgatgtagagatataaagggggtgaaggtgcgctactttaattagagagcagtccgtggctatggcagactcggtacaacgatggatccctcccgctctttatagcatcatccaacatatccagccggtcctggccccagaacggctctcctcgaaaagagtacaatggggcgccgaaatactgcctgatctctgcttccttcgtcaaggctgtctcctgatctgccagcagaggctcagttttcgccctctgtagcaaccgatcaccactcagtccagcctctttggccagctgcacaatcgtagcttcgtttgcaatatccaactctctcgcccaaaccgcctccaaaccaagccgcgcaaattcctgcacagccagactgtcattgccggattcctcgatggccgccagtagcacacgatgagcgagcgatgggtcggccgggtagtactttggattctgcactattggaatgccgtgaatacgtcgccaccgctccatctcaagtaaccggtaggcctggcgttgcgccgaccgttgtttcacagggaggcccccggatatcgagaagatgtacatgaggtcaattggtttgtggatgacatgggcatttgtttcctgaaccagtcgctggaaacgccgactgccgatataggaccatagcgagatgaaggagaagtaatattcgatcactgggcgggcggccatggcttcaaggcgtggtcaatgatgaggaagttttctcgttttttatttcttattacttttcctttcaagtaccgactgctgaggacgcaaacctgatgaacgctgacggccggtcgcagtggcctatattaacataccagtcgtattaaaaggcgcgaggatgccggtagatggcgtcaacctggtccaatgggagtatccgtggacaggaagcgtaagagctcagcctccgagcccttggcggatacgaaaccctctgaaccaattgacaatgtttgtctcttccctgtaacatttgacattaaatttggtcagtttgcgaaagtggcaccagaaggccgcgaggccgcgaatcatcattctctaatgacactcccagtcagcgccgcaagcttacacacctctaaataagcgatccgttgagatgcgcgagccaattcgtagatagggaaactttgcaaacatgccgcaattggttgaaggcattcagtacctagtgctcatggatctacttcaggcatgatggatcagcttttaacgttttctggctgccgcacgtagcaagctgggtgggaggctctcccctggagagatcttccgcacgcagtgaacctggcctagaaactggctgttggagtaccctgggcacagccagccggcagctaggtatatcgtcctcgctaagattgttcgtctttttagcctgatacgcgcttggctagatcatagaggaaggaatcggccacaacacaattcttcagaaaaacgactggacagcaagttctgggaccatgactacccacgtagggtactgagcgaacgatgcggaggagctgtcaacatccctaagctagccgtaaatgctcgaggaagtaagacattcatttatagactaccgcagccaagccctcattccgcgggccgagatacttacacttcccagctgtggcacgtgcattaggcctatagacccccatgtctagttaactcttgtcgccggaccctgagtgtttataaagctgcaaccagtgtgaactgactggtctgttgattcgagtcagtcgcttgatgtcagatcggcagcgtcaggcactcccccgctcttccccacgcgccacagactcattccttcagactagggctagattcgcttcttagtattggccacaagcctggaacttggtagtgctttcaaggaatagaatccgtcacatggagggcagcgctaccgagccagggtcctagctagggctagccgcgtcacatcgcagacgagccggaggcgaatgcgggtgggcgagtggatggctaggtatatctaatggcgtcgcaccgcttatgcacccctggctgttcctgactgttcctgatagccaagtgtctttttcatccgctgcagcgtgctggctaagatgcatatcctccagtatctaaccgggatcctcgtggtctctaccacgggtctcgcctcagtatccatgccggcctttgctgatttggatacctgttctcctgatttgggtcaggaagaggtttctctcattgagatagcaggcgtagcgcaagaggacattcatttgctcgtagcccggcaactcgacctagacaacatcgccgacagcatcacggggcttctccagccattgttgcagctgataagctcggagtcgcttgcgaacattaacactattatcacgcaggcagcttcacttcttggtgatgggggcgcagaggatgtgaggaacctggtcaacgtgattgcaggactgctggactcggatacggtgaaggatcttattgatcagttggaaccgttgctgccggtatagatatccctttacaaaacagtgattaggaccggtctaactcgatgaggtagaccctactagacctgctcaactcggatctcatcgacaagctcaagactctacttgacaatgccagtctcttgctcaccgagaaattcgcgacgaacgtccgtgatctggtcaacagcattgcacccgtaagcctcccctacaaagaaatgtaccatgtctgacatgtatagatcctcgactatctgatgcagctcatatcctacttcatcgatctgatctttggaggaggcggcggcactgggggagggagcaacacctcgacggacacctcgccaacagctacgcaaaccaggggttccggctcaggagccgcaagtgaggcaacctcgacaggcagctctgggtctggcctcgacttcggtcttggtctggggtcgtccggctctagtgacggagatggatctggtagcgatgagtcaacagggtcatcgggttccggctcaagctcatcatcttcgtctgatggcagtagctcgtcctcatcttcggatgataacagtggctcaggactcagctgggggtcctcttcggactcgtccgatgggagtgactcggccagtgactccagtgattccggtgattctggctctggctcttcgtctgactcgaacaccgactccggtactgcgacaggccctgatgatccagggttcacgggtgcagcgagcaggccagggcagttgggggtgacgggggctattggtgcgatgatcgcgatattcgtactttaggctctgttgacttgcatccgggacgatggacataagactcgacgatagtgacgtatctaaccctctaatcaatgtgacatgattctaagtctcgtacgatatacacgtggataattgataagaaaaacaaaagaaaatgcgaacttgtacatgaaacaaggacaaagaggttcctaaacataacacataagcatacaagacagaacagaactatacaacacttctgttcataatctgtggcagtgcagtcagttccattgccggatcagccggcacagcatgtaggctccctggattccgcaaccgcgcattccaactgctcctccgtgcggggtatacaagtggatggtgaaggtctgactcagaattctgcgtccttattggtcggtgcttgcaagctagcggacgcgcaagagtgagatcctggtgttttgcgtgcgaaggtgccatgttgcctttgcttgttgtgaggtatgctttttgtgaatgcctatttttcttgcgcaggacgcagatagctcggaggcgtggggcggatgctgttacaatcacaatcgtaacctcagtcctgatacagatactgtcaacatagtctgatactggctgagtgtgcgagcttaaggaacgagaatggggcgtacaagaagcagattgcccaaagagccagggagtgactgaattgaagggattctaggtgcttagtctgtgtagttcgaacgatagctgcgaccattgctctaggggacatcattagcctttttgtttcattgcagtgcgccatgaaaattccctacagcagactcaaagacagaatcaagctcagcaggatcttactccagcggcgtacattcaatttcaggaccacagcgacactgatgatgatcaggatcagatctgtaaaggcgtcgaatgctataagatagtaagttaagcatatatcaaccgacactggaagaaaaactataccttcctggaaatacccccagcgctgcagcccccttgcactgggacagtgtataagcacgactctggggtcccaaagccgttcgacagggctgcacattgtgtactgcaacacacaaggggtgatacaaaagatgagctgcaatacgatcaggagccaaagcaattttcgccgcaggttatgcaccgatagcacggttgccagcagaaggagcataaacgagattcggccacacatggaggctagcacaccaaaggacattccaatcatcacatatttgagcaagccgaccaatcgtccgtaatcgagggctgtcacgttcgatccgaggccatggtaagtggaaactgttaccagagacgaggcgataccttgtagaatctggttttttgtgggcgtcagcatgcataacattgatggagatctgttagaacgaacataggctccaaccatgacgaaatcgtcaagggcaaacctgcgcctgacggataattgcgaataaacacgcagcgccatgacgacggtgcagatgctgtactcaacccagatgatagcgtacagagaattctgagagattggcctgacgctctcgagcttctgcgcctcgcccgattcaaataaagcaggcagatacatatcagtttgagatatttggtggccttcgacaaagtggggactgtgcgtctgctgttattgcaaaacacgagcacagtagaaagggagacgtagagggttaatgcaagcaaggttggaggacgaaaacggactgaatcctgtgcacctttgccgggattctcgaagcctctagatgctttatagaagtgtactctgcgcgtctgagctgactaaatactacggtctgcgtacggttgagtttagagatcgagctgtagcccaactttgatccggtagatccgcggaatgatccctgtgtttctgggcactgaaagaaataacaattgggacactgctattggatacatggacgagggacctctcaattatcgctgctgagactggacgactcgagggggtgatggatacgcgtgcgcagcatctgagccgtgacagccgcggaagtataaatcgcatggaagcttgatttcgttgcactatgtacgcgaataggtaacaagtatgt

SEQ ID NO: 4450 - DNA, 1637 bp, Emericella nidulans
tttatggtattgacaaggatatccgtctcgggtcaatcaaaagaccggaggagatacattctatggatgacttacagcgagttagggacctacgaagcagaggagaacagtatgttatactgttaactcccatatgaccctaggctgactattgtttaacgtagatacctgcgttctgcactgtccgcagttgggacgcttgcaacagacattacacgacgactggactacacctactacgggcttctggagaaaattgcagctctcactatgacaatcgtctcccttcaggagctatcagatacgacgtccaaactttttgacgacttccagcaggagaccacaggcttagagcacgatatccgaaaacaaatcggtgatctccatgaatttcaaccccaggtgcagagaattgaggctttagaggaacggatgagagccagcaagacaagggctaaagcgctcagcaataggctggatgcaatgaggagtgagattgaaagatgggacaagcgggagatggaatggcaaatgcgaacaaaccaacgactacgtattttctggggcattatcacatcagttatcctagcagccctggttttcatcatcctccagcactggccgagtgaggagacatcgtctggctttaaagctcttccgagatccttgaaactcacaaataatccctctcacattcctcaccccaaggaaaacgacgcattctcaccaagctcgaggagcgagtacgcgatgactctagagtcatccaacctcgatggcacgacaagtacggttcagaaagatccatctacatcagtcggggctgataaagctacaagatcggccgattatgaccctttacgaatatttgatgaattatgatcaccaattgacgtgccatttgccatgaggtgcctgtttaacagcagcgacgaccagcgagctttgcataacactttagggtgttcattatcatgattatcttctgtaaaggagagctctagatgatcactttaagcttcagctgtccccttcttcttctttttatcctcgacaatctcgatattagattccgaaattcccttcccatagttttccaataaccattccttgatgtcctcacatacatcgccttgcactgtgatctcctcaatgccagaagcagacttcgtgacggacgaacctgttgcaaatttctttcccagctccttggccacctttctaattctttaatccgaaacttcgagtcctgtaaccacacctgcttggttgcccttgttcgttcgacacgctggatctggacctttaagtcgcttgacgttttgaatcccgcgcttccgccgcggcggctttgtttcttttttggggattccttggctggccccctgaccgagactgccaaatggaaagttgccctatatgttctgcagaaaggctcggtagtttttcgtggacagtaaaagggtatccccttcgagataaccctggtcctttccacccgtttttttcccctcctgcattattccgctccccacatccatcttattgctgctacctccccaccaactcgcctcctcgttttgacacggatcctttgcactccactctcctaccacctgtagccgcgccagctctcc

SEQ ID NO: 4451 - DNA, 1899 bp, Emericella nidulans
aacactattaaacagaggtggcgttgtttctttccatctttcaagttccgaagtgattcgcaccgggcttcgagatgccgattcccggtgtatgggattgacggtgtagaactgacgcgatatctcaccgagaatgcgtccaagcctgtatcattagcagtgtttaatgcaaaatcataagcattcaagggcgaacctaaagtgcagaatagatgcaatcatcatggaatctgttgtgcccaggcgcatagctggatcgtcttggagaatatcctcatcgctgacttcatcgggaagttcctggtctatatcctcatcatgcaatagccgcggccgtccaaagatgacattgagatacttgtctagtgtataagcgctccagaggatccgtttgcggagctccctctccagatatgaggttccctttttcgacattttaggggcacaccgtcgatgcaggccgagagctgtcaccaactgaacggcagtgccaaatgtataccagcattcattggctcgtgaagaagacagaaggtaaaggcattgccccagtcgtgcttgaacagtctcgaggcgcgggggcccgaattccatcgagagcatatatttcgaggccgcaaaccaccgttcactgggttgaataagtgagcatagaagaataggttagaatatgtatgcctacctttcacacgaactttccgcctgcttcccctgagtttgttctgcatgcagagtacttacggcaaagatcataagaattatcgcagttcgagccacaaacggtcccgtgggcaagtttgaaggggatatattgcaattataaacttgtctaagccattcctccacgcttccacgatgaagaaagcggtacgtgaccattgcgtggtcgaaatacctgctcaccaactccatggctttatcaaacgtaggaagagtaaagcccgcatcgcgataacttgcgtacggcttatcgccaaacatgaacacagaggtgttcttcggtgacgattcatttcgcagctcatcaggaacagcgcttgtctcgtcctggtgcagacgtcgccagacgcgatttagaaacgagacgcccgaggcaggtccgagatagttgccttcaaaatcagtggctactggatcgggagagttacgccgtggcatttccacggacgcttgtgataattgtgagcgcacagtctttgcagtccgcgatgaatccttattcggcgatgattttcgcgaattgggactttgtgaggtggaggcgtgcgacgaaggccggtttctcaggtacctagcagccactgacgcaggcgctggaggcggatccggagcaagcctcgactatacgcggcattgtattcacaggcgagcgacagcctagtacatctgccgcagggcagagttccggtacatcgggtctttttttccttgcagctatcacaggcccttgtgatcttctgcccggggcgctgactttactcgctgacggctccaacgactttctcttccgtcctgggagaccccaaactgctcgccttgtgtcaccaaggttcgttccagatggaggctcaacgtccacttgctccccaagggtgctagccatcggacgcggggaaatcagccaagacttcaaagggcgatctgtcacagtcgcgtggcctaggaggtggatttccgcgcggctccacgttttgctagggtaaggcagacagaacgagtagagagctatgcgacaggcctgaaggcacgggaagtgagcaaaggagaaaaatccgagtctctagcggattttgagtcatttgctagtccagacggactttggggccaacggcttgggcgcgcggggttggagacttggagtcgttggagccggtatgcagtcccggtccaccaccagca

SEQ ID NO: 4452 - DNA, 4711 bp, Emericella nidulans
tccgaattaacacagcagggaaactgaaagatacctaacagaggaccgcgggaagtttttacatagctttattcgcatcatcgagagttgatccgccctatgacatcggcttgagctccacttcgtgtcgatccactttacacactgaacgatggtaagtcaatggacgtgcttcaagcgtctggtatctcatttctatcctgaagtttgtaaaatcctccatattaatataaaacaagaacgaaatatgtatcctcaaatctatgctagaagcagcgagatatgctgctacttcgaggttatagctgccatccacttctgctcgtccgttctatgccagtcagtaaagaagtacaggcagcatcctaagaggcgacttaccggtcaaagtgcagaagcatccccaggacgggaataagctgcttctgatagttcttgtctttctgttccagaaactggaggagcacgttcttaagatagatgtagtcgatgccgccagtcggtgtatcactcctttgggtggaagtgctgcgcgcctttggaacaggagaagtaacacctttccgggacccagaatcaatagacgaacgtgatgactgcggattcgttccaaagcggctgtcttcggagagcatatttgacttgcgtattttctctaatcgcgagttcgtctgctctactgagcgacgtaattcagccttctctttctccaggtcacggacgtttttctcgctctcatccaaagcctcgcgtaaccgagccatggcttgttgaacgtcgtggagctcctgaactgctgtctcagcctgtgcctcaaggtggtcccgtttgcgtttccagtctttttgggaatgctccaactcttccttgtcctcttctgcacttcgtagggccttctccaagtcccggagcttcgctttgaggtcttctagctcgcgtgctcgacgtcgaccctgagcgcttgcttcgtcttcggcacggtcccgttcttcaatggctgcctccattctctctttgaagtcgcgggctttcgcctcggcccggccttcgatgtcgttaagtaggcgcctcatggtttccccttcgcgagtccgttcgctaagaagacgatgtgcatctgctagttcctcttctagactctcgcatcgttcccgagcttctttcatctgcatgccgagctcggatgcctggtcacgcatgctgttcatgagactttgcgcgctagaatgttgagctgtcttagctgaatttcgtcccgcaatccttcaagctccttgttaagttgagatgtttgctgctcgtattctcgtagtcgtgcccgcgctgttttcagctcgtcttgaacgtttgagagttccgacaagaccttctgtttaccctcgatggcttcttgcttcctgctctcaatatagcggagatcggactgagcaaccgtcaggctttcttccgctttcaatcggctatccagctcttgcttgatcttttgattgagagtcttcacttccgtttcgcgatcggagatcgaagtcttcagtgccttgacttccgcttgcaaatcgtcatgcttgctttccaaagttctcagctcagcagtcttgctcttcagctcatctttagttgacctgagttccgcgctttcgcccctcaacttcttgagttccggttggatcttttggatggactcgcgcaaatctgttatatctttgaaccttgtagtagccagttgctgtgcagcagagagttctgtttcgattgtcgtgaattttactttgagactctcgtattcatccttcaaatcattatgagctttctcagaatccgccgactttgcggcgttattcgagcgaagatccgtaatctctgcctccagtttggaaatggtcccttctaaagctgccttttccgccacaagctccttgattttgtctttggcttcgacatgttcctggccgatattaaggaggtcatcacgcaaagactctatttcctccttcaaatcttcttcgcccttcagcctggaatcaagtcgttcgatggcttgttccttctccctgagttgttgctcaaggtccgcaattttcttctcaagctcagctagggctgaactcgactcggctggctgagacactgccggagcggtttccggagtagcagtttctgtgagcttactgttgtcctccccagctttgccgcccttcttcttcttcttgctcttcttttttccagctcccgtggcagcagtggcgttggcaggctgcggtgtggtttcaagcttctcgtttgctgcctctgagccatatgctggggccagtgtctgttgtagttcttcgaaattaacttcctgaccgttagcgaccttttccttggattcctgccatttcacattatcctccaagttcccgtcaaggaagtcaatgaccttcttcagcttctcaaaatcttcagttttctggtccatatttgccttaagacccgacatcgtatcctgagtttctttgagctgggttcgaagagtatccactagaccttgtagtaccccaagccgcttctcattggcctccttttcctgcttaacttgctctaattttatcgccaactctgcctgctggtcagcatcttccggtttactggcttgtgcctgtagctgttcaatttcagctgccttctgcttcagctccgcgctaagcttctctacttctgcattggtctcggccacggcggtttctgacgcttcaagcttggatttgatttcgtcaatctcactttgctttgagatcttgagatttttcatctccgcttcttgtttatccttgaagtcacgcaactctgcaagctctcgggtggcagattcgaggttatgaaccataccctcagtcgactcacgtgcaactgataaatcccgcttcaaggtttcggtctgggctttgagactctcaacttcttcctgcttctccttcaactcggactccagccgaggaatctcgttgtcaaaggaaaagaactcctcggcctcctgtttgatttccttgtgagactgctctggttttgaagtggcatctttgctatcatttgattgctcttcgccactagcggtttgtttgagacgatccagctcttcccgcgcggccttctcggatttcacagctgtttccaatttgttcttgaactcgtccctttcagttgtgacccgcttgagctcctccgctactaggtctcctttgagagaaatctggttgaagtattcggtcagcgccttgggatccgcaattgaggtcaatggcgtgttctcccgcaaggcggcttcaaaaggttcaatcgataaaacgcgagaatgggccgctcgatatgctttcaacagctctatgcgacgcaaatgttagcaatgtcgtaggcgtatatagccgatacaaaacataccctggtaacgcgattccatcttgttcagccgtcgcagtttcgctttcacctcagacggtagctccggaggctgatttgtttccgttcccggcatgctatccttctcgggtgctgcgcttgctgtgccctccgcctgtccggcaccctctcccggtgtattctcaggtatgcctgtcgactccggccggggagtggctgacctgcttgacgtatcatcgtcaccgatagcgaattcctgctcaaactcggtgggatctggtccgcgtacaggggttccggtatttcgccgggggcgtgagggccgtctactcggagagaggttgcgacccggcgggcgacgagcggagttggagcgggctagcgactcctgagatgaacgttgtctagcctgctcctcggcgatgcgcgaatctatagcctcacgtagacgctgttcaatcacacacgtgtcagcctcagcgcccgtaaagcgtcttcgatgcggagaagcagtaggcaattaaaaaggtaaataaccggctaggctggcgaactgtacctgaaacatgactgtggcgggcctccgggccaaggccacagctgactctaataacgagatacaagcgaggaaaagacggaataatacaattagagcgagcagcaagcgaaagactggcaggaggaagagcatcagctcagaccagatatagtacagggaacgtggccgggcggagaaaggctggggtggcagaaaacgagtctgcctatttatcccaacggtcgacgcagtcacgcactcgttcatctattcaatctatatgagagctataatcctaatctactctcatattattggcgccaggttctagcaaggtccctaacaagttcctggagttgcttgctggattgaggcctggagaatgtagatgactgttgtcaagcactacatattatggtctaccacaagacatctgcaggacttgggatgttttagtgttgcgcttcaggaaaagtaaatgtagctccattgaataaagccatgacgcgtaaatcgcatgctatctagttctctacgcttgctatcagagaaacgcctggtttgatatcagccgctttttgtatgtggtgacagtaaaatcatgtgagccgcacccagctgaacttccgatcaacagcccacggtggttttccccctcaacactctactctctcagactcttcaggagatgcaagtaatttaacttgcgtctgcttcttttacaccgaccatctaatccagcataatcgaacaacgcgctttggccttttggcatca

SEQ ID NO: 4453 - DNA, 4132 bp, Emericella nidulans
gcagattatcgtctatgcgcgcatcttgttcaacagagttgacgacagtaaagcgcggaaataatatctgtccatattagcatgtctccctagagtgaagacaaaaaggagaaggcttaccattacagtactccccagttgtctcatccttgctgcaagtttcattgaaacctgcccacatataggcaccaaacattgtaggagaggcaccacgactcattttgtaaccggcgcaattccgtgctacagagtcatgccattgctgaaggcttctgccacagcttgggtcacaaacagagtccgtcaatgtagcatttcccggcgagcggtgatagccggattttgtcataagcttaacataggggtgacacttgaccctttcttttagggctgtcttacaggagtccggaagttcgagatgatccaggctggaagtgctgtacagggtaaagccagcaaactctcgtcgcccggcagtttcctcggcgcctcccagccaggcgaggatagaggaaagaaagccgttgacattgtctcgggcgtaagttgggactccattgaagggagagaccatctcaacaatggctttggtgcagagattgtgaatccagatgtttgtgctttgttctatttccagtcctttacgctggcagttgttggtctcgaggcaggtctgtgagtaatcggagaagaagctgtaaaatccgctgcctaacatataaatgttcgacgagtcgataattcgagcagcccacgacatggcgcatttcagcttgttggtcgtgcagtcgtcaaaagtaggatcattggggaatctcccaggagtaaaaggctgcggagccagagggactggctggtagtatggggattcagtctggatcatggccaggagaatattctcagctccagacagctggtactgataaagaacgttgtgctcagaggacgtcccatacagccaggcctgtttgctttcaatcaagataccgcgagccgagtaaacgtcaatctgatcctgcgattttagatccaagtcatgatccgcgacccatgcccagatattttcgaggtagggggttgaggttggggtcagatgtaacaggggggaagcacctatgcaattggggttgacgcttcctgtctttttagggcactgatgcttccgaagcctgaattcgtatggcgccgtcaatactgatattctaaatccacatggggggcgaacctgtggtccattgcacaacgttccattctaccacaactgcaccagcggttgaaccggcagtattaaacagcatatcctggatttcaatgacacccgtattaccagggtcgccaaccttaactgcaacatggggactattaacatcctgaaacttcaggcccatggccataatttgaggccatgcttgtcccataatacgggatccaacggaaactttgagggtattattcattgcttagacaccgatacgggaagtacaccaacgaggagagattagccgcatatgaaagaacccagttgagcatcacagtatcgtcggtgactccatcacccttgacgccaaacagcttcacattgacaatatcctcagtcgcaaggtcttcgtactgtggtctgcggcgagtaaaccagttaggcttgacataggcctgagttccagtcattattgccgttctgctcatgacagggatatcagcgccgttgacaaaggtgctaaccccagaggcatcagtaacagtgccgaagccccacgagtctttaagcacttcgtctcctccggcaaggaggaccttgttcatcacgttgtcaataactgctgtcttgacgttgaagaacccgacgttgtgaaggaggagggaggtagagttctcagcatgcagtgatgtcactatgccatttggggtattggcaataattgcatctgcaagaatcagagacccaacgccttgccctgtactcaaggggccaccggcctaatatcattaactttcggcggaagtgaaggcgctgaaagcaaaagagtatgtactcaccccaccaacaatagtcagaccgcttgtacatgactcaataacataatcttgcattgtccaggcccagtcccagtgaacttgcaatgcagttttacagttaacgaacacgagctggctagtcgtaaactgttggttgccaaaataagctctgcagccataaattagcgcttcttataggcgaaaatgaagtatcgtatgaatagacgcgcacccaaaattaccacccacaaaggtgagatcagccagaaaacctccagatccattttccatgtatattccttgctgagtgttctcagggacatctgaattgtaaagcatgtaaaattcaatgttctccagggatgtgccctgtgcaacctgccagtgaattccacaaacatacgcggatgggtctgtgagtcggatatcaatcttgaagttcttgatgctgcgtaggaaattgttttgattgaggtaccactgggcattatcgccaacataggggtccgaagtgataacacctagtccaacgaaactcgaggcagccagaattgtcggcacgtttaatggctggcacatattagcgacgtcccaggaggccattatggaatactcacgtctccaatgaactgcgtgttatagtactgaatgattgaggaactgacaagatacttgcctcctggaaaccatacgactgctggaaatcgtgtactagagccgcagttctcaccacagcggcccccgtctgagattgctctgttgatggcttctgtatcgtcagttactccgtcaccttttgccccgtagtcgcggacatttctccagatctgtatgttttatatttttaaacaccgctaaagatgagcccttagacagattgacataccttgtagtcacttgtcgcgtatgggctcaggccattctttttcatgtgtggcatccaatattgggaaggtgcgcgctgctgaagagtattgtctctagcgccatcctgggtacttatagatatattcgtcggctttgtgtttgattgataatcataaagtccattggaatggataattgcctggtttggtgtatttgtgtaccgtttgtctagtccgtacttagtacgaatcattgccgccacgtcactgtgattgccattcggtatgttgtctgtagattcggcgacagtctttgccgctttcgccagctcaggtgggatagagtaaggttggctaccgcgtttggaagcgtctgtggagtcatcgcgtcttcggagctgcgcctttcgaaccgcctcggaggtatatggcaaaggggtagcggttgcagaggccagctagcgagtatcagtagctgtagattcaggtagctctgagataggcagaacaaatagccactgtacctttgtttcgtcatcctctcgagtggtatataggttgaagttagggtattccactctttccttgttgacatgcgctagaactgccaacgcatttctaaccatagtttcgggatcgtctgggacatcctgatcaccctgattctgggacaactcagatttattgtgccgacgatcatggtgacggtggtggagatggctgtgggaggctcgggccgtgctgatgaacaggcaaatggcgatcaccaagaagatcgacagaacttggaaccacgatactgagactttggctggcctcatcgttttgttgatgatgagtgagatacggtagcatgaacaaaagcgtttgtcccctgatacccagcccacgggacctcttaaccataaaattggtgtagtcttcagtccgcacaatcaccgaggatggtaccgcacgggctcagctgatcgagctagaaaagccagatattccgggagaggaaaatgcagtcgaagcgatagcttttgctttgattagtgataattagtggtagcactagcagttgacttaagacatggtttcccataagcgatgtaacacgggactgtttcccaaagtacttgtccggccgcaattcttaaggtatatttgagcagcctccttcctgaaccctagttctcgcggtgagccagaagtgccaagcagcggactgtgcttggcattgctagttcggctcacgaatcattgtt

SEQ ID NO: 4454 - DNA, 4547 bp, Emericella nidulans
cagctagcattgatggtgtgaatcgtctttgaccaaacattaagtactgtatcgaccgccatagatgtgatgcttcagcccgggaattgacgatcatataggatgtggtctgtgggaggctctgactccttcacgcaaacggttagctgaggattgctaatgcaagagatgtcaaagagagattcaagacgatcaaaaagccatcacggatccagcttgacatgtctgtgatgccataatctacatcatgagccttgaatctgatggctccggatttgagatagcagagggagtaagtgctagttccaccttctgttgtggataaaatgggcacgaagttgacgatattttaagaagaaataaaatgcatcaataccctaagagcaccgggtagtgactgctgttgagcactgttgagcaccgaagacgggagtgtttatgagatggactcgaaacgtagtcgtggcgtctggagccgatgacgttgctgggtcgtgtggtactagccaacttgggcaggatttgtattttccctattgtatacatataattggaagaaagataacagttggggctgtggtttagtggtataatgttcccttagcatgggagaggtcctgggttcgattcccagctgctccacgtattttttgcacattgtgcgtccggaagtttcggtgtcgcctcacggcacctgtgcttagaccctcaggagtacaggaatggtttacacatttttggtttctgttgctgccgagcttgagtgatgtcatcaatgatactgattgtgactgtattttatcgcaaggagcggactgaaacgtgcaaacataataactcatcccctacccataatgtgccttaatggagtaaatctaaggggagacaccactacctcctcctattgccataggcactcagtgctttacttaagatggctaacccggagttctcagcatatgtaagataagaatagaaccacgaattgccggggggtttctccgttgcattcttcgctcgggccgcaaaaaggttattagatcagcccccgcgacaaatacttggacctcagaaccaactctttctctctcattatcacactctcttctgatctcacttagcttaaaggaccaatgtcgcgaccttcatgactctggctccgtcgaagcgagtcactgtccgggtctggaccctgattgacagtcaaagtacgttcggagttcctccatgcttttttccagtccctcttatctccgatagttcgatggagattatgaattaccagagagagattcaatgacaggcgattgtgaaaaacaaatagcttactcttacttcatccaatagactatattcgtttttatagatgtcgctactcttcaaccacgcaggcagcagagtcaacgcggaccaccaaacgacgcgaattccacgactacttcgttacgcatcttccttcatcctcgtgtcatccagacccaaggggccccttaacatcgttccataaacttcctcggtcggcgtccgtgccccatactggagagtccacacactcgccaacatctttccaagccctaactagtcgagagacaacggtagttcggattccgctacgcagcgcaaaacatcattttggagcagcaacctcacgaggaactcgcccttcaaatgaagatacctaccaagccggagtgattgatattcctgctttcgcgaagcggccgcctgcctccctaacgatcaggaaccggagtgcgcgggtcgctggtcttcgcgagaatagaggtgcggacagtgcatgtggcgacccccaagtgttctattatggcattttcgatggccacggcgggtcagaatgtagtacattcctaaaagaaacgctacatgaatatattcaagatactgccgctgaattcgagctgcagtcgagtttgagaaaggctggtgagaactccgcgtctccggacgctgagagcgagttgcccattcggcaaggcagcaacgttgcgcgggttcaaaggttagaaaagtctctagtccagagctggagaaatcttgttggagggtactttagaagatttgtacctccgaacttctcgcacctcgccaaacatactgcagaggaatcatcatcagtgccagagaataacaagggggtcacaattgaggagattctggagtatgctttcttgcgtgcagacttggactttgtctccgcccaagcatcaagggaggatgacgagctgagcaatgtctgccgtccgctttaccaagacgatattctttatggaccgagccgctcacagtccctaaacattgctggcttgagacggttcaaaggtggaagcacggctagtactgtactcatttccacgcccacgcccgcacccttctggcacccagcaagcccatctagcttgctggtgtcgcatgtcggtgataccaggatactgttatgctcaacagtcaccggcgaggcaattccgcttacatctaatcaccacccatcttctccgattgaagccaaccggctacggcgatatgccgctacgtttgttactgattcatttggtgaagagcgcattagtggcctagctaacactcgtgcatttggcgacgtacaatcaaaacgaattggagtgtcggctgaacctgagctccgtcgattcgagatagcccccgcggagtactcgttcctggtgctaatgtcagatggtatcagcgaggctcttactgaccaggaagtggtggatatcattaaagaagcgaagactccagatgaaggggctcgacatgttgtcaacttcgccactgaagtaactaggaccggcgacaatgctacttgcctcgttgtgcgactcggcggctgggagcgacgattggaggggggtttaggaagtttgggaacaaaagaatctcgcgaattccgtcgacaagaggctacagatccgcgcaggtcacggagatgacagagacattgtatatattatgtaaaattcgtcttcaacatctttcgttggtttgcaatgcatgaactgtacatagtgataatactactttttcctttctctgaggtgatggcacatgcgagctgtctgaaggtccagaatgcttaggagatgagtcctagtatagatccgagcggtggacgttgggctaaactatttcaatggcttgctatgtgaaagactgaatctactcagtgctgcatgcgccgcgtgtgaattaacatatgatcgcttttcctaccaacaaagctctctcgcttctgatgtcccctttcgcatttatctcggaatcaagaaggaaccgagccctgtcctattcctgttgtcttaactgaagtcttgtcgcttcaattctacattatcgagcctatcgccgcaaatgaaagttctcggataagtttacaatttatctgggtcctgctgacacggtacttcatcaacaatatctgaataagctccggtgctgcttttttgtttttatttttattttattttattttattttttttcctctgctaacgtccaggcaaaaatttcagaccctcatccctcgtgctctgtttccttaaacgaaattatagcagcggtgatcttgttattagcaatcgcacgcgtgcagtgcccagggcgggatcgcaatagtggtatgtgtcggacaggccctccaagctgacagtaactggcaatttcagctcagctcttgctcgccccggtggatatcaacgggacttattcagagagctaatgcataattcagtcttcagcttccgatccagttcatacctaaccggttagaataacctgttctcgaagttgcaaattgtccgcggtggaagtcctcggataagaggtttctcccctttttcaccacatcatcgcgtcgtaccacctccctttctaagggccaccgagtagcttccagaaaccagtccgatacttccgccccctataaaatatgagcgctcgtaccagaaggcagaaggccgcgctggccgctcaaaccgaaggaagcgacgacgtatcgtcaacgagtaacggcactatacaaagaccgcccaaacaaagcagatcagcctcgccggaagatgacggagtgacagagaatgtatacctctttgctccaaatattattggtaagaaacgcaatccatgttgctggtcgctgactcccactgacagcggaaatttcataggttatgtgagagttgtcctggcgattgcgtccctctactatatgcctcttcacccgcgaacatgctcgcttctctacagcgtctcctgcttgctggatgccctggatggatatgcagcgcgttattacaaccagtccactacgttcggcgctgtgcttgacatggtaactgatcgttgcacaactgcttgccttcttgtctttctaagttctgcctggccacgatgggcgctcgtcttccagtcgttgatctccttagatatggccagtcattacaacacatgtacgcgactctcagtatgggcggggccaaccagagccataagaaaatcgatacctcgcgaagc

SEQ ID NO: 4455 - DNA, 1155 bp, Emericella nidulans
ccagcggagatcccttgctacgacagtcaggctcgcggccttctttggaggataatacctacagtcacgatcatactcctgacatcgcaggacggcgcgaggttcggcaaagagagacaaacgcaccgaacccatgccaggagacagaagaacccatgctagacaatattagcgataaggctcctttgtctccaccagcacatcggtcttcttttgatagcagtaacaatcaacgctctcgcggccgtagtatggagctcacgagaacaaagcatgtccgacgtccccgccaccgggcatcaacacaacccctgcagatggcagacccgatgttcatctccatatcaggcaaagagttctcgtcacagggtaacggcgggagctcacgttcgtcgcttgaaacttctagtcgcgatcgcagccttaccctcccgggaagcctgccgcagcaaccgaacgacaatacatcgaccaattctcttcaaacgacagtgagagggtcagttccagacacgagatcggtagcagtcaccaggctcacctctcttaactcgcacccaccatcgtcggtgatagagcgggagcatactcgaagccagagtttggatgtgaaccaccattcgggtcctccggctgttcctcggcacatatatgcgtctctccccttacctaggatcagattaccctctatacattctaaggcagatgcggccatggcacaggccacggacgttgggggggcaaatggcctgtctgcatgtacaagcttattccttacaactgggccggaggctccaactcctgctggatttcctcattgggaaccacagaccgaaccttaatacgaagccgtgtgtacccgcctggactggggactggccctttcaacaccagctggtgtttctttggcagggctaaattccaatccgttttcacatcctttcccccggctttaacctaacagccaaaaccgttatttttggctatttcccatcaaagttgccccctccggcgtggattggttccgataccttcctgacattcttgtaaccctgagcaatcaaaccgaggatttatttaaggctaagtaaacattcgctttatgctttgcccttttttcccctttaaaaaactcatttcctaacccctagataa

SEQ ID NO: 4456 - DNA, 6175 bp, Emericella nidulans
  unsure (1)..(6175): unsure at all n locations
cttgctccgcctctatagtcccggcttcttcctcgactgtgcatgtcccggtctatttcctggtctgataatagatcccaagcttaccactgtgcttatttctcctcaacgcttaccctcggctgttcgccttcgagcatcattcgtcatttgatcgcgtgtcttaccttcctgcgatgaatccaatttccgcgccgtcgagtcttcttaaccggcaatagggggccacccgtgtttgactcgtcggccggccgaaccgaaaccagacaccatggcgatatggccgtttggtcgcaagggcaagcggcacaccatccaggcggatgcagatgttcgggctggcggggatgtcgctacgtcacaaggccctcgtcacagcttcgacgagaggaccctcggcaggaaaccgtctcttaagcaatcgaagcgtctcacaaaccgctactcccagcctgtcgatgatttcccaagcgatctgcatccgtctgttcaatattctttgtccggcttccggagtgaacaaagccgacaggacaggacgcatacctttcacccttcatcgactacgaaattagaacaacagtcgctccctcgaaatccgtccctccgcaacccagttcgcaacagcgagaatcgtgcgacattgaaaaagaggttgagcaagcggaaggcatacgaaatcgctagggagcgagaggttcgaatgatggcgtcgatgccaattgaaattcctcgtcgcatcgctagcccctttccgggggatcccgtgtacattgacgaccggcgagccgttagtgcccaaagccggcgtctggacaggcatcgctcagatataagcctgtctattcaagagtcggctgcctcctcggtgactgacttctctgacacccttacattcaaagttaatggcttctctgcctggactcctcgtcccgtcatacgctatgtggaagctcctcgaatgccgtgctccagaagccagaaatctcccgagccagctgatcgaagagccaagtcgcctgcccttgaggtctccgatgaagacctgcgctccaaaaaacggattgatgagctggccaacgaccttgacgctgctgctttgagggagctaatggagagagatcggcgacggagggaaaggaaagcgcttgaagatcaagagaagcttgtccgcaaactgcaacgaaatgttaagaaagtacctaaaacgcaggaatcgcctgctcctcaggccccggaaacggccgaaaacgagcgcggacgagctatccaaaatattcaatccgagtctcagcctacagcccaagagacagaaaaattcttatccggcgaaaatggaggttcgtggctgcgagagccttctagagaccctgagcgggacggccgtgagacaccagaaagtgtgcatgtcattggcaatatcgatgacaggtcgattcgtgatcagaaagccgcccaacgccttagctttggcccctctcaagacatgaccatgtcgcgcagcactctctcagcttctctctcaccgtctagacaaggagtacatagtccgaattcgtcacaactctatggcatgacacgggactccgtgtctgatatctctaggaatgttggttctgaacggcgatcatccgaccacagtggatatggtaacacgatcacatccatcttccgccgcggcagctctcgcctcaagcgcagctaccgtgaacgcttcccgacccgaagcccaccgcccgagaacaacgtctctcacgaatcattcttcaaggttcatacgcaggcctcgccgccagctccctacgctggtccgaaagtcctgcttggatcaagttcatttaagcgatctcaatctaagtttaccgaacatttcggtgacgaacccctttcgccacctgattcacgccttcagtctccagagatacctgaagacgaaccacagggagaagaccaggttcctgacctgcattctgagtcctactaccccattcctggctcggtagccgatacccaaagtcgacaccaatcctgggtcggggataacgtcgatgatccggataatctccccctttctcagtccctggcatctgttgattcggaagggtcctggatgtctggtcaattcctgcgtcgtatctcgcaaagacacgccaactcggctcggcaaagcctgaactcctctcggtatagaccggaagagagccttgagaaggcacgggaagaggacaaccctggtgacagtacgtttgttgcctttggggcctatccgggtgaaacagctgcagcctgcagcactactgatgatcagggcaaggacttagtcggtcactttcagcctggacaagcgggcgaaacctggcacgaagatgtagcgagacggccagtacttgtaaaccccacgttgcggcccaagtcaatcgagggactcctcaacaacgtccaaactctatccacaatttcagcggaggatgaattcagtccgattgaagaacactctgccgaggtattcccaaccgatgctgacaccgccattcatacccaggcgcgcaatggatgatgatgcgccgggcagccactcacgcaatctcgccaaccgtacttttctttcttcagattgaaatattttaacaccccttttggagtatacactcctagccgctccttaccatttcctatgtcggaggtctttcctttgtccttctcttttctgagttgccggaactgcgtacctattcaagcacgaataggggctatgttcacggtttttttttttttttttccttcaagtggaagcgtacctaggttctggtagcgctggctactttgttttgaaatgtgtttctatcagtttgttgatacccccgtcggcgagattttgaagagttgtgtcacccctggttctggcctggttttaaggacttttgatagacctacagcttcgtgctgccttcttgtcatgatatttcatgcaagtcactgtaattgaattgatctattacaaggatagtggttgctactaagcatacaccacttaccgtctcgtacacaatttgcattgcatcagcaactgaagtttctgcctgattaggcagaaagatcgctgtattccagaccataccgattgataagctcagaatcacgtcatcggttgccgctttaaggcccggtgggagaattggtttggtaagctccagccttccgatgccgcagccgaacccaacgcaaccgtacgccttctcacggtttcgtgcaccagctctatcatcagaaaaacaattgcctgacttctgcattgtataatatataactcatcaaatatgtcttccctgggattgacaaatcaggcttccactgtcctgcgcgctctacgcccgcgttggtaagcatgccatgccaccacccccattcaaagcacctagaaccctctactgcattcaccgtctttgaagccttttctttccgcaacagcgagcattagtcatccgagacggccgcgccaacgtcactcggggaattatttcgccaacccgatataaaccgaatctgcctgctctgcccctctctgcaaacccctcattccaagctaaccatttcgtcttccatacataacatagtcttcgtccgtcagccgtctcggtctcctctgccagatctctcactactcgagcatctaccctcactttcactgtctcgcgcccacgcatctccgtgcccaaaaactacaacagcttcgctaaacgcgccttttcatcatcccctaccgtcttctttcacccctcagccgcaaaaatgggtgcctctgaacacgtcccccccattacctcgtaggtctctcattgaaaaaaccccatttgccacatcaaatcaacgataactaacgtcattgtgactcacagtaaggccgaattccaggagaaggtcctgaacgccaagggcttcgtcgtcgtcgactgcttcgcgacatggtgcggtccctgcaaggccattgcgcccaccgttgagaaattcgcccagacctacaccgacgcttcattctaccagattgatgttgacgagctctccgaggttgccgctgagctcggtattcgcgccatgcctactttccttctgttaaggatggccagaaggttagcgatgtggttggtgccaaccccggtgcgctcgaggccggtatcaaggctctgcttgcttagatcattgtctagcggtcagaacgggattgtcccctaattcttgagatatgcaaatgttcgattattttttgctatatgcagactctggtctgtatgaaacgttactcatccctgacgtatcttgtttgtgaagtatgtttgtatatttcgtggcactctcgaatgaacgaaggatccactcggcttctcccgcagtgtatagcttcgtagtcatgctctgcggcatagaaagccgagcattgcggaaatatcagacgatctatgcacttatataagactcggagcatttatgcgctagacactgggagggaacgccctattgacgacgacccatggtagaggtttccgctaccataaacatagggagtatctcgacgacttgcgctctataacatagactggaaggtaccccgtacataagcttcattactgaactaaagtcttcgcttgagccccccatatgacatgtacgtataaccaagaaatcatatcagcatagttgtaaagcgatgctactataatagaacatatacgccaatatcagcgcaaatcgattgctcatgtaagctcatatggagcttccgatatatgaggtatcctgcgtatctatgtgcaggcctccgcctgcaaagtagaataacaccataagtataatctaccgtagctagggaaaaaaccctcacagtaagcctccatcctccgttctccgccgatgttcaggccaccggccatattgacgacttccttccggagacctaggctacctacttcctcatgttggcgtgataccatgaacaacccataagcagaaaaacaatcccatagtagacggatcaccgaacggactctccctatctggcttctctatacgagagaagtcaggatacgtgtgatgtagtgcttctattttggctccttacccaaaaccatatagatatgtaatatatcttcgtagttcaaattggtactatattttctgtccaagagtcctgccagtaattattgagtatatgcacctcctcactgcaatggtactcccagataacagctgttaatgtctcctcttcccaaccagctcaaagcccattaagtttgagctggcgtaccagacagttttgtttttcttgattgttgcggtgtaattgtggcggagatcaactgtaggaaagtattcatactataatggatatataaaggatatatagatttgtacggagtaggaaaggacgatgatatgcgcgggtgcattaatagttaataattaaaaattgtgcccatcattcatttatgctatgcgtttctatttaaatgaacgtcgatccccatctttggtcccgcctttttctaacaggctggtaggctacaaaataaatatagccgtaaggagactctagtactccgcctaactccgtaaactaccagcggactgtataaagaatacctacctcagtcctgagtgacccagtcgcatcgtcccgatcccgtctggtgggtatcacaatcacctataagctgttctccttttcttcttgttatccgacacccagttctgataatcgatcgcatttgccacgaccagattcaggggctatctaaccaccaaacaacagtgctgttagcgtgcgagtctgccgtgtctgtgactgcaaccctaaccggcgattttttcctttctggttagggctgagccgttaatttattatggcctattacggaatacggatactttatcccaggcttctgggcgttacttaaatgctccttggccgctatggcccgagatcttatcactcttaatcttnngtaatctcgcctagaggcctcacctgtctaagcaaggaacaggcgtcagctctgtagattgagcacgatggtggagatttngatggaattgaatttagagatgagtaaatggaaggccttgatctttacagaatcccgaccaaaagaaagctcgttgcatgagacataacgccctgcct

SEQ ID NO: 4457 - DNA, 1542 bp, Emericella nidulans
taggcctccttcttggccttgtcgcgggccttctcggcgtttcgtttcttagtaagggcatcaggggttcggtgttcggtgagcgacttgttgtagttctcaatggccttgtcgaggtctcctagcttctcataggcagtaccgatacgtgtgaaagccttggcaatgagcttaaagtccgcgcggtgttcacgtccttcctcaatagcgttcttgcatgtctcaatggcaccctggaggtcgcccttttcgaacttggccgcaccaatgttgttcaagtatgtgacgtccttgttcagctcccatgccttggtgtagtgctcaatggcctcgtcaaactgcttcttcttgtagaagtcgttaccaatcttcttctcagcatcaccggcctcctgtgccttcttcttggcgatagtctcctcatcctcaggctcgggctcaggttcgggctccttcttcggaggggacgggcgggcgtcaggcatcggtacgtcttcttcggcttccgcagcggcgccggagggaccgccctggggaggagcgccaaagttcatgtcaatgccaagcagcacgctcataacctgcaagaaacgcgggtccttgatctcctcaccaatgctgttcgggttctgctggagtttcttgagcttgttcatgaagtcgccgtcggcaaggagggcggaggtcttggggttgctggcgagtttctggaacagttgaggatcgttgaagatgttgctgagaccgcccatgggatcaccggtgacaccgtcagcctgggcctcggcgttgatggctcgcttcacggcatccagaccgctctgggcttgtgtgttgcctggttcgagcttgagtgcttcttcgtacgcatcgtgggcagccactatatacgtcagcacagtatagacaaaatgatgggctggggtacaaacatagatctccaattccacggtaggcagctcccttgcgctggtggcccttggaccagtctggcttgatctcgacagccttctcggcgtcggcgagcgccttttcgtattcctgttgggcagcgtagacggcagagcggttggagtacaggacgtggttgttggagtcgagctcgattgcctgagtgaacttctcactgctctgatcagctgcttgtccaagcttgcctctccaaagcggggtaaacgtacacggcagtagggtagtccttagcagcgaaggctttgttgccctcggcctttagagcgtcagccattgcgtgagacgtatgatggaatgacgatggaaagtgagctgtaatgtgtaacaagcgagttgactgacagcgaagcagctgctgtaatattcagcaccgccgagcttctggaaatttccgagacattgccagagcgccaagccagccgtgaattgagctcttcgcgctaatccttttatggatagaccacgctaagccagaaagaatttctccgccaaaaaacatctttggcttcagtcattcatttcgcagcacattttacacaacaaaccagcgggatcgctcagtctgagtct

SEQ ID NO: 4458 - DNA, 1731 bp, Emericella nidulans
cagcagctaataatctttccggaaactggctcgatggctgactgaatatcggcagtcgtggtcccgggagcgaaattgctcccgatgacaacaggcggtgctgagctggcccccttgatgttgattccgccggcgttgcgtactgtagcctgaccattcgcggagttgattgctgacacgaggcgattttcgtcagggcgataccgacgcgttggttttgcgctcgttgtgttccgtccggcggccgcggaggaggctctactccccgacttggagctgagatttacggatgcagagcgctggatacaacagataaacggatgagcatgtttccgtaggagaagggcatgcaaaatgcaaattgatgaattcttttacctttgtcacaccaatccgactcgccaaactcccaccgggcgtcgcattttgcgcctttccgggcccaaagccaggcgcgctggccctcctgttcttgcctagaatctggttcgcgagctcctcattctttttcttctggcgacctgaaatgaaaaggtcgtgtaagccggggggctctggcctgaagaatagaagtgcactgactagatttaataatgtcgtcaaaggaaacggcctgagtcgcagccatggcggagagacctttggaattgccaagaaaggtgctgaagcaaataaaaaataacagaatatacaaaatctgcagatagagattatgtaaatttaaagtgaatttgagttgtctgtcagtgtcggtggcagcaccaaagagttgcacaagggaagctggcgtcggctgcggctacggctgcgtcttgtctaccaaagaaagttcctccttgctctatgcgctttgcccaacccaatctatcgcatctgggtgctaaactacacagaccagcagccttgccttatactttgcagattataggccacaataggtaaaacccctttttatctttccttacttgccagctgacttagctggcttatgaataactgctcctctagatgccttcagatctcaaatggaaggtgcaatggagtctccttgcacggtggttcttgcctttgtccgactttgtaattcgacttctaccagacagctcttctcttcttatgggaactcaggctgaagttcactctttctgataccttcaacgttgagactttcgatttcctttagatttaacactttccatatatccggaccttattgtttcacttgttgtgatacgaattctctaggaattctctcaagtttctccgtgagtgatgggttcgtcgtcggatgattctgatgatgtgcgtattggcgattcattaagggataggtacgtcttcatgaatatgttcggttttgccagagggtctaacgcgacagcgccagaccatcaaggcaaccaacgctggtttcggcatgtgaggaaagcgcccattatccggttttcgatccagaagacccggagcacaatccgacaattgagagaaacgggtgtctacaggatgttgccatgcagtcggaataccctaatgcatccttacgctggatgcgaggccttcctcgaagatcactgcggcaagctcgctatggtatccaagctctgagaaccggtatgcgaatgtcttgtaggcgaaccggccaaatcagcgctggactgtggtctcgccctgattccccagggagttcaaacgacccacgaaatcaacagaattcatctacagtatcggagg

SEQ ID NO: 4459 - DNA, 2864 bp, Emericella nidulans
gcaatgggcagcacatattgacatggggcttacaggatatacctttcaaggaatgcacaataagatcgacagatccagcttctaggagatcctcgagttcctgtgtccataggtttttggtggtaaagtctcgaagcgcaatggttgtgttctgatcaccggcggtctcacgcgagtggatcttgaaggtataatctgggaatcgctccttgagggctgcaagaacaagatctgtttgcagaagggcgagcttggatttgcgcgtgccgattgtgaagatcttttgagacgcggggtctgcggatggaggcggggtttgagttgtcatcttgacaattgaacaacgggagtaggaaaaatatattggtgcacgataataagagatgcagttctggttcccttcaggtatcacaagaaccgagggaaaaggcaaatttgagaagtagaggtcccaaaaagagtaggttaggaagccaaatttgtgcctgtaccgtataggctgagatcggaggcggttccgctgtagaatgcattacggccatgtgcttttgtgacgcggcattacgctacatacagcgggatttcatgcgatacatccccaatacgcggagaatccgaggtcggaggaattaggccgcagacgaacgcttcattcaccctttttgtctgagcggaaaagctggatatattattaaaatacaaggtttgattgaggacgctgtttctgactggattgttatcctttttccacccaggcctgctattaccaggacatgttatgcggagacatcctgacgtaacagcgaacctcggcttcggaatcaccttatcttcagatcatcacaatactgccccagagtccccgacggactcatccactgagttctggaacctcgcgccatcaagcttataaaaggcggtgcccccgccttcaaccccggcttcctaaccgtctacaccttcaaatctcaacctcaaccatcgtcatttattctaatacactcggcaaccgatttacaccgtacagggcagcctagccattcatgatgggcaccaacgggggaagaccaacgaaactatcattggttccactgcccaagggctctgttttactaccgggtgcgaccttgcgaatcccagtctcaaatcgcccagatcttgccaatctgctctcgtcactgttggatcgaacgaatgctatcaggcgagatgcgaactcgataacgtttggttgcgttcctctctgctcgccttatttgagcaaggatggccaacacgtcattgataatggtaccgtcgacgaagataagaaggaagagttcgaatctcttgaggccggtcaggcgagaaaagaggacctttatcgttacggtaccctcggtaaagtcatcggagttcaacgccgcgcctactcggaaccgcatttactagttcaaggtgtccaacgccttacagttcgacgtgtgctgagggagcggccgttctttgaagcggaatgcattctgcatgatgaaaagggttagttactgagcatatccgtctcatcatcccgggaactaacatcgaatggaatatatagaaacgcctctcaacgatcgagaaaccgccgaactgtttcagcaactaagacagctttcgcgagaactccttacattactaagatatacctcgttgataccaaacacaggaggcccccgcttgtcaccattgattgcccggaaattcgagttgattataaccaaatctgacttggcgcaggctggaagacttgcagatgtcatggccgacattgccgagtctggtcttgaggacaagcttcgtgttcttgcagcttttgacgttaaaactaggttggaaagagtggtcgatatcctgaacaagcagaaccaaataatccgcggcagtgtcaagttcaccactatctccacagataacattccgcctgcatcagtgctcgacattagccagatcgaccctcgaatccgtgacttattatcgagacgcggtattcccggtgcttcagggacccctccacccggacttggaggtcggaataacgaggcagatgaaaaggagtccaacgaacttgacgagctgcaacagaggctgaaagatgctcagctcagcccagaggctcagaaagttgcggataaggagatgcgacgactgcggaagatgatgcctgtgaaccaggaatatggagtaatccggacatatcttgagaatctagcggatattccgtggaccaaggtgaccgaagataaacttggcccggagaccctgaaagcagcgcgaaaacaattagatgacgaccattacgggctggaaaagatcaagaaaaggctactcgagtatcttgcagttttgagattgaagcagtcgacaaaccagggtctggagcaacaaatcagcattttaacgaaagaattagacaactctggaggtgatatagagaaggacataccgtctcttcccgaatcggatcgcgctgcgatcgagtcaaagctgaacgcgctgacatctaagcgaacggtcgacaaatcacccattctgttgcttgttggaccaccgggtaccggaaagactagtctagcccgatctgttgctactgctctgggccgcaaattccatagaagtctccctcggtggtgttagagacgaggctgaaattttgggtcatcggaaagcatacgtggcggccatgcctggcgtaatagtcaatggtcttaataaggtcgacgttgcgaaccctgtgttcttgctcgccgagatagctaagattggcgcccctgatttccagggaggcccatctgcaacaaaactggaagtgaaggaccctgagcagatccaaaccgttgttgaca

SEQ ID NO: 4460 - DNA, 2157 bp, Emericella nidulans
  unsure (1)..(2157): unsure at all n locations
agttgaggtttctgtttctgtaccttctttaagtaagcagcgaactccgcatccgtaagccctgaaagccagggtccagtgtgtctgatttgtttaatgtcgggttgatcaatgttttcgctcgcctccgtgttgtcgacatcctgatcaaaaacactgtgatgtcttgtgaccatgttcgacgaaaagtgtaccttcgcagggagggagattggcatatgtaattcttggaatttctccagagtcacggtgtgatcggacgcggactcgaagtcggtgacatgttcgaaggtgtctagttcattgatcctgacaactggccttgaagacttctgtgatgtcgacttggcgggtagcggtctcttgagaccccaatctcctctcgctaatgacgatgccggtgtgacgatagatgctcggataggatgaggccgggttgcggtgtcggattcagcgtagggcctcgaggtaggagcctcccccggagtaagagcctgcggaagtgcaaactgacgagacttccgcagcaaattcgctgtcggtgatagcctggctgctgatgccatgttgctcgctataatacctcgagacacgcggaagaattttgggctcggccgctcggagttgcgaatagagtcctacggtggacgggagcgcacaaaacgcaatctccaccacgagtccctgcccgtttgggaggtcaacgcaatcttccactatactataagtccccagactacaatcctctatatctgaaagtgcagtcaatcgagcctctatatattctgttaagtttaattcttatctaccaaaccattctaggcaccattctccagcaggctcttgaccgtgtcaacaaccgactcctttaacccacggtacttaagacccagaacctgcattgattttgagttgtcatatccgtatacatctttaggcatgtcactcggggcgtccttaggcggcagtctatcctccagctcaggatacgcgtcacggataatgtcgacgatgtccttgttcgaatagtgaccagcggtgatgaagaatcgctgccctccggcctccggcacctcgatggttctgacatgggctagcgcgacatcacggacatccacccaaacatacgtgccggttggcggtaacgcatccttactgaacccccgcacgaaactgctgatccgcgcattggaggtgttgatggagtcaagggagctaaggtagtgcacgacaggtcctagaactaggggcggattgattgttgcaaggtcaaagctgggcttctccttctccacgaagtcccaagcggctttttctgccagggtctgttcgtcgttcgcggtcagctttgttacgacgcgcttttacagggagattgggttcataccttgctcgcccgataagtctgtgaggagtctaaaccttcctcccaagtgataggattccaaacttcctcactatagacctttgcgtggtttttcacgttgacgatcgctgcgaaggacgaagtgatcgtcacccttttcacgttgggtgcgtaggccttgatagctttcaagatgcccgttgttcccttgatagccgggtcaaggaaatctcttaccggatccctggacgttgaagtgaaaggggacgccgtgtgaaggacatagtcaaacggggggtagatttacaggcttatttgtgttcacattcataatactgggttattagcggaaatatcgtaacggagggtcaagttcatacctaataaaagcccaatctgcgcatcgccttaacatgactacaaagcttttcttggcgtattgagagcgctagatctctgccttttttgacgactgttgacactcaagctataagccatagacaattaacctgttgaggttgtaagccttttcccttcccattgcagtatacaataacctgcctaatttaacatatgagtaatgcgatgcctttgcctccgaaaacctgtttggggatttgggctgattttgccttctaaaaaatggcttatcggggggtttttgtgtcggtttctaccccttcccattttttgggtttttaacgtttttttttgttttttactatttctttttttgtaaagttccnccccaaataatgtcttttttcttttggtagggacctcccccgggg

SEQ ID NO: 4461 - DNA, 2124 bp, Emericella nidulans
cgcaacctttgtcccgtgccaggtatggtgcacgggattcttcgacaagaacattgtggtactgccaactccttggcggggggttttggcaatgcaggcggcggcatcacctagtaagacttccagcacattacagggaagacagcacactcacaaaaaactagttttgtcatgccggctatctacgactccttcgtccacgaccgcggcctaaccccgcacaaagcctggcgagtctcctacatcgtccctttcatcatcattgtctccatcgccttagccatgctcttcacctgtcctgacacacccacgggcaaatgggcggaccgcgagaaaaccagcgggcaaagcattgtcgacctcagttcaacgcccaatgcatccagcgccaacagtatcaacatctccagcgacgagaaaaaggctgtccatccagaagtcaccgattcagaggctcaagtccatgtgcgcgcgggacagattgagagttccgacgctgtgatcgaagcccccacgataaaacgctacctctccatcgcactagacccgtccgcccttgccgtcgcagttccttacgcctgatccttcggtgccgaacttgccatcaactctatcctaggcgcgtactatctcctcaacttccctctttgtgggcagacccaatcgggccgctgggggtccatgttcggcctcgtcaatgttgtcttcagacccatggggggtttcatcgcggatttgatctacgcgcgaacaaactccgtatgggccaaaaagatgtggcttgtcgtgttggggctcgctatgtccggcatggccattctaatcggcttcctagatccgcatcgggaaagcgtcatgtttggtcttgtcgtacttatggcgtttttcattgcagcgagtaatggggcgaatttcgcaattgtcccgcacgtgcatccgtccgctaatggtatgacattcgcccctgtgtcaactcacttcgtttgactaacagagcgcacaggaatcgtctccggtattgtcggtgggatgggcaacttcggcggcattatcttcgccattgtctttcggtacaatggaacgcagtatcaccgttcgctgtggattatcgggttcattatccttggctgcaccctgttctttagctgggttagacctgttcctaaacagaaccactagacgccatcttcaagtttcgcgtattatcctaattggctgcagttacaatgctactcaaaatttgagagaaatgtgtgagcaggttttctctcttgttccgggtgtattgccagcgtcatctcaaactttgtccccctgcttattaaacacatcaccgagagaattcgtatatctaccttgacaatatccccatctggtcgctcggctcagactcgggcattcaatgacagatatcgatgaaacaagggcctaggaccacaggtgctggttttgctatacgcatattgatttctcagtacaattaagagctttatttagacttgttgaacatctgtccactgctgggctaaatgtgtatgtagatatccctgtcaggttggggtcggagtgagagagctagggctcagttcagaccgactgttgatgatggctatcactggcacaagggaattttgattgaactttgtatgcatgattccacttttcgctatatggtccttacatactaggtgggttgcatgatggttacaggtacgacgtcgtcgccttgaggggtttagcggctctacaggagaattacgattatatgcggaattctgaacggaaatattgctatctcaaatggaagacaagcatgcgtaatgtaggcgtcttctagagatcattctcaggtggctgcgctgctgtggcgaattagggcttgacctcaggctgacctgacaaatatgtacacccttttcttccacagctcagcagtccgtcaagatcatcgcttctagaacgtccatctgaaatcatcctgcatatccctcattgtctcatccgatattcatcgccaatcaatagcagttctcgccttcatgatgtttttgtctcttgatatcatatctcggtcattcatgacatcatacgactatcaggtacacacctctatacatataaatc

SEQ ID NO: 4462 - DNA, 1552 bp, Emericella nidulans
aagcgatctgctagctcttttgtaactgaggaaacagcgtcaactgtcgccttccgcaaacaccacgctcacccttcgccgcagcaacccactactttgacgacatctttacccgctccgtccgcaactccagccgccgcagcagtagccaccgaccttttgtccgccgctcctcaacaagccgctcgattggcaataggagtgactttgagtccgcgttcgcgacccctgcgcctcagacacctgtggagcctgcgcttgacgaagaagggaaggacagacacgggtcgaacggaacacctggtcaggaattcgacgagcacgtctcgaattatgtacgcagtcagctgcaaagagtgagaagtcaggtgtcaatgggggcttacgaggacgagtttgagacccaggttgatgctgcgaacggcaatggcaatggtcaaccccctggaaatgggaacgggaattcaactaatgggcggtaaaatacttcaacaacccccccccgtcgttcggcccagtgaattcatggtataaatgaaatgtaacaggcactttagatgatatcggttatcctaattcggtggtggcatgtcttatataatatttttttttttttttttttttttttttttttttttttttttggattgcgtctagtcttttgtccacaggccaccatatacatgagttgatgatatgatgcaccatgttcatttgtccaattattgctcaactggaggcagatattatatatacgcatacaatacaagatgtggttggtgaaattgggatggtacccgcttagagcttgcaaatccagtacgcttttagccccatttttccagttcaaatctacaacgcaatcttcacccatctgccttcatctacagaattgatagcaataagtaaacccaacagtctattctcaccaaactcaagtctcattcaacggactctcgcatagtgcagcgggaagttagggtacataggcaggtaggcagtaaggactataggtaggtgatagatataggacaacaaaagagacgcgggacggttaatttacagagcatcagtgagagccttgttgagcttggcgatcttagaggagacgctcaggtcgatggtgcggtcaccgatttcgacaatgagcccgccgacgatgtcggggttgacctgtttgtgaattagtttgccaacttgatgatacagagggaaaagaaccagaacgcaccttagaaacaaccttgagcttcttaccctggctgaactcggacttggagacggccttttcaaggcggttgagggtcttggcatcgagttcctgatggcacctgattagtatctgcattcaacgaccatctgaggtgatgatatcaccgggtgaaatccatgaaatccatgaaagggtcaagaagcatacctgagcactggtgatagaaagctcaatctcaccacggtgagcgctcatgagagcagcgaacttgtcaacgacatcgttcagcaaaccaagacggttgttctcggcgagcgtggcaaggaagttcttgaggat

SEQ ID NO: 4463 - DNA, 3101 bp, Emericella nidulans
aggtcgtcgtgctctccttatcatgtcggcccttcttcttagaatcagcctgtacctgggcattcgcgttcacggaaacaccaagcgaagctgcggtggctgcggtcgagttgttgacactagtggtgccagcttcctcggaagcaaggagttgcgtcaaaagttcctcgtcgatacggcggcgccatgacttgttcccactctggccaatcttctttgctacttcgtccacactctcccactggattccatactttctccagagaagagcacaacgcaagcagagggcgacgttgagctgcgggcccttatcttttctcgatccaggctcactagggattgtggtaccgggagctactccgggtgcgcgccgccattgtcgcgacgaccgtgttgaacagaatttgcattggaacccacgcttcttctcagcggctttatcgttatcaaatgccgagtcgtcatgatcgtccgcgacatcatccacgagctttgcggtgctgtttcgcttcgcttctttcttaccctttctggcgccatagttgccccatacttgccgacctctgggcgttttcttccacatgtagtaataccgcacgatttggtaatgcggtacgctgccgacatgcttggtgatgttgcgccactcggacccgaacttggagactgcttgctcaaaagccttaacctcttcaggcttcaggtgaggttccttcagatccttgtatttattcacttgctttagttttgtgagcgccgcgtcagcgttgaagctgtgcgcgtatagaagctccaacgctttatcgaggaagttggtcgaatacttctcaacaccaatgtcgggagccaactgtttcgcccgttccatatactcatcaataaatttttcccggtccgttgtgctgaggcccgcaccaggcccgtcgtccgctcctctagtcggcaattgctctggagtgggcatcttaaaaagcatctctgcagtgcggacctgctttccgcctattgtgactggctcatcttcgcctctgcgaatgaaaccagcaggttcatcctgtacccagctcggtcgggcagccctctccttcttcgcagcttcaatggcagcaacagtgtcctttgtgagcctgttgtccttgcgtccgccggagctcttcatgtatttcttcttgatttcaataggtttgacgtattcgaccggacgcccgggccaggggttcaccacagcctggtgtcgaggtcccaatcgcgaactcgcccgaggatagatgcggtcatcgtagtctaaagcatcttccactcggcaatggattcccaagtagcgatacggccacatcctcgcctgcgctatttgctcctccgtggctggtcgaaccggtacttcctcgatcggcgctggtgtgctgcctgtagtgccattgggagctccgttcggctggtcctcctcttcttcttcgatcatttcctcgtctgcgtccggcaattctgacggaccatcaccaagcatgggggtatgtctggcctccagtttccgctcctgcgcccggctacaggcggcgcacgcccaggcgaatcctcgagcgggcttttttgtcaacgctggtcgaacacaatacatgtgatatgtactatgacacacagcgcaatcaacagagtcggtgctaatcaagaataggtcagttgacgcttttcccggtgtgctaggagagttcagccatacttagcagcatataaaccacatcgcttacaggtcttaaccgcgcttgtcagctctttccgtttcccgacttcgacgagaacatatcgccatcgctcatcaaggacccgtttgacgtttgcagggacattgatgactttgcttgtcgggatgacttcgtagtaccggtgtatgtaccggtcaaacattttatcgtaccagaaacaatcccgcgtcttcctgtagccatcgaaatcttcaatttcagaagcatgtctgatctggcactttccacgcaacgatgaaagcgggcatgtgtcggagtgcatcgaggcgaataccagcctcgtatccgctgcgttacgttggatgtcacgtggtctgtaataccaattcacccggagcgcctcaatcggtccagatggcgagtttttgtttgggagaaactccattatccgcgccaagtaataaggctccccgggaggttcgcaaatcagatagacgtggtctgcaccatatcagcgcccaactcaaagcagaaaaattacaataaaaaaaataaataaaaataaaaataaaaataaatagaaaaaggagagggaaaaaaaataagacaattaataaagaaatagagggatcactgaccgttcactgcaaaagtcgtgccatcgtcggccgtcaatttcccatctttcaagtaggcgcctcggtcgtcaaaagtgaccatgttggagtcactttgacctggggcaacgcctggtgcggccgtgaagactttcttggccgcattttcattggtggcgttcgtggtgagacttgcaggctgcttgcgttttcgtgaagaattcgatgacgaaagagtatcgtctggtttggcaagaaacaggaggtgccgggataccgtctttgccgcgtcgagttgaacccttggcggccgtaggttttttgggagccaaattttcctttcgggtttggcccctagtaaaaaaccggaggggggccccctttttgattttttttggggggggaattttctaccagaaccaaattttggggcgtcctaaaggagttggcggaaagaatattgcgtctttgggccctaccaaggttctgaatggcgagtcctggccgttcctcaatcttaaaacggaaaccttgccgacggttgcaggactaataaagattggcgattttgggggggaatcaatccttcaaaaccggccggtgctgcacgaccccggggagagttttttggagcacgcctacggggtgctgaccctagaagaacggtttggggacatcggcacgcttccaaaaaaaaagggttgctcgaaaagtggtgggccaaaacaattaatatatggggggggatctaatattatttggggggggggggtccttacta

SEQ ID NO: 4464 - DNA, 3779 bp, Emericella nidulans
cacaacaagtactcgcttttgccaacgcgaaagcattacctgaaattttcacatgcttgccaacaaccgtagaaattgatagcttgtctcagactccatctccggagcgtaacccgctcatatggaaaattccgtaccaagcctttcccacttcgcttgagaatccgccaactcctggaagtcctcgccggtcagcagttatgggcccgcgcacccaacccaggcccgcacgcaatagctatcaatcgctgattccgtctggggataccaacaaaccatcctctccgccatcaatccgccctactcgcaataataccgtgaaggatacacgcagaaagcagtccccctcaccaagacgagccaagagtgaagcaaaagagcgaatatcaccgtccagccacactcagaacggcaaacggtctagtcacgccccgaccagtgacatatctagtaacactcagtcaaagattgcaggaacacaagttagcgccatcgtcccaatttgggaagatcgaaacaagagtgaagtacagaagacgccgcgacggtcaacggtctctctcgtctatgatcctctcagcctaaacgagaagagtgatatctcccccaagcgcagtcaagctgataggctagcgcgcatgtctagcttcaagaactccaagcgtggctgtacgactccagcgagaaagactgtcgggttgggtattggtgcggcaacgccggggagtctgtacgacggggatggcttcttgaaggagtaacagcttggatggatggtatttagcttctgaattggcgtcgttttattattccccgtcttatttattctcacgaggagcactttcgactagttagtaattggacaatatctctcttcaacttgaatgcccatgaatctctacatatgacgaccaagtcaacttcagctccaggtcttttttttgtgacaaagtgatcaatctgtccgcctccacttcgtctcttccccatccacaccagcatccccatcagcaccatcatgctcatccctctcttcctctctcgtcctcacactccccgccccgggacctagcccactccccatacccggaaaactcggcccttctccctctccaatccaatttccttcttcgtcaaagaactcatgcatattatccgccgtaatccacccagagctcccatccacaggaggaggtaaccctccctcctggcctgcaccaggaaagacaagccccgaagcaaacgcaccgctatcctgatcttcttcttcgacaggatccggatgaaggtttgcgcatgctgagacagcattgtaaagcttctgagtctcggtctcttccccttctggcgtgattgccggtgttggcgggacgatcgtcacagtgagactctcctcctcgtctgattcttgcgggaaggatgatcccgaggcgggtttcgcgatgtgcatgtacagcccctggacttcgacttcaacaggaggatcctgcggttcggattgtgatgaagtggggactttgaggcgttgaattgcgtgcagcgaaatggagcggtaggggattgagaggccctttgagatactggtgttgtagacaaagaatttgctgcacgaactcctgttagtttatccaatatttcatgtgaataaggagaaaggatgtcaaaacatactccgaagtaacccaaatctccagcccttcaatcacgactgcctcctcagattcgtcttcagcatcaccctcgccattgctttcgtgcattccaggagctgacccgttgacttccccagaaggccacagggatttcagttcagttgttgaggtgaggtcgcgcttcaacgcatgtagactgcactgcgaggcattgtagtagagaattgtgcggtcgtggaaggattctggggtgcgcgattggtaggtatcaatggatacgaagctgtcggcgtttggaggcgaggatagaatttccatggtggctagttaaagcgccggttaaagacaattgtcaaagctgggattcaaagttgaggtgcagcgaagcttgacggcggagactggcggggagcggaaccacgcagactaagtactccctacctagggacataagacatagtgcaaatgcgaaaagacagtattacatgttaaattgcttaattgagacttgctcacgaaaattttgaacgggtaatgtttggccgtatcatcatattagcataatctgcgtgtcgtccatcgtccagagttcattatatacgttaagtagctagctatcactaacaaatgagctctgtgtagcttattctcgtgattgctctgctgttgcttctgctgttgcttctgctgctggaacggcaagagtcccactgcgcgaggcctctcagcctccttgattgacttggcaattatatacgcagttattcactgctgctgcctgtaaactggccatgggcggcgcatctggtatttacaacggatgcatacatcggtgatcatttcaagtcgagccccccaaatgccctatctagctcttcgccttcattcctcggagccatagatggtaaccttgccgctgcagagtccggcgcggcactatccagtaagctctgacttggctggctctgagaggattgatgcgtcgcattgctcggctgcagaagcttctcatcacgatcaagccatccaggagctacgcggcgtttctctgcaagttctcgcgcagctattgactcctcccattgcttgatcgcctggtccgcatctgtctttgtcttcttcagatgctcctcgagggctttgcatgaggcgaggatatcctccggtgttgcggcgtgctcgcgtgagctgagatgacgtagcgaggtttagcgtctgggttgtttgggtcgacagtgacagacggagggagcgttgacggaacggatctataggtgtatgggagggtgactgcagtagggaggttgatgaatggggaaacggttaatggaacctgggcgaggagtggatgggggcctgcttcgttagttggaaacccggggcatgcggggagcgtgaggtaaacgcacggtatgattcgtacatcatgctcgtggggagatatgcagaatgataaaagtgatgaggaactggagtcggataggttcttggagaaagctgaaatgggtgggtgtactccgtagataatcccctaacacctgtcggcgttacgatatgtactactgcacagagggggtgtcgtaattatagactacaaagcttcagggtctcgggctttttgatgaaatcggtctgcctgcaataatacgagtgctgccttgggcctggatctcacttagatttgttgatgtgctgattaagtccgctagcctgtctccatctcagctccagcgttgatcttctttgtgctctctaaccaccattcttcaatttcttccctctcctcctcaacccacatttcacatctcctttgatagccgcgacagaacatgcttctcgagcagcctatcgcgtgatcaacaagagaagctgttccttgaccgaaacttggcctgacggtctctggcgtgtgttcgaaaaatcggcgggcttaaccccaacgtcggcaacccaaggtttttcccttttcgatttttgcttcccggcccggtgttttgtttggtggggtcacgagcagtttaaggttttgcgattgcttgcagataattttgccttgcccagaggatcggattagcgcccctggggccgaagaaccggtccgaaatgattacctgatgcatggaaagg

SEQ ID NO: 4465 - DNA, 2775 bp, Emericella nidulans
atcggagcctagcaggacgccgtcgttgatatgttccacgtctgccattgggactatgttggtatcgctccagctaagggagtcccagagatattgaccgttagggtcatccatggttgaaggggcgaatggatcggtgaacgagctgtcgtgagtaactgcaaatccgcgtgcaccgtggtgagaaggtaagatcccgggtgtgttaagaacaccacccccgcgggaagttgggaaagattaaccgctgttgatctggttggttccggcagctatccggggacccaggtttactggcctcaaatacccgtaaaactgcgtcgagggttttcccttgccgtcggacttgcttgctgaagacgcgccaacacaagtaaagcgtcttggacctgcgcttggcacgcctctgtagtagcccggggatctgtcactgtattgtcgttgatgaacagccctagaaggggaaccatggtgctttggaagaggaaccacacggcgttccacccagacatctgaggggtctttgcagttgccgagatgtctctgatggcggtttcggcaatttctctgcacctttcgatcgccgtccgctcctcggatcgtagagcaatatacggaacccgccgcatggcatagctcaatagtgtgggacggtagaggagtatgcgttggacatgatatcgccatttcgtgacttcgcgggtgtttgcgattccttccgggcatggttcatggtctttaaggatatatgggaggctgttgtaccactcaaccaattgagtatcgaagtggagtatttcactgtatttggtcaatggagacactgctagcgcgtcttgtatctgattgctgatcttgcaaaatcgaacgttctcgagaagcggaagaatatcaagtacattcccctactcttgtcagtaaatggcggaggagcctttgtaatgagtcacgtaccgattccctatagtgaggaagcttgaccgtaatcgcgggactgaatcggcccattgttggccgtcccaaagtcacgcctccccagcaatccataagaaacagtgtccaccatacccgtcgtctgagatcaagttgtgccattttctgcttgttcgatgtatcggattggtcggcgaattctctatgcaaacccatagtggcagccatgcgaagagcggcgcccataagtgagtacgctagattcggttgggcaacgtaatgcaggtaccagccccctagaataccaagcgtctgcacggtttccaggtgcagtgacgcgagcgactccaggtccaagtacgccctacaccgggagtaatatatcttatgtgaaatatcgtcgcaggttgaggcgcagatactgcccatcgcgaggacgatattcagcaagcaataccaccggtcatcttttcggtgtccagcagcgtatgtttcgcgaaaggactgctcgtccagaattggtgtcaagggctggacataggtaaagtaagcatccaggagttgagattctggcacttgtagatgaacttgcggaggagtaccgggctggtcatggcagcccaagactgcccctccgacgaagagaggtctgctaccgagcctcgacgaggagcgcttgggggcgtactggcaaaatatgcagcggaccctggatccagccacacgattgttttgagaaccgcgtttatggacgagacaccgaggtacgaggacgggcctcttgtggaaagcgacaacgcattgacatcatcggatattgtattcgtgatctcgctgctgagattgcgggggtcattcgattcttctggcatggcctgtagcgactccagatttccatcctcggtcgatatcggggagacgtgcgcctcgtgggaggtggacgttgctggcgatatctggcgggctccagtacttggaggctgcgcctggggctgagctagtgtttcgagcagtttctcgcgcggcaaattagccaaggcttccggcgatgcgccaggaaacagcttctccagtacggttcggtactcatccaaggtcgttgacagtttctcgacatgtctgtccaggcattctggttagctgcggagcgaggcacgaaggcggaaaattaccacctaccttcgcgagggacggggatccgaataatggcaaagatcggctttcttataccacctacatgcttcacacggcttttcaccatcgcatttgattttgcgatgacgacaagaggtacaagcacgaagagtggtaacgcgacgcccgattgaagactggcgttctcgtcctgcacgggcgggggccgaggcggctggattctcgaagccctcgaaggtgtggaacattgctagcgaaaagacaacgggatctggcaaggagacggacgtgaagtcaaccagggcaggggcacagagtcgcaaatcttggttgtctaggtgagagacatgatataggggcgagaagagtggtatggatgtagaaaaagcaaagcaccacagaaggaaaagaacaaccctggaaaaggcggggaacaaggctaaagactagagaggggaggagcactagcactcggttggtggcgctgggctgaagagggatggggacaggattccaagaatgagtacggagtcttctacaaggcaggccggataataagaatacgacttgtgctgattcttccagattgccagtcaacggccagggcaggtcaagtcaggtcaagtcaggtcacgtcgtgtcagcctagttcctggagatcctagtattctatagtgcacctaaatg

SEQ ID NO: 4466 - DNA, 5400 bp, Emericella nidulans
gcaataacaatccgtcctggtatgtgatcagccgttttaatgtaccaaggaccaatgataccgtgccggctgctgataattatctcgtccggccatgggagtcgtatcgtcgcgctgtgtttcagcaggtttacctaagtaaaattattacaccggctgggtgggagcgatggtcgaccagcagccctaatacggataatgccacatttgcggagtatgctaactacggccctggacctgtcctggaagagggaccgcgagcgagcttcagtgagcaattggatgcgcgaatggagatccagtcaattctggggcataactttcaacgcgagtggtgggtggatactgataacctggagaaaagtgatcttgtctcttcttgctccgtggcaggcgatgaaagtgtgtcacagatatcatatcagaaatgtagcacgactgtcaaaacatttacaatatccatcacagtcacagcaacttccaacgacagcatctgcgacagtatcaacaacattgtcagcgacggtaccaatgacattatcaacgtcatccctaacatcaattacgatttccaccggaagtaccagcacttgtactgactatagccagataacgtctgctgttgcatcgtgtacgagggcaccgtgctgtctaacgtcgctgtacccaatgaatccgcaatcgacctgtctaacctgcaaatgggaactacagtcacgtttggtggactgacaacatttggcttcacgaattcctcatcattcgatccaataaacattggaggaaaggatatcaccatcaccacaacagaaggcagtgtgattgacgggaatggccaggcttattgggacggcttgggttctaatgggggtgtgccaaagccctaccatttcatcgtagtcagtaaatgacgggaaacccagtagtttgagaggctatatgttcaaaactggccggttcatctcttctcaatcagcagttgctcgaatctcatctcccaaaatatggttctgaacagcacggctggaaatgaaccgaatgctcgaaacagtggtttagttgcagtgcacgactccgacggcttcgatgtcagcagttcttacaatatcaccatgcggcgcaattcggtatacaatcaggataattgcgtggccatcaccagcgggacaacatgactgtttcggaaatgcagtgcagcggaggacacgggttgtccattggttcagttggggggaaatccaacgtcactaatatcctggtatgattcatagctctcagcactaatgatatcatgtactaacaaaatgctagttcacaaactcagctgttattttcaaccagcgctaccggttggctgacttctgtgcttcaacttggtggtctcgtcggttccctatctgcgggtatccttggagaggtcttgaatggcgcccggatcaagaccagctacaacacaaccggattcgtatcgaatgtgaattactctaacatcgcagtaaataacatcactatttctggtattgatcttccaacagttttatctgaatggagggcctacaggaattccatcgtccggtgtgattgtggagaatattttgtcgcagaatgtaacagggtggatagctttatcggggcaagactactacattctgtgcggcacagattcctactccaacctggctttcgaggacgtgtatattactgggggcggagtgcctagtagttgtaactatgatgtgacagggtgttcgtgatggcagggacataggaatcgtgtggtagttagatctgacctgctgtccaaagaaatacagaatttgtgaggttctggattgactatgcattaatataagaaataccatgcactaaagaaaagggggggaaaagctctctgttgaaactatagtatgaatcatggagtaaacatacggctacggatatggtgtgctaaccagttcaacataaaaggaacaggttcacagaaatgcatttaggacattataatgcgaaattcagagataatagcaaccccatatgctttgtcataataaacttccctctggtcttaacgatcaaaataatttaactccaaatacctcgccggagcataggtcacggcagtaaccacgaaagtcagctcgttggcaacatcaccgccagactctccaattaccttggccagaggtccaataaaccatgtctcgtccattcccatgcaccatgctataatgccgaggcaaaaggctacggctgcagcaatgccgacaggtagcctggccgggtcgttccacccttccaggtcataattctcgaagctacccttgcggaagataaaatgctcctggaataggataatggcgtagcttgtacaccagtaaccgagcaagctgaggaaattctgaagatactcattcagctttgctcgtccgccaactgctaacgccagaatacaggcaaagcagaataatgtccagagaaaacgcggaatccggccaaatggtcgagccagctgctggaaggagatagaggcactgtaaatgctgataacattctggttaattccggatagaactagaagcgtcaggaggaatttggcaaatcctcgtggatgcagcatgtcctggatgagatagcccagtccttggtcctcataagcactttgccactcttgcttattcttaaacgcagaggcgaccacgcagcctgcgatcatgggaatacatgtaggcaaggcaatccctaatgtcgtcataaagaagactttgacgcggttgacattggccggatagtggacataatagtcactggccatggtacaccacgaggcgcttgaaccgtagacgactgctagtaaactgagcagcgatccagacagagtgagtccttcagcggatgccggactctcgttatccgcatatcgaccggtgtcaccatagatgatcatgaagatgatgaagaagatcatccaagcatatcgctcataaaccaggatcgcattcaatcctacgaaagagataaaaagtgccaccaccgccaggatgacaattcccaggattagggagacgtggccatccgatactgcagtcaaggccagacctccagtgatacacgagaccgccgcccatcccatctgctggatgccgttgagaagcgcaatgagtttgttgggccaccagccgaagctataccggcttacactgatctgacgcagaccagttgcgccaccaaacgtcgcgcagaacccagtcagcgcgccgccgagaatggacgcgaaaatgacgataagcatcgattgcttgaggctcagaccgaattcccagccgaggaagcctgtcgcgaaacaggaagtgttcataactccactggcccacagcaaagccatcgtcagctcctcgaaccaagacacgggctttttgtcttcggcgcgtttacggtcgatggcttccgactccacgccgagttttctatccattcgtgcttccagcccgttgagccaacataagacaccccctcctgaggcgtcatcgaagagctgggtagtctctaggccaggtgcaccgttggagctgacttggggaataccgttctcggccgcacagctgacggcatggacgcctttttctggatcagagtcagataccattgtgatttcagtcttgtgtaaatcaataggccaaatgtttttactgaacgaactaagaagtaaaaaaagtagggggaaacagaaggacagaactgtcgcgtgcgcaggtacagtgatgtgggtgaccccaactggacggcaggcgcgtcaggaagagtatcggggaagggtgactagtatatctcaaccgagtgacagatcctgttctcttaactaccgaatgaagatgactttcaactccaaaaggatcccacgcaaagggttgaaaaggcttatcgaaaagcttgacggttgcatttctgaaggtggggtagccctaaaacttcctatcagggcctgtcgccgcggctattgattcactgccatccgcttaaagtggtagtctctccaaacgcttattttactgttgccttagcgaattagaatgatccaagctttatctgttagtcggccttagcctcgcttatcaccggcggttctgccgcgatttgtcttcctcattcgctatgcccattctgtattctacgggttagagtactcatttcgaatagcacgactctcctatgtgaaaatttcgatgcaggaaatgtgctgctgccgctcaagtccatggtggttagagacgcgattcctctgacatgcggttctggcaacacaatcagatactgttcagggttcttgtttctggttccgaggttctcgaaagctgtggggaatattataaagtagtcagaatacctgtcaagctagccctctcctcaggagctgagatgtataaagtgaggtgtaatctaacggatgatgggacctgccactgtgactaggactggccaactagcgcggttttgttttggtttcgtttcgtttcgttttattatttaacgtcactcggggatcacgtggcccacgtgatctgcggcctcccagggggcatctggacgtgctacctagacagaactgcctaaaaactagctagatacagatttgaagcagcaactatgaacaatatatgctggaaataaattgaagaagcatccggtgctactctggcctggtcttcgagggcagatgcccgttctggctacctatagattggtggagaggggccgtaccctttatccaggtacggaggtgtgcaccaaaagtcatcgccgcgctagtaatttatgatgccaaatcctgtaattccattaccagtcacaagctgataggttgatgatatatcaatcttctaacgttaagcaaacatcaacataacctcttctcatttttgaagctatccagatcgcaaattgacagatcaaatcagtttttatggtgttttgaagcgcttttcctgctatttctgcctccgaactgtacacgccttcctgcctgcgatccttacaatgccagcgcctcatccaaacgagcttcgagttcaagtcctctcttactgggccttagggattcagccacccgatatagccaagatgcttcagatcaacgtccgtacaatacgggatatgatccagaagggccaagatcgtggctacaatcctgctcagtgcatgagggttaagcttgaatatgtggaagatggcaagcgctctggccgtccgaagatatttctgaagctacagatatggcagttcttgcatctgtcaagcaggataggaatagacgtgagaaaccttctgaaatccttgcctttgaagcaggtatattccattcttctgttttatgaatcctccacaagcatggctttacaattgtta

SEQ ID NO: 4467 - DNA, 2596 bp, Emericella nidulans
actgtgcctgtcattcttgagttttgcttggcatatgttcctattagaaatcggggatcagaggacactgatcgggctttccatcaccaggtaagccttggcgcagcacagaatatgctaatcggccacaaaccccaggatagagagcattctgatttagctacctgtatggatggcgactcgacgagtgcaaactgcgatcctggatgagggcatgcagggttagatacgtatcccggacaggaccatcttctagaaaacggagtcaaagaggggtggaagacgtacgatgcatacgctaaggagatctcttataaggggcgatgggatgaacagcatatctcctgtaggtggtccccaccttatactggctaatgtctaacaagcagtacagggtggtcgtaagtctgtttctgcaaccgaaagaattcaccaaagctgagaactgtagagctccggggttcaagttcgcctttaccggagagagggtacggacttggctttcagttatgaaagagctgacagtacgtagttagcaataagctttggtaaatatacagacgaaggcgttttagttgcctatcggtgagcagactcgaggagacatgcctttctcaacttcctgctgatgttcttcagtatcggaggacaagactggcagttctccaatgtcagcgcagaaaacacctaccaatttgttgggccctggacgaccggggtcaatctgacagagtccaatgccgggcgaatgtttgaactgagaggtaccgacccataaacgctcttctgatacggtgctaattccagcagtgacaaattgggcctacggatatgttcactagccggtcctttctttcccagctaacccagtaaacagtccaattatcaagtgtatccgtcaactctgcggcgtcgatttacaatatcaagccgtttccaaaaatggtcgaagttattggtgactcgtacgtgctgtccacagtcaagggcgttgtctaacgagtgtagcctgagctctggagacttcgcaacgtacgaaggcctttcgtcctgggcatacctttttgccgccggactggggaatgtggaatatcaccttacggtacggtgtgacagggcttcatatgtcgcaactaactgtagcaggcctacccaggtatctgcctacatgatcaagaatgctggggcaaccccaggggccaggtatgccgctcctccaccgtatccgccgttgcttagtgagtaggtttatcaatggtaccgaactaccgacacctctgcccgggcgatgaaaatctacggtgacgagccccctaaatgggacttcaaatcgcagcagccggccgacctggtggtcatcaacatcggcacaaacgacaataacccagcgaacaacgttcctagcgaggactactttaatgattacgtgaagctgatagctgatattcacgggatatggccgcatgcgcagatcgtcctcatggtatgttcactgtacaaagccatatttcccgactaacaggacagtctctatggggtggtttcggtgcatcgggagatacgtacgtccagggcccgctttttgtcgacgagatcaagagggtatatgaagtgtttcaaaagctatggaacttcgttcactacttcgacaccacgggtatcctgcagcacaacgatatcgcgccgcagtggcgagtcgactgacgtcggacatatcaaggtagcagcacactttatgcaatgggtgaagctcaagttcggatgggagatggcagctactgggccgatggtccacagtgggacactctattggaatgaccaggctaattactgagctggccctgactatactcgatgaacatgtcctgaatcattatcataaaatgtatctgaacaaaatatgatcaatacaaacatttcattcaggcaatcatctccctaccgccacagaactctcgagatcgagttcaaaaagtcaatcccctccttcctccatgtatcatcctccatatacccaagtcccgtgacattcgcgtcaaagacaatatccaccggctcgttcactccatacgtctcccagtacacctcgctttcaacgcctgagtttggatccagatccacaataaaactggcccacatgcttgccatcagcgtactaagctccttatacctctcgggcatcccctcgaagggcagaccgtagtgatagcccagtccctcaaaattcttaaacacaaaagccacttcctcgaaatgctgcgcaccaccaatccagtccgcattaccgctgcgcatgttaaagcggtacgcgtatgcagggatgccgtgctcagcccagacttcggtctgccgccggcgatttgcgtgcatgctgtagtcgcctgcgtaggcggacgtgcggcgccactgccagccctttgagggaatgcgctgattgccgagaaactcggggataccttttgaagggtcgtcggggtagaggtctaggatttctttcgcgattgccggggggtatcggaagacagatgcgccgcctgtcagctcgttagcagagcgggtctcattgagtcaaagatgatatgtcagaaaggggtat

SEQ ID NO: 4468 - DNA, 2009 bp, Emericella nidulans
tataccccaccgccgtatcggcctcctccgccgccgccgtattgatttttgtgaattgcatttgtactgaatgggttgggtatcagaattctgggtttagcacgaaaggcggcgtacgtttggttagctttcatgtactacacaatgagacattcacatcttcagcttgttcacgatgtttactcgggggctcaggatggctcacaatgagtcacagcggagcgggatgactgcataatatgactcgagggccgagagctccgccgcacctacctgaaagctaagcggtgtggcgacaagagcttttttaatcggtttttatttttgctagtaccgcagcgctccatttctgagatccagagcgtcgtctgcctgagtatattacctgcactggtcgtctcgaatttcttattcttcagtcactcatatttctaaaccccttattccttctcctttttttttcttcctacacaccccacgcaccgcagggctctactacctgtcccgcaataccccgcctcccaagacgatatcttcccctcagctcctcgcatataagttctcaaccatggctgtccgcgcccaattcgaaaactccaacgagttcgttcttttttttcttaataaatgctgcctcagcgactgacctaatatcacagagtcggcgttttctcccgactaacaaactcatacgcgcttgtggccatcggcgcctctgaaaacttctacaggtacctcccccatctcgtataggaatttcaaacctgccgatactgacatacgatagtgtgttcgaagccgaacttcaagacgtcatacccatttgccatgccacaatcgcaggaacacgcatcattggccgtttaaccgcagggtgcgtcgaacgcttctccagcacaaaccaatactcccagatgtacatatactgatggacaacctgcgcagaaaccgcaagggactccttgtccccacaacaacaacagaccaagaactgcaacacctgcgaaacacattgcctgatgatgtgaagatccaacgtatagaagagcgtctgtccgcgctcggtaatgtcatctgttgcaatgaccatgtcgccctcatccaccctgatttggagcgtgagacggaggagatgtacgtaccaacgcagtcacatgcaggaaacatggaggaggaacgcaggctaacatttacactagcatcgccgacgtcctcggtgtcgaagtcttccgtcaaacaatcgccgacaacgtcctaacaggctcgtacatggccctctcaaaccaaggtggcatcgtccaccctaagacttctattcgtgatcaggatgagctctcctctcttcttcaagtacctctagtcgccggttccgttaaccgcggtagccccgttgttggtgccggtctcgtcgtcaacgactggcttgctgtgacgggtctcgacacaacggcaacagaattaagcgttatcgagagcgtgtttagactgggcgagaatgggcctggcggtattgggcagggagttgcgaataaggatagtattgtggagagtttctactaaattctcttctttttaaagttacggctaggaaattctgatgcacccttcttgcaattctgtttgatatttttttactctacgacacttacatatctgatgtgtgattgaattctgggattagtagtccagctactgtatgtatcgattaagactcggtgagcgcccgccgcgcatatgcgcgatgtttcgactgcagcaaagcacatgttgaactgcatttatcagatttattttccaccttccaggtctagctgcaggcattggatgaattctcatatgtttatcgtggtcaagcaacacctgccagatctagtatgatgattcattcttgatcagacatgaattctgggcaacggcctgacatggccacctgtactaaacggtttcagttgcagttagaagcatgcgaggtagaagtacgatagaacgtagtgaaacacgaaggaccg

SEQ ID NO: 4469 - DNA, 2868 bp, Emericella nidulans
gggatagtcttgagttttagcagcggctctcggcactgcactgtgttcatgtcgacaggcaactttcagttcactttgtgactatggacgcctctatctgtatatctaatttgccatggtattatgcgaggatttaggcgtttgggggaaagggttttcctacatccttgcattgccggagtttatgcattagtaactagtatagctttgaccggatggtgctcttggagttgattctacattctagcagttgattgctctggagtactatggtctactgcatcagtcatcttgaccgaactcattgattaacatgctcctgcttaggctacatgtctccgaaacgtcacggtactgggatatatatctgactagtgtcagtttgtagatgtcactagacggagttagattgtcgttaatctatgtccacagagctttatttatagatctagatgtaataacggcttgatcgtgatccgtatgtggctcccatccatataacagcgacacgtagcaaaagtggcaatacgcccgtcttgacattatcaaacgatgttggaggtattttgtggctctgtgtttatcctaccctaacataaaatacccccgattagaacataactatcgtctatcatacaagaaaaaaagtctctatcatcgcatagaaccgtacagcgaacaagacgaaaaagaggggggaaaagtgctattaaactccgtatatcatatatcgctctccgtgaatctttggaaaatttgggtctttcggatgaggcgcttatacgatctggccaaaggcaggaatcaacgtctgagccagccagaagctgaaaacaagcttgggtccagtcatcaacagcttaggcgtcaaacccttgaagaaagcagtggggccttcattcttcatcatgttggagacaatacggaagccagactcggggttctcgaagttgcggttctgaatacgggttttaatcacgtcgaggggagcggagacgatgagggaggcgctggcaccgcagacggaggcgacgaagttctgggcccacgaagctttgttgtagtcctgcagactgtagatgtattccttggcgaaagcagatccaccgaaaagctgtcatcgttagcgtgataacattttgcgagaggaaacaacgtacagcgaatgatccaggggcgttgcgagccgcagtccagccagcgccacggtaaagccccataccttcatcggagatgatcttgaaaaggccgcgaccacggaaagcctctgggtttgtctgacgcttgatcttgagcacgtcgagaggaagcaggacgatttcaccaatgccgattaaactaccggccgtggcgtgcatgatagcctttccagtgccctttccaaaagccttatcaaagtcggcaccgtggtgcttcgccaggtagtcgcgagcgaacggctgaccaccgtacttgtaaatacgctgaagaacctgtggtgttttgtgagccaatggtaaccaaagccacctttttgttctaccgaccttgtaacctgcggcataaccgagaccggggaagagagaggtaaacttgcgagccagaggcgcgttggcatactccttgaagacgacttggttgaattcactggcagacgtaatctagcataaagccgcgtcagtcaatagaacccgttagcgaattgaatttcgcaacttacgcgggtctggttgctcatcaatcgctttgccgtcgtatcgaccttgaacaataatcagtatctgtaaaagatgggttaatagcgagtcagcatacagggtggaaaccgagcagttccgcaataccagcagaacctggtggttgtcagtcgcaatcacctcacagaatgatcaattaggacatgaaaaaggtacctgatccaagaagacgagcagtggctgactccttcttcacatccttagatgcggaaccgtgagcagctgcaggagacattttgatgttgctgtttatctgggtcgtatgaccagctttttcttttcacaaaaagaaggatcaatattgaaagggaaaagaaggccaaaagagaatcgtccgagaataaggacagtgaaagcaaaaattcgttgtcaacgaaaggaaaaagaaagcgcaagcacaaaactcaagaagaagagaggaagagcgagatcgcagtccccaacggcactttttctgcgccgaatcggaaagccttggaggtctggcgcgctagtctctttcggtcacccggggcctcgggagcctgcgggcctcgaataatccgcattcaaagcccagactaccgagtccgagccttgccttcggagtatgctcctagcctaacaattacaatactcgacaaagagggttttcgttttctttttcttttctttttttgagatacgagtccgttctagtaatggcttttagaacttgctgatcagcatagggttacagtacgattcaagaaagagcgtaattcaaaaaatgattgcatcaaacgttatgccatttaatcattgcagtcctgaaagtagatcccaagaagccataaagaaataaaaactcccgactaacgcctgcccaaacgaagccaccgcgaattctaactgcctcgttcaagaaccgcgagctttaagactgttcccgtagcaaaaaccttgcaaaacaagacctttttggcggcgttgggcaattaaagtgaggataatccaacgggggggcaaggttaaacaaatcccccaaaatgtgtttcttttccggggttttttacaaacccgttttctttccttggaaaaaaccccagggggggtcggtgggaaaacctatggaaattttaagggggccccccctttgggccttgggggcttt

SEQ ID NO: 4470 - DNA, 2830 bp, Emericella nidulans
ctcgcataagcgttctgctagcgtgctcagtaatgggagcgacaaaagctcgaagcggcagaagaaatgattcagactttgtaccttacgatcattacttacgaactctttaatatatcagtgtacgaatatctgtcctcaatccccttttgtcatttgctatcaatacttttagtacttggttttcgtacgtcatgaagtttaaaaccatacatttccgcgtgccttgtccttggtctgaggatcgaattcagtcagccattgtgacgtggctacctttgccgtttctcagacactattactcaggaatcgagcaccgctcgagacactcttcgtacaagctatcccagtcccctgaacttcctgtgcttgtccgcacgggaggtctaacctgaggactctgatgaccatcgaactgataccccgagtatgcagtgccgttgatttgcaccccacgaggccgttctctgctagcggacgctttcagtctcagtactcttgtcgcagtccgttgcgcaacgggaacgcgattcgatacagcaatgttcgctaccgcgcggtctgctcgtttttcaaggttacgggcaagctccgaaacctttcgtcttgttgcccatgcaccgcctcgccggcgaagcgttgctagcttctccagcagttgtgcctctgcatgcccagaggatcctacactgccctggtgaggtccttgctggcccgaggtctgcattgggcgaacccaggaacaaaattcccaaggattttcggttgcttggtttgactcttgttggacttttttcttatttgtgagaattccaaacaaagaagagccgcctgaatcacggcttcctgcgtcactatcattgcttgacttcagggcaaagctcgaggccgcccagcgggaaaagttgaatttctgaaggatagatgatatgtcaaaactcgaccggtccgtttttggaagcccttgattatcttcttttgccgtaggcgacctctgctttacagaattcttgctcatgatgctgccagcgggtgtccccttagggctattgatggatttacaaattccagaccctgcaggtccgcggagtgtttgttcctgtggttcgcttgaactatctggcgacacaagcgtatatccgtaaccaattcgtcgaccttcggacatccatccgatgcttattctgcgagcaggaatgctagtgtcgctttcgtgtgagtcgaccaaagcgtggcttatcgatcgatctgatccaaaccgctcagtaaacttgctctttaatgcgcgagcctcttcagcagcagcagcagaagcagctgcgtattcagagggcagataaggccgtcctgctggtacattaccagaagagccctgagaaaaactgggaatgttcggctcatcctgatcgaagcctgcggatgatatgctggttttcggagagtacggcgatcgcaaatcctgaatggaaccaggcagcgctggtgacagcttcgtctccgctgcatcccagattgggggcattggtgggttgttgagcgctccacatctgttctgattccacgcccctgagcagctagcggaacgattctcatctaaagggtgattctggggttgtatgtgagaagtggatccggaagaagcgagcaccctgtggatattcatctcgcccaggtgcacagactgctcgccatttgttatcacgtcttttccgggccgctggtgtcgttttctaacagcgatttgcggaggacagccggatacggactctgcggatgcgccatagcccggcggtggttgtgcatgatgactagggtaatccggtgcttctgtattgtttctactgctggaacgtcgacacataccctcctcaaaggtgcctcctccggccattggggacctcattggagccggcggtgtatgagggtgatgcatcccttgaactcttataggcacaggcgataccatcggtgatggccgttcttgtgcccaggctctggtcacgctggggcaaggactcgagggtctgttattgaggctcccaaggggacttgcaaggtccacgttttggaaacttgtagacggtgactcctgcatagcatgacgggttcgatgttcttgatctcgagagcgccaagatgattggacttcggcattatctccgtggtatgagcggtgttcatgaaagtcaccgttgtttttaccgcgcccccaaaggatgctttcggggaggtccaaatcggcttacccaaagcggagccttttgacaataaaaccatgcctcccattttggaatgggtttaaccatcaatttggacgcctgggaccggactgtcctgcgaatccttgaatatctttttaacttaaaaataccccaaacttagaaactagatggtctttccaaacgcagggcagggttgatccaaaatgaactatggtccatccccatttgggccgttttcagtttcagtttagaagattttttaaacctacaaaaccggcatgtgtataacgtcttattctacaataattatggctgtcagttaggggtcttaaagaattttttttaccttcgtatgattggaaaccctctccttcaatttttttctccacaatagtctgaattcactgcaaaaaacccatactttctatacccctatcctttgttatttacgttctcaatcactctgccagttctcccctttcttttccttttctctcaacttcattttaatttccttgtctttcctatttaccctcttatttactcctttcttgtaatttccatccccacgattattaattctttcctcctctctttcctactactac

SEQ ID NO: 4471 - DNA, 7560 bp, Emericella nidulans
aaacagaaggaattaacacaatagagctcgagagagaagtgctgaccccaccggtactagcaggaaaggtgagactaggagagaaacccgcccagccatccgacctctcagaagtgggaacataagaggtaataagaacaggtgaaaggacataggaggtaatcactgtagaagcagagactgattcagctgcggcattgtctgggctgataacttgtgccactgcgtgagcagcagaagctatcaagctacaggcataccacagcataggcagccacatggttgtgtagagtagatgtaagggagcttgggcacaatcggtatatgaaaagtagtggagaggcgagtgtgagaagaacaagagccaggttgaaaggagatggcgagatatttctattaaatacagagtgagcgagccagcagggccaaagcctgcagagacacttctattcacatagcatagttactagaaaactgccacaagtcatgcagcgtatctagttcaatatgtcagggacttgtacagtacaattgatagataaagcctgtgcagagctgtggtgaataagcacaaattttcagttactagtccctaaccaaactttactgaccttgggataatgcatagggatatataaagactttcatctatcccatatcaaggtttgctttctggatgatctgaaaggaaaacggcagcgtatttcctggctgcgacagggaagcaggatctcagtatgtccagtcaaatggttgacagcaaccttactttgtagtgtgtatttgttgagagaaggcttgaacacactgtatgtcatccatcattctcaccttcaggtagcgtgtgtctggtgaatatagctgactgttttatctgcagccttttcttcatttttctctgaggaagcccgtaagcatctatttttttctccctttgtcagagtttttgagaacagtcattgccatagattcaatacagcttaggaaaccgaatattctgcatcgattacccccagtacaagcttgacgagacaaatagcttcacccagcccgggtccggcaggtaatgtccacagtgtcaaattgctatgctcaaacacttcaattaacttatgctgagctccagttgcagcaaacagatagcctaccgatgtcttcgagaaaggcgagaagctaaccggttactcagctactctgctggcatttggatccctgtctttttctaggagtctccgtcgcggaagtcgtatctatgcctcgactattctggacaactcttgacatccacgagactcctctgagttcacattcaattgatgtggtgcggagtcaggaaataaagtgatgttgatggtagtgaaggaagggggaataaagacagcagaagaggtctagcggtcttgaggggagactatcttgacgatttgctgaaatcaagggccgatcctgtgaagcctagcttctgaaccgtattgatacccttgtcagcgcaaatttaacaaggctggatctaggaatcctcctaccgcagaaaaagtttgtagtctaacattcttggaagccattcccatccagattagttactattcaaacgtccaagtgacccaaggccgcatcactccactttctccttcgtcgccatcccctctctcactgcagccactacgtcctcaacagttgttcctcgctttctgtgtcctatctgctccgaacccagcaccgtgtcctctgcaatcactctataaacctcgccgatttcgcggaacctacatgataagacagccatgtgttagtaccgggttaatccccttgaatcctcgtctgcaacaaggtaaattaattggtaggcgacttacaactccctcgagaatcccccttcatctttcatcatggctcctatctgctgcatctcattaatccacctccaagcctttggcggcacctcaacaattcccttgttcacaatttccagtgttcccgggttatgttttcccataaaatgtttcagctccgggaagactcccatcgaatccgctgtgacgaatgactgaatcgccagcgcgaaaacgcccttggtcatactcgcgaagcacatctttaaccctgaggcagcgccgattgatgaagaaatgtgctcgacgttaagggtttaatcagatgtgcgtatgctggtgttgaaggaagtgaaggaccggatgttactagcgaggggagtgtccattgttttccgccttctgttgaggttgaagtcgtggtctggcgcggcggcccgccgattatcccgccgtctatgtaaatgatgtttggattggagctgagtaggctatttgtgtctctggctaattctggtgccgtagcgttgaggtcgagatagtagagaggttggtcccttgaggggtagggtggtgtattatcgtaaacacgctgcgcggttaggaaggattccttaggggggacgattgagaggataaccgaacagagcgagacgaggtcttggatggagggacatagctgaatgttgattgattgtgcccgatcccgtgtgcgctcactgactgactgttaggtttgttgttctctatcactgagctggatgagaacttgcctccgatcttctgcgaacgttgcaactcggtatccatggctgatcaggagatgggcaattccgaaacccatttcgccgataaacagaatgccaatcctgggaatatgagcgtccattgttgctggaaacacacccctgactgtgatatttgtgcttaggaagatgtcgagtttgatatctactgcagtgctgatctgtctctcgatgcggggttgacgcggggtggtagtcctaatcgacttcaaccgatacgcccttatatggcgtcatatatcttccatagacgagctttggttcagcattaatgctatacaaagcatatttacgttgcattcggcaccatgaaatatgactacttggtttttaaaccaagcgttatggtgaatacgatgcactgctcaagtcattcttggcaattagggctgcctttcggtccccgatcgccgatgatcaaaaggcttgaggatgtgagcacggcccatcgctgctgctattcaaatgagtcgaattagaagggtacagctagtaaaacattgattattgcacgctatatatttagaaccaaggtctgcttcgtctgcaaaggtttcaagataggagtatttaactgaatcattccatctgatcgctgtctaataattacctaaatgtacacgaaaaaggcaaagagagaagtcataaggggcggatggttacagaaccaaaaagacatgaggaattagtgaccattttacccagtaatcactcgccgaggaacaccaacctcccgtgctcgcttctcgcggaaattgtgcagacgctctccaatcaggaagaactcatctcggatgctcaccttccatacttcgacttgacggtagaccaggtaagcgaaccatgccagaagccccatagccaaagtaacaggataggcatagcggtagaccttggattgcaattcgggacggaaagagaataatatcagattcgacgcaaagccgagacacagtggtagcgtgactgccaccagggcaagaagggtcatgggaaagagcaaagctctagttgcgagtttgatattcggtttcagccagccgtcgcggaaaatacctctgagaacggcagctgggcgagatcttgtatgccacaaagccagcttcactgccatttggacatagagaacgcccaacgtccaatcctggacaaagtggaccacaagatcattttcgtggccaagatatgtgtaaaccggaaccagcaagtaaagctctatcgcaagagcaaataatgacggcagaaagatgaaaaacgcggctattacgtagaggatgctcaagccgcttgtcagagcatttgccatcacacgagtcgcctcacccggagaccgcaaataagggcctaagcggcctctcaccaggcggaagccagttcggcaggaaagtaggaagtaagcgacaaaacaagcaaaccccatgccatccgatagggcgtatacatcatttactggccggcctgggacgtaaaaggacatgatcctgcgcccaataaggagcgggacaatagtggttcccactccagtcgcggccgcaaacacccagatgaagaaaatgaaggctgcaaccctagtcctaaagaaaggcgggatgtaaaccttagtgaattgattattgagtcgaccatggagtccttggtcattgtcgggctttccatcaactcgctcgttagcttccgttacttccagaaataccgggcttccttttggaatgcggacctggtctgaagccggagctctgacgaactttccatcgcgttttccctgcggttcggttttgttagtaaaagcagatttctcatcttcatcagtcgcaggacggtcggggcttgcgttgttccctgacagagagctcacgccttcttcgtcggggtgtctctcgccaaagaagaaatcggaaagccgtaagaagcgggcacactttcgaaaccaccatctgtataagctgtgcagcccgtccgagggttttagttctttgaggacaagggggattccgacattatagaataataggtcgataggaaactcgaggacaggatctttagacgaccagtgggcgggaagtacaccatcaaaaccgtagtagattccccagactaccccacctaggcagataatgacgagagcaccataaacaagagcgctaaaggcgatcttgcgaagctgcgtggtgatattccgctcaagaacatcacgaacagggtggaaagtagggtcatcagggtcgcggatgaaatctagaaaaagttagtgcatgctacattgtccaagaacgatgacttacatagaacgccacttctcatagtcttcctgcacatggagacgaagagagcaaagtgaaacatgtaacaggtgccaatgaaccagtgtacgaaaagagaagtgaggggatattccgatgtaaattcgacccgtgcagcaacggtagctccctcgaaaagaggcagcaatgcaacgtccaggagagcaccgcaatataacggaaatactatcatctcaatgccgattatgaggatgaccttcatcacgccaccagcttgatgaaggccttctgccaccataccctcaactcgctgtccttggtcggcgccagagatgaaccgggcgactttgagatagcccaaaccaacggtagaagcgagaaggtagcccatgagaatggcaatagtgcggtccttagtgtcccaaacagctaaactgtagtcgatcgcaccatcatttgccgagagaccaataacgttcggactgacccaggctgacggaggcatgaagaatctggtgtaaatgtcatggctggcatcattaacttgatctcgagccagagctagaagattgccaagagtcgatgaattttggccgagaaagaatgccttgctaaatgatcccatgtgcaatggaaggtcgtggagaattagctttcctagcaagaaagccaggcgaaatagcgacgcaatccgtgcttcatggatctttaaagccaaatgggagaggacagagaacatgggaacatcagcttcatggaaaacaaagaacgtattgatcacgctgcctaatcgctgactgctagcatcgatgagcgataatgaggcactggtgatgggtctcgtccactcgccgagagggacaatagcagccaatgggctgaaaaccagcttgcagatcatgctcacccagtacatgatatatcctaggctgccaataagagtatcgagaaccacgtccgcgaaaactgagactgccgtcatgggaacaccaaggacgaattgtatcgggtgtgctagaaggacaagcgcgattttccctgcaagatatggaagccagataccagcagccacggtgaaagagattaatagcgcacagaaaacgccattctgcaataagccgaaaataggaccctgcatgccgataagttccaggataccttcgagatcatcggcttcttcgaccgcatcaacatcgttctggtcaataccgggtagaatggcatcaacttctacattacgatcattttctgggtgctccaaatgctcttcgacagcagggtcatcaatcaaatcctcctcagcatcaggttggtgcccctggttagggtcgtcagggtcaaggtcggcccagaaccaatcaacaactcttcttgtcagacttgtttcgggttcagccatagcctgcgaagttgctgacggattcggtgattcttcgccaaattcagagttagccactgctccgccaccaccgttgtccgcaaccaaaccactactggaagatggctccgttctgctgtcttcagtttcgctatcggaaatagcggacgctgaggcttgttgagattgatcttgatttagcggcgcacttgaagatggccaggtagaggcgtatgcgttaggcatgttggagtcagcagaatcggcatccccctggtgtgggaggcgaggactaaaggaaacccgtgggggcgcaagacgagcgtcatccacagtttctgcattcatattcgtggaatcagatacaatgaatcgaggatagccattaattgtctgctcaggtctgttgtttgtcgtgacattccgaacaagttcctcgaagcgaccttcttcgcggataattcttgacatttcatcgagatcgccattggagcgacgatagatatccctgtataagtccatattgatgccatattggggctggtcgatctgaggtcctcgctgagaattagcaatatctagaatgaatccatcgtttccatcagaattgtgccgtataggaggcgtcaccggacctccagctactccagcaagcaagtcacgtatactcaaaggcgcttcgaagtccaagggctcccttgctggttgttcagatgtggtattcctatcgtccgcaagttcctcttggcgaataaccccctgcccgttttgtggaatctcttcctctggtatattttcaaaatgttcggcttcgggttcaggatcacgagcctcgacttggggacggttgtttgcaattagctgatcggcagcttcacgctctccttctgcaatgttgtcgagaggttgttgctgaacgacccactcccgaataagaaatatcacaatgaaggagaccacaactaagagtgtaataagctggccttctaacgtatcaataagaatgttgttgatggtgggagatggggtcagcgaattcagaaacttgacatcagagagccatgagggtcggcgtttgagaggggttgccgtaacgtttatggagtcggtggagccaaaacttgatgacatcgcgggaaagaaaagtgtagtaagagcctttttcatgaggttgagcaatataggttcactcgcggagaaaccgatcattgacgaagtaggttcgagcgagggttgtcccgcaaccgagctaggttcagccactactgagctcgccaccaatg

SEQ ID NO: 4472 - DNA, 2994 bp, Emericella nidulans
gcgatatgttcctggcgcagatgggccccttaccaggcgcgactcaagaccaaacgcactggcaacacacgatttcttgttcagctcgtcattctttacttgaccaaacccagtaccgcggagttcgaatgcatcagttgagtaggcggatggttgatcgggagaggcgatctcacagtgtgaaatatcccaaattcgaacggttcgatcatcgctacaactagccaatagccttccagaaagatcaccacggaggttggcaatcttcggagatatctcaacatcaaagatggacccttcgtgtccggtaaaaaagtgatgtatggaactgactgcattggcagtggagccattaccgccgcagacaaagcatgaccagactattatctcaccgaacactgtgccagctgccaccaagaggttcgtaggagataccgggacaatctgagctgaatataggatggatttgactccggctactaattgtcgcaggtgaatggctcttctgtttgcctcctctaccacagacatgccaagcacagcattgtgtgctgtcaccagatacgctgcactgccatccgtgctcgggcatccagctagaacccaatccggagccagatactcagcgcttgctgctaccaaggacacgacaggctctccgcatgagctgattgagtagctcaactcaacgagtctcaacgactgacctccccatgccacaagctgaacatggcctgttgaccgaccgtctttttgaagaacagtatagccgtgaacgtggtttatcttgaatactcgtaaataggcgagcaccctcccgctgctctcctcgaccaggcgcgcaaatgtcccctggcccaggaggacgaatctgaccccaccaaggtcaaataattgaagcgcggtaacgggaagacaagcatcgacgtgctggtactggttagtacgcaacaaaacagtagggaaggtacttaccttgagtgaagaacccatttttgtagcagcaagctacatcggctcgcccccgcagtgtcaattgcttgtagaaaagctcgaagcccgcgcataaaagcccaaaatcccaagaaatgaacgataagttaagcgataaggattatgtaacccgcttatcgctatggtgccgaatcaggtataattttcacgtgatctcgtgatgctcgtgcctagtggcgacgcggagagtcgtgcctcaatagatgatctcatctgagcagccgtgtcctgactttggcatgtctccttgctattcgagctactacttctgcgcgcctaggccaccatgggtgtccaaggactctggactatcgtccaaccttgtgcccgacccgtgaagctcgagactcttaatcggaaacgactggctgtcgatgcgtccatctggatctaccagttcttaaaagccgtccgcgataaagaagggaacgctcttcgcaactcgcatattgtcggattctttcgtcggatatgcaaacttctctacttcggcatcaagcccgttttcgtgtttgatggtggcgccccggtcctcaagcgacaaaccatcgcgaaccggaaaaaaaggcgagaggggcgcagggaagatgcagtgcagacggcgagtaagctacttgctgtgcagttgcaacgcacagccgagcaagaatcagctaagcgcaggagccggaggcaggagaacgaggaagacgttccagataatccggtgtacgttgaggagacgttcatgacagacaagcaaaaacaacagtcgcggactttcaagaagaaagatgcctatcatttaccggatatgcaggtctcgcttcaagaaatgggagccccgaatgatccgcgtattatgtcgcaagaagagctagaagagtatgcgcgccagtttcaccagggtgaagacatcaatctttacgatttctccaaaatcgactttgatagtcctttctttctcagcttacccgctactgatcgctacaacatcttgaatgccgcgagacttcgcagtcggctgcgtatgggatactccaaagaacagctggatacgatgttccctgaccggatggctttctccaaattccagatcgagcgtgtgaaggaacgaaatgatctgacccagcgtctcatgaacattaacggtatgaacggagatgaggctttttataaatccggtcagaggattgcaggtgagcgtggcaaggaatacgtgctcgtacaagacaactctgtcgaaggcggctgggtattaggtgttgtaggtaacaaggaaggtggtcgggaagaaaagcctatcgacgttgaccgatattttcatcatgaaatcacaccggagcccgaggcttcggaggatgaagggggcttcgaggatgtgcccatcgagggtctcaaccgccttccaaagctttcatttctgcaaccaggcgtgtttgatgattcactaaggcagcacatacaagggtcccaagggcaggatgcaggggccgattccctttttgtcgaagatttcaacaatgctcaacacactggcgatgtttttgatggcgccgctgcaagtgaggatgaagatttgcaaagggcaattgcaatgtccctacagtccccgaatcatatggaccacgacgcagaaatgccggaaattcctgtcaaccgggccacttcgctggaacctcaaagcaaaccagcagttgaacctactattgagagcgacgacgaattagattttgtagccgctgtggcccaatcgaagcggaccaaggcgcctgctaaacctgctccgacccaaactttcgagggcccgctgccttttgaaactctcaagcaccgcaagcctctcaacgtgaagaaaccagaaccagtcgagaatgatgcaggtggtttcgagaagggaccatcaaaggaggccaaggaaaatgtgcctttaccaccgtggttttccggcccccagcagaattcggagttcatcgctgatcagaatgacaacgacttgga

SEQ ID NO: 4473 - DNA, 3719 bp, Emericella nidulans
  unsure (1)..(3719): unsure at all n locations
ccattcatgctcgtgcacaagactgcttttggaaccgctggtgcctacactggcgaagtctcaccactgtctcttagctccttggtgtctccatcgttgagttagctcatgcgagcgtcgctccatcttcggtgaaacagacgaacaggcagcacgcaaggccgccgcagcctgcgctcaaggaatggtgcctttagtgtgcattggagaaatcagcgcccctggtccagtggcttcggcagcagttggacttgcagtacgggaatgcgaaccacttgttcgagcgatattgaatgccattccggccgatgcacctatcatattcgcctacgaacctgtctgggccattggaaagcctaagcccgcaagtgtggaccacatctctgctgttgtggatggtcttcgcgctttaatcggccggagatcgggagacgttcgcattctgtatggaggcagtgctggccccggtctgtggggccctgggggtctggggaaagccgtcgacggcatgttcctaggccgattcgcacacgatattgagggcgtgcgtaaagtcgtccgcgaagtcgaggaatctcttacttgaaggatcaaagcaagatttggagcaacttaattacgcattttacggcgcaggcggatagtcatagaacgcactggtcgagacgggatcaaagaagcagcatacaagcacgtgtggtgcaacgatcttgaaatagaacataatgtgatgacatgatatacctttttgcgatatttctcctccttagctggaagattatggctctatgttccccgcgagccgtgctgcagcacacaatgcaatatgacctcatgaagcttaccatgcagtgatattgtacagggtacggcgttgtgcgcacagcctgtcgatttatgtgatatctgctttgatttgaccatgcagggtactttcgcatgacaagaaaagggccagtgtgcctgcaacagttcgctatcatctacggaccagaatcaactcctcattgtactcttatcaccgttttctcttttcggcatttcactcctttttcgccgttcgaagttcttgcttcactcgagtgacagtgccgacgccaccatagaccacaccggtgtacatcatggcaacagatgcccctgtgtctaaaacagcgtgagcctgcttcccgttggtgataccacccgaagcgaagataactttgcgcggcagtccgcttggcgcttccacaggaggaacgttttccgagcctggctctgtttgcgctatggtcgctgctgaatccttggcggatccggccgtttccgactccgcatccagcatggagcggtaccgagccacaagggccactgtgcgatcgaacagctgtggacctgaatacccgccggtttctttcaacgttgcctgctccttggccggaagagtgtaaccttggggtatagggtcggggcgacggtttgttgtgtttccgacaatcactccgtcgacaccggatgctcggacggcgtcgcagataccagagacttgttcatctgagtcttcatccggactgaccttgaccataacatatggtttggtcttgcggttcacgctctttgccgcgccaacgacagcactcaagatagctgtgagcggggcagtggcttgaaggtcacggagaccgggtgtgttggggctcgatacattcacaacaagaatatcagcgtatttggccacacggtccacgcaatacacatagtcgcgcttgatggcttcaatgtcgccgtcaggagtggccttgttctttgccacttggacagctaaaagcttaccaggctgaagactacctggtggcacaccagcttcgccgtccaatacacgctgcttagccgcatcgtatgccccaaatccgtttgcgtaggcaaaatcgcgtactcgttgctccaagatagctgccatgtgatctgcgcctttggagttgaggccgtaccggtttatcatcgctctctgtgatggaagtcggaatacgcgaggacgcgggttaccatcctgtggtaagggtgtcgtacccccgacttcgacaatggcaggaccgatcgcgaacagcggatcagggatctcagcatgcttgtccaggccgcccgatatgccaattgggtttgacagtgtatacccaaagacctatccgccataagtattagggccttaacttccatcacaataaaagaccacccacctctgtcgccagcgccccatctccatccggatccccccgttcccttggatgcagaccatacttatacagcatctttaaagtatcgacaccaatatgatgcgcatcttccgcatcaggatacaatgctctaatcagcggcacaacaccgtaccgatgcacactcgcccgggtgtccgtcccgtagacatatccaaccagcagcgtcagcgccaacgacgttcccaggaccgtgcgccgcaggccccgtccggcctttttgggtgcctctttgacgtttatactagctgactcggctgctgattcggccgttgcttttgtagttgccgctgcggctccgctgtcggaggcgaatcgaagttgtctgcaggttagtgggagacggcgacaaccacccagacgggaggctcctgaaaaagtgagttttcggaaagaattcgtagccattgcgccgatgcttcgtctatgcttatatagtagtgttgaattgcaggattggtttcgagtttgtagacctatgtagaccacatattttagcaagtgtcctctctccaaacactcgaatcaaatcataatctagaagcaattggactcaattcgatagcaactaattttcaggtctggaaaatgttcgcgcttccaagatagttaaaccactcaccaacctaccaagtcaactggcctaaccacaaggccaattgcagacctcgacctaaccttccaacacaagcacaaaaacaaattgtcttaagcgccaaaatacgagatcgtctctgtaaggctatagccgaggaagcatactccgacgaacttccgggctcggaatcggaggtcttcagtacaccgctttgacaagaatgtggagtgtgtgacggcggtcaaaatacaacgggcagaactccatgtgcgaagatgcagtatacaagtacctggcgcacggaatgttgtctgaatgtattggctttgctgtgtccaaagaagtaaggttgttgcgaaaataatcttggacaactatcaagtacataaaagagagaaggaaggaaaacatcatggtttcgctgaactccaattcgccaggtacagtagatgccacaaataaacagaaaacccgattttgccgcctgacgccatatggcataaggtcaagagtcaaggaccaacccaggccggagccaagaatcattagaagggagtttgtatagaaatctttcaacgtttctagtcgcgatgataatacagagcgtgatggcgaaggtgggataatgagatcattcatcactcattttatcggcgtcgtcgttttnntcttcttcctgaggctgtgagtctgcgtgtgtcacatcggcgtcctggggttcgggctcctcagccggctcagggggaggaggcatcgtcttagcgaacttaggatcaatagcagcgcggtaggttgagcgtttgtaaacttcagcctcctctggatcgcgaaccataacttgcatttgatgaacctggtcttccttgatt

SEQ ID NO: 4474 - DNA, 1495 bp, Emericella nidulans
  unsure (1)..(1495): unsure at all n locations
ctagtaacggccgccagtgtgagtgtgatcaattatccaaaagttcaattcacggccggggtatctctaatgactattacggttggccagtattacgggttaaagataaacgctaaggctgctccgccccaatccccacaggatcagccccttgaggcgcggtcatcgcgactgcgagaagtcgtccttgatgtcatccaacagatcattcgcccagtctttgatgtcctccactttgtcccagatgctttcccaccagtctgcgtctggttcatcctcggcgtcactttcgggtttagcgctgggcgagactaacactgaccctgcatcggaagatatggaggtagaagaaactgtcgtgctggagacagcactggaggtcgcgctggaagagatcgttgcgatttgtttcgtggcttgcgtagncggaggatcggaaggactgtcgagaactggcgcatcctcatccgagtgaaggccattaggcttcaatggcaggcgcagtgtcccgttgtttggatgaggcttgataccaagagagtcgcacaggatattataaacattgatgttttctgtcatgtcagcaagggaaatttagtcggattggggccacttacgaaaagcatcaacccgactgttgggtggatgcgggaacgcagggccacgggcgataaaaattgcccgcatcaacggatgttcatggtcgtacccgtgaattcctttcggatggtaaaactgaccgttctggagtgctgcctgagcgtcgaactcgggccgctcaacgatggcccagccggtcttgggtattacccatagaggggcgatgcgatcgttgttcttgaagtgataccgttctggcatgttttcgcgggtgtagatctcgatcgcgtctgagtactgagacgcaacacgctccagctgatcttgaagggtcttgagatattcagggcgcttaggacggattccgcgcaatggccaaccgtcgatatggctggtcaggttaaggtcgatcagatcatcgagctggacgagccgctcagtagaggtagaagccataccatgatccgatacgatcacaatattcaccacatccgtgagattgcgctctcgaagacctgaaaaaagatccgccagcatattgtctgcctgtgagatcgttttccgaatttgggtactgttgggtccatatttgtgaccatcagcatcgacattggggacatacgcggcaataaattgcggtcgctgagggctggacgtcgactcctgctcgagtccaggcaggtccagcagctgtaaaattcgctcagtttttcgcgacagggcctctgagccgttatacttatcaagatacgttggctccacgcctccgatatgcgcttccgaccctggccacatgtggatagcactcttgacgttctggttctcggccgtcatccaaagaggctccgcgttccaccatttcgactgcatgctgacggttggatgcgtgtagtaa

SEQ ID NO: 4475 - DNA, 2751 bp, Emericella nidulans
tctctacttattctcaacccgctctcatgaagacggtatacattgagttttatgtaattaaacctatacaatgaacgtatataggccgcagcggtattctgaatgatattcttacataaacaatccccaggccccctagtaccaacaccagtgcccttgttataactttggcactattatatgaaatcttcagttcatcactatgcatataattgagaagaaatctagagaaatcaagactgttcttgagtcgggagtctgctaaacaaagcagcacaggaatagtatagcacggaacaacattggcgcggcttccgagtagcggacagcttgacagtaaacggaggctctcaaacagccaaccacttagtcaccttgccttaacatatcgcggcaaatctcttgaaatggggtctctttcgctcttctccgtcaatgctgtccttgtgatgtcggccgatgacggctctcgcatcttcgcgaaatactactcaccacctcaccccccagccggcgctgcccccaattccaccgactacccaggagccaatccctatccgacgctcaaggaacagaaggctttcgagaaaggactgttagagaaaaccaataaacagaccagcgacgtgatcctgtacgacaatcgaattgtcgttttcaagctggagagcgatgtgatgctctatgtggttggcggtgcggaggagaacgaagttctactctataatgttgttctctcgttacgtgatgctttggggatacttttcaagtgcgtttcattatagctataaaggatccgggcggacggatactaacacaatatttgtttaggggcgccacggacaagcgcacaattgtcgagaattacgacctggtcgccctggccattgatgaattgatcgacgacggcatcattcttgagacggaccccgttttgattgcttcccgtgtcagccgtgctcctcaaccagacgcaccgaacctaaagagtatcgatctttccgaacaaggcctgctcaatgcctgggagcttggaaagcgacgtctggcggagggattgcgacagatgtagactggaggaaaagcagacttattatgttgcttttgtacttgcatgaatattgcatggacgcttgtttctcgttcttactttatgcgatttggtcgggttcggcgcggttatatgcgttgctcattgttgattcatgacttattctattcactcgattccctttctttgacggtgttttcaagagctgagagctctatagaattacggcgggctgtttttctgtgtcgaggattagctggtgactcgaagtagacaatggtgactggacagtgagcagtgggcagcatgccaacactatgtttacaaataaatgtaaatataaccaatcaatgtccattattgaggccacttcgaagttgcgttggctactggctttctagaagccctagaatgattcagaatgagtgagaaatgccccgcatacgtcacgtcttaaagtcgggcctgcacaaaactctttgctttctccgacagctccatgcaaagggcactaggaaaacaaaccacaaaatgaagcagagatactcttctctggatgttcaggtaagcgcttgctagaaacattcgaaacaatgttccctaattatgacacctgcaggtaatatccaaagaactggcctcagaactagttggccttcgcgtgtcgaacatctatgacctttcaacagtatgttgcataaacaaatctgtccctattgcgaataatgaccccttttcctacctagagaatcttcctgttcaaagtcgccaaacccgaccaccgcaaacaactgatcgttgactctggtttccgctgccatgtgactcaatactcgcgagcaacagcagcaacgccctccggcttcgtgagccgccttcgcaaatacctcaaatcccgccgcatcacttcagtaacccaaatcggcactgaccgcatcatcgacttcagcttcagcgatggcatgtatcacatgttgctcgagttcttcgcaagcgggaacatcattatcaccgaccgagactacacaattatcgcgcttcttcgtcaggtaccaggtggtgagggaatggaggaagcaaaggtcggtttgaagtacaccgtgacgaacaagcagaactacagcggcattccgccgatcacgcgagaccgaattcgagagacgctggagaaagcgaaggctcttttcgcgcaggaaaacgacgcgcccaagaagtcgaagaaaaagagtacagacgttctgcgtagggctctatcccagggattcccagaatacccaccgctcctactggatcatgcctttgcaactcgagccgctgaccccgcaatgccgctcgatcaggtcctgggcgatgcgggtcttattgatgtggtcttaggtgttctagaggaggcacagaacgtaaccaaggatttgtctgcggataaagcacatcctgggtttattgttgcgaaggaagatacacgtccaaagccgccaggaccggagtctgaaaaaaacgactcgccctcgaagcctgctctactctacgaagatttccatccattcaagccgcgacagtttgaaggaaaggacggtttcaccattttggaatacccttctatgaatgcgacggtcgacgaatattactcatccatcgagtcccagaaactagaatcacgattgacggaacgggagagtcgctccaagagagagcctgag

SEQ ID NO: 4476 - DNA, 2484 bp, Emericella nidulans
acgctgttttggtaagtaccgcctctcccgtaccttgatgataaagagcggggatggggacaccttatttgcgttgacgggagatacaccattcacttctgttcttcacaaagttctccagccgttgccggcccgccgccggtacgaattggacatcatcgagagcctttagtgcactgctttggatatcggccacatcggcgaaccattgttcagtagccctaatgatgatcggttgctttgatctccaatcatacgggtaccggtgtccgtagcggtgctgaaaaaggagttgcccttgtgactcaatgtactcgagtacagcaacattcccatcggccagcacgcttttgccactcaatcgtttcgggtcatcaggcattgcgagatcggtgaactttccatggtcatcaaccggggcaaatgctaggattccgcggctaagacaggcttcgtagtcctccataccatgcccaggggcacaatggactagccctgtgcctgagtcagcggtcacgaagtccgcagcaatgagcggctgcggttccgaattcgccgctttaaacaggggctgatacgtagtgttgtccacgagctctgagccgagaatcgatggcacaatcacggagaggtcttctttcagaacaaattcaagatactctaaccgagattgtgcgacgagtagataaccatgagctgccgattcgacaattgtgtattggaacaaagggtgtatagcaatagcagcattagccggaagtgtccatggggtcgtagtccagatgacagcactgatatcttttccttgcagcaatgggtcccgcttcagatgcgaaggaactgtaaccagcgggaacttcacaaaggcagctgtagaaacatgatcatctttatactcaagctctgcctccgcaagcgccgtgcccgttgaaggcgaccagtacaccggtttgaacctccggtaaatgagacccttctccaccatttcgcgaaagataccaagttgccgcttttcgaaatccttgtccatagttttccaatgattttcccagtccgccattaccacaaaactccggaatccgttcatctgtttcttcaccgtcttctctgccaggtttcgcgcgacttttctcgtgacggcagcatcaacaattccgccctcttctcgggcatcctttcgcgcctccagggccttcagttcgatgggcaatccatgacagtcccagcccggcacgtagcgcaccctctttcccgcaccgagttgtacacggcatattatgtccttcaatattttattgagggcgtgaccgacgtgaaggtcgccattcgcgtagggagggccatcgtggaggacaaacagtcgatcggcaggcctttcacgacgttgccaggcatagaggtcgtcggtgcatcgctttaggtattttgtctgatcggtcggagtcacacgcgccgggaacgtcgactttggcagctttagggtcgacgaccacgaccgcgccagcgtccgcggcagttcggacatgctaccgcttaagcatatcctgcttaactggataataagtttgcgtcaaagttgtggcgcggaggaaaggttgttgctgcaaatcaaggactccagaaaataatacagcttggcatctgagacccacgttcctcgcggaggtcggcccaagacaaacaaccttgcaccctcgagcttgcgcgcaaggatgattgaagcctcaacaataaagcatatattttataccggtaaagaagcaaaaaatcaaaatcaaaaaaaaaaaatcaatgtgagaaataattcgccactggctagctagaaatctacctacggcatagattcacaacatcaatatatagttaaacagcttacggctccgttcttcatgacttcaaagagaagaccgggaaacccgaacaactccgtatttcctaagccaccgtcatgcccaccgtgtacagtcttctgtcccttgcctgtgctctcctcccatcccccaaggaactcgacgctgctttcagggctatcaccccaccctctatttagcaccattggtctttcaagaactcgctcttccgccgcggttgcatatgatcccttccatacgcttttgagctgctgcgagatcaggtcgtagggtgtttctgaggtaacaacagatacggaggggttgtctgaggggttcagctcgatcttccagcgaccgcgccggtaccggttaaacggatatgagcccggcacatttccatgtagaacaatcttagtcacaactagttgggacgaaggcgatgggggagttgggtcatcaagaccagagcctggaaacgctggaccaggtgtggtcggatgggatatgaatgcgtcaaagccatgatggaagtagttgaagaagcactccgacggcaacgaagagggatcaagggcacttgtctgcgaaatgccctcatccgaatcatcacttacgctgttatttgacgact

SEQ ID NO: 4477 - DNA, 9111 bp, Emericella nidulans
  unsure (1)..(9111): unsure at all n locations
aaggaggatcgtcgtctctatcagacaactcttcaaccagctcaaccacacacgtgtgtctgccattctgttcgttcttctcctttgaagagggtgcaacataaactatcaatgggctcagagagtatacattctgcttattgtttcatcatgcattggctgcttttccatcaaatccggcgcggtcgtcttagggttagcttcccacccgccctcggcagggtcacggtcaaaatccaacagagtcccttcttcaatcgaaggcgaggcatgtacagcaatttcgattgtgcgctcaggacattgagcggtccaaaaccaaaggaaatcttccagcgatcgacgttacagtcactggagggtaaattattgctggctattgttgcagcgtcagcatcatcacgtaaaccgagaccaaacggatcgtcatccgggtgatatttgggagggccgagtgcttgatggtcctgcttggttgtatcgcacttcttaagacatgtaccgagctctgcttcgccaatctgatgctgtgcgggtcgattacattgtaggtccgtcgagagggtcgttgctatgtcgaggcgctcatgttctccaacagcgatctgaccaagaattttgagaacatccatgggtagctaattaaggcagctgctccattcttagtgctggcttgttatttgatagtctttcatccagtggctttctctcccggtgctttgctagtgctgtagccatttcctggtaggtaacacgatacatagcgacagccaggggggcaagagcatcaaaggttcgaccgccaaccttttcaaaggctcgtttcttgaagttttcgcgtagggctaaggacattgcgccaatatcctcatggaacttgtagtaactatctgtctattgtagcatgactaagcacaaacgtcaaccacacctcaaactctgtcttgatctcgtgctgtgccgttattcgacggatggcaatatcatattcgtctttgagtctcctggcaaagccatatatggcatcgtggacttctacattacagttcaagatccgcttatcaaagtccatctcgatattggggccaaaatcgatccttccgacagcgtcgtaaagctggccgaggattttcttagagtgatatcgggcggactcaggtatattgttctttcccataaaatgcggccatttatgaggctaatctgccgggtcatcactgctggaatacctgtcttgtagtagtcgacggcttttgagtgtagctgagggagccgtatgcattttgcttcgttgagaccatcatcaaggtaatcaccccatgcgagatgcgcgtgggcaatcttgggaaggcaatcgttcttaatatatgtgacaagaacgaagtgatctcgtcgacggtgacgtgctcgagctcatattctttctcactgtcgtagttgaaaggaccgaaaccaatcgtccggaagcagatcttgatcccagatcacaagaaaatcgtctccgtcaaggtcactgccggaacacatacttgcaatgtcgcggtctccggtccgcggtaggacaactatgtccttgagatgatgaaggcctggagcgttgacagccctaaccacgcgaataccaccagggtgaagagaggggttacgcgccaagatgcagataccttcaatgatttcgtacttttcaccatttttagggaggtatatctggagaagatctcaggcagccctgcgactttctcttcaaggcgtgcatcttttcgtgggatccgatcggagaagtaccctttcagagtcgcagtctcgtccatacaacccaaaacacatgcgcctttatcgatgactatctttgcctttccttcaaatacttcaaatgccacgcccttcatagagtcagaagggaactcgcgaaaggcttgcttgactttctgaagccatcaaggaccatttgactaacggtaagggtgacctggttaggatccacgtatttcctgagaagatgggctgcctttggatcactttccattgcttcatccagatttctcagcattgttttgagctttagatggaacaccttgtcagtaatcccaagggtggaaagcactaggattagctgtctgttgaggctggcaacggtgaactgggaccagcggatgatttctaaaccctgagaaagtgccgcaaacttaaactggctcttccgaatgtgtacttcttgcggtcgagcttgcgggaagacgatgagcatccctttgcagccaacaaggcggaactgatacgcagaagggggttccttagtaggtgtcttgatcttaagctccgacttcactatctgtgcaaggaactttgatattctaccgacaccatccgagaaaatgtatccgttcccctcaatgtcgtcaatcttcttgacgtgcgcggtgcagccggagatggccctggtggtagagaaacactgtcccaacctggcagtatgcttagcaatacttcttatatgactgaactgccccgtccaggggcgtatttgagcatcagtgacgccgtcctttggagcaaagaagtacgttccatgctcacggaactggagttcccgaatgcgagaaattcataacgtgtgcttccaatggtgataccatttgccaatgctcttttgatccgggttaacacctcatccatggtattatcaacagtggcatgaatacgaccgatgtgctttgcgtctgtgaatctgactctgaggaagttgtctgcaaggttagcgtaacggcgaatgacacaatttgagatatctacagaaggcacgttatagtaaaccgtgctgggggtaattctcgcagaacgtaccaggcaacagtaagacggtgttctttctacttttgccctcttgacaagatttatgtcgaaaacttccatcggggttgtagtacgttttcttttgaagagtgacatgttcaaaaagcttccttgcctgcacctcttctagtccagccagcttcgaggcgaactcccgagtcatattgcactcgagagaagcccatgagatatgcatacctccaataagtagcggactgcaaacggcagatggatgtggcttgtgtcaaaagggtcctgaacggcagtggatgatgtctttgaagccttgggattgagatcaatccacttgcaaataggtgtaggccattctttggtagtgtcacgtagtctgaagcggagtctcctcgacgatgaggttatattcgctcaggatgctacagaagaacctaaatctaccgccttcattgcagtttctggggtactttatccgcaatgcattccagcgatctaacccaactttagctaattagtacagaaacaccaatatgactttccagctatgatcgggttcagccttcgtaggcccacgggaagatgagccagctcagtcgggttgtgaacgatattagcttgcctgtaccaagtatcccattctctccatgaagtctctttgttaccgaatgagttctcagtggtttgaattcgacggtgatattcaggtggagagccaaggaaggtgaagtgggaaatgtcacctgtcgggggtccttactttcaaagaacctatcaagctgtgagaaatgaatcttgaggcgatattcttgtggtcgccggctgctcagtaagtggagctcgaaatatacaagcaagttcttatatctcaaatctaacactaaggaagcgttttctgtcgttaatgagcccactgtgcgcattagcatcatttttgtctcgtccactagaactccgatgttcattgaagagattggtactttctaggggatatatgatatgtgagaacgcagtataaacacttggaggaccctgacggatactcacagcttctgccgggagactgacccacctttggactgggctgaaacttcccaatttgggggcttcttgccaaggctcatggagatgtaaatagatttcccgttgtggagtgtgatgcgtcgaaacgcgcttttccaaaaatcggtgcccggggaggtctgttcagggttaggactatgaaagacaacgcgggggaaatatcttacatgagtcttattcttgctctcgtagttctgtttccttgaaagttctcgaaaatatcaatggagcgaacgttgccctcatccttgaacgctctccaaagatccagtgtcctcacccctgcggtgacgttcgaaaggtggacagcaatagactcccaagccctccatggcgctagtatcagttgctgatcagcgggctggggcacaggacgtgagcgatgttttgatggaggcatcattggcaaatttggcttgctgcggtttcgaggggccggagacatgtacaaggaattggaggctctcgcatcaccaactaccagaggacttgattggatagcaggtgagtggcggcatgaagaatgaaagtgcaaaaacaaagaagtaaacctggaatttgttggaaacttctcactcactctcgtcggtgacggtcgaaggcgagttgaggatagaggttaaacagatggctttgtggtggcaggctaaaaagaacaagctagattctcagaataccattcagttccagaattgtgctagctattgtcggtgttataccctccaagggaatggtctaagagtgaataggaggaggataaagagtgaaaagcgattcgtccttcttcgagccgtaaatacaatctcagtgtcatgtgttaggtcaacgccgagactcttgcaggcaccgggtgggcaaacacaataataggcttcagaaataaacaggagattgggtatgaatctacttctagttgatagccgaagtgccactgcatcacggtgttaccgaactatccaacaagcccggtggagttactgtgacctttttctagagcacgaatacagtcaggctcttggccgttatatggatatgttactccatatactatttacaagatgtctgaagctgttggtcaagataaatagctcgtccgagaacaatagccgtcatgtgcgtgcaaatccgtcaagctcagacgtagacgtgctggtattaacgaaatccctcgagaactccatgtccagatccaagtcgatatcgccaaggtgattctggtccggcgggcaactgaactgactgtcattgaagctctctcgacgactgcatgtcgttatctcggtactatgttgatgctgactgttgtgatctacctctcccagaggttttcgttcttgcagcctcttacgtgtgctttgagataaagatttcctctgtttctcactgctctcctgtgactgagaaggcgacgacaggaccgaaggaaacgcgtggttgcgagatcgtttggggctacaactattaggccgaggtgtagcatattcgatagacgtgcccagaggatcatcctggcgattctcgaaagttaccgcccccgagtccgtttgcgtctgcatcgtgttgggcgagggttgctcggacgaaggccgagagcgttgtctgctcgagactcgattatccaaaggcccaaggggtttgaagcccataacgcccattagtcgactaatatgctgctgtgcttccgagaattcacgtgctttagctgctcgttcttctcgtagaagttgcacctatagaaaaattagctcatgaaggcaaagctctcttctttgctcacttttctttccaggtgctggacccgcttttcttttgtttgcagctctttcgcggcatccgatttagtttcatgtattatgcgttgcagagacataacctctgactttcgctccgcagcctagaactgtcagtaatgtgaactaagtagcctctggataatctacctcctcagctattcttaagctttgtgcttcggattgccgttgcagctcctccaattccgacttgaatctttcagttgtctcttggagagcagcaccaaggatttcggccttggatgtttcctcgtgtaactgtttccccttagtttatacaccaaaaacccaaaaaaagccacagaccttatgctgcagatctttcgccaactcatctgctcttcccttctctaccaccagctgtttgatgctttcgtccttttgcgttagagaagccttattctcttcaagttttgtttgtaaggaagagacctcagccttaaatgcagctatctctccgataagggactctctaactttggaggtgtctgccaagttcaccctcagttctccattggctaccgtttgacatttgatctcttcttgaagttcgtccaggcgctcttctctttccgtgagggacgccacaaggtcaagttctctagttttaaacgattctcgctggatggagagagcatcctgcgatgtacgctgcagctcttcgagctcatgccgggcttgagccagactcgtggacagctcgttaacgcgatcagtggccgaaccagcgtgccctgctaaacgagacatctcctctcgaagctctgcgtttgtacttgtcgcttgttgcagctgggtctctagtccgcgattctgctctttcagctgttccgtttccaggtaatactttgtgcgttcttcctcggcgactttgagcggagcttcgatattgccacagcgttgctccagatcgtagcagatatcctcgactttctgcataatgctatcgttcaacatcttggagtttgccatcatcacatctctcatatcatttctccagttattcctcggaatatcgactgtctcgcgaattttgagggttgggttagcagaccgcgtttctagaggtttaatttgcgacgtggcgcattttgaatcgggcagcaacagcttgcttctactcaggaagtcgatcagcatggcggtcccggatgaaaatgatggttctttcgtgtttcgtgggagcgttgcttcagcccagaaggcaagtaaatcgcacagcaaatcgttctctaacctcaatgctgaggagtagcaaatgacagccccatcacatttcgatgcgaaaggctgctgtcttgggaaactcttcgtcaggttgtttatggcattgcaatgctgctctgacacaatgcccgcaggttgcagattcggaaatcgcaagccttggagcactaatctcgagatctgtaacttggcgaaactcgccttgtcggttgtacttgtggacaacgaagttatgacgtactctagcgcgttatctattgcagcttgtcctgaacaagcctgaagagacttagtagcggattctcgtgaactgaaactcgtacactcaccgcatgcgccttcactaatcgaggtataatctgagtaggaagaacctgcaaaacagttgcagtatcctctgacatcagccacttcatggcgactcttgccaagttaggaggcaattgcgcaggggggacgaggggagacaaggacatgatacgccctaggaaagctagtgactatgatactaggctctgggggaaatcttaccaacatctgaacaccctgatcgataccatccctggtaatcttctcgaggagtttggcgagcttgatcgaatttccttcaatccatcgcgttcgctgttccccatcaacactatcacatatgctaatcgccagacgaacgctctctgctgactcttctacggtgaggttaccatagctagaagagcaagcaagaataactcgaagaacaacgaggtctagcgtttttaggcctcgcttagggccaaagaaatgtctgatagtctgcaaccatgtcggcatgttagtgccatcttctgcgtcaacgctgctattctgggatgatactagcctagcaaaagttgctaggcacagcagattgcccatatggtcctccaggttgcgcagcgtatttgtgagctctgcctggaaacatgacatgacttccagcgggagttcagatagaattccggttgcttgaagacagctggagattgagaatagtggccgaacagtgtccatgcatggattcgctctcatcctctcaatcaactgcattacaaagactgcaagattggccggtgggatgatatcgcaaggtaatggtgaagagaggagccgaatgcatagtggaagatactgcgggcaatggtatcagtcaagcaagacccgtttgacattggctggttcttcagggttactcacgccaggttcgctgccttcaatagtctggtgaagaaattggtcgagaaggtagggatatcgctggagcaggttatcccgaaattcttgtgcccgtgctatttgatgaacttgtcactagagctgtatgttgtgaagtatatgcccaggtcgacttaccgaagctcgtaattaagggcagggctgagcgggaccgtgacaggccatcaacaaggacgtcgacgagagccgcaacctggcaaggcttttgagccgcccaggtaaccacagccaaaggggcttgctgtacgaggctatagagatcctggagtcattgataccatcagcttctagcacatttgattgacccagctgatagtggggttcacctggagcgacggcgcataaggcgcgttcaccaatcgttccacctcacggcccaagagaaaaagtgtatcgggcatagcggcgatatcttgacccttttagtgagtcctcaaattcgtgaggtttgccgtttacgctaccgaagctgtcgtttgaggccctatctgaagctagaggttttgttgatgtgagcgagattctgccgtcggttgcccacccaacgggactaggacggaacccggcactaacgctgtggtcattactgttgctacattgtctccttgtattctagatataatgtacatcctcgcaaagctggtcagtaactcctgcgtctaggttaagtataataaatatctccagactcgtcagtcgaggcctacaacatcttgtgatttactcgaacggtgggtgtcgttgagaaataatatattttcaagtaacgacataagtttggaaagtgatcaatctcagtcatctcactgattgttgtgattgatggaatacttgcatttcgactgaaaattcatctttagcttgcctagaagagcacactgcatgcaactctcgcctttataccanaagttaa

SEQ ID NO: 4478 - DNA, 4325 bp, Emericella nidulans
  unsure (1)..(4325): unsure at all n locations
ctcacattgcatcacatcacctctaatagcttgtcccccacgcgggcaggatggagtatcagtcacaaagcctgcaattgggacaaatgtcccgaagatcgttgatgtcgtgatcgtgatggcgtggaaaaattaccgtgcggcgcgctgcgagttttgagaggcgctcttcgcgaacgctagtacgcaaggagcaaatgcgtagacagatacgatgggatgagtatgatgacagccaggacagatacgatttctacgcagaagcgttcgttcgaggacccaagatcagagtgtgggactttggatgatcgctgccaaggatgctggaagactacagattctgtaagacctgctagagggctgtgctcgcttacaaagcttgtttggagtgtcaagcttgtaacctcgccgtgttcctgcggtggtcagtgtatgggtgccaatgccggaaggcccatccataaaccacacactagacaggagttcgtcagctacacgagctcatgcctccgcccatgccacgcctatgccaaggaaaacaagtttctataaagatgaacaagaaccatcgtcgaataacgccattcgcgctgccaaggccattgtagggctccggccctgaaaataaccggcagggacctacagagagagcgtgggcccggcagtgtctggataacgacatgcttggcatcatgatacaatcgttaccctaatatgctgcttggtcaaagcaacggcccagttcatctacaactcatcagccactggtcaacagtttcaatagcgcctagaacagaaccacgcactgcccatccttagttgatcgttgctttccgcgaagtatcatccacttcgcagacgtgtttaccagtcacgccgccccccaaattcaggcagcgaccatgtcgatccaatttcgggctctgcatatcagccaagtcgtcagtcataacgcagatgttgtgattctcgcctgtgttgatgagcctgcatcatgcaaggaacaagagacgtataagcctgttattcgcccagtcagcggagtaagtatttctgcccgttattccaaggagcaagcgcataattcgttctacctctggagagcccatcacaatgcactccaagcttcttttactgctcgcggcagtcccttctctcctcgcgtcgccgtcgctcctcaagcggtctggcttcaatgacggccagcccatcgacgacaatggcaagggtgcgcccattctaggtaagagcttcacctaccttataactctataccagtctgtagccctgctaacacggcataggcggcaccgatctgcaccgcgacaaacaaaaccctgacaacctcggggcgcaatcaaccgacaacggtattgtcccaaatctgaaatggagcttctccgactccaagaccagaccctttcccggtggatgggtgcgtgagcagctggtgcaggatttgccacaaagccgagatatctctggtgcccagcagcacctgaccaagggggccattcgcgagctacattggcatcgagtggtacgtcaaccataactgattagaaggattaatgcattaattttgctggcaggctgaatggggctttgtctacgaaggctctcttctcctctcggcggtcgacgagaacggccgctggactacggagaagctgaacactggtgacatctggtactttcccaagggtgttgcccataatgtgcaaggactagatgacgagaacgaatatctccttgtctttgatgacggcgattttgaaaaagttgggtatgttgaaagcctatcgaaatttcttcccttgtccgctcaatctaagaaaatgctcctaatctactgctgcagaacgaccttcatggttgatgactggatcaaacatactcctcgcgacgtactcgccaaaaacttcggtgtcaatgcctctgtcttcgacaccgtccccgagaagttcccctacatcctcaacggaaccatacccgaggaagcgagctctgctccccagggtacattgacaggtaacagctcgtatgtgtatcacacctacgaccactcccctgagcccgtcccgggccagggaggtacattccgcaggattgactctaggaactttccggtctcgacgactatcgctgctacgattgtcgagctagagccgagggggctccgtgagctacactggcatccgaatgtacgtttgcactctactctagctagacaacttgctgactatccaggccgaggaatggctctactttcacaaaggcacgggccgtgctaccgtgtttatcggcgactccaaggctcggaccttcgactttgctgctggcgatacagcagtcttccctgataacagcggtgcgtcagccttactcttgttccgtaccagtatccctggctaataaactgttgttgtcaggccactatattgaaaatacctctaacgatgaaccgctcgtctggttggaattctacaagagcgatcgcgtcgctgacatttctctagcgcagtggcttgcgcttacgcccgatgagaccgttgcgaatacgctaaagattgacattgaggttgtgaaacagatcaaggaggagaagcagcttcttattaagggcaactaatatttccttgactgcttcagaggttttgcagggagtatggaagaaccgtttggagcgatgttgttgtgggatattttcctagtgttagtaatattttacactccctttgaagttggcttagggctcaacccactttgacatattgagtctatccgatgataccacatactataacatattatacacccatcgccatatcggcattcttcgtctcataggatgtcgatgatctgaatccattcgattaacattagacgccaatagactattatatgacctaccctgttatgaaggctcttggtccttgcccataagagctcgaaaatgctcctgctgaacaaggcgagattagatctgtatagacggtgaaaactaagcagtccaccgcatacacctgctattgtctttgaaggtgtaacggcagcttcgacacacacacgaagatatcacatttccatcaaaagtgaaaaaaatctttctgtttacattgcatgcttacgtcgatccaacctgtgtatcaggggattaagaccatcaataagcttacgaatccaagtttaaatgtgctcaactccttatgtcacctcgaatgcgctggtgtaaaatctacttgagactagataggatgagtccgctctaaagtcaatggcaaaatgaaataacaccagataggacagaacgctaatgagtatgatctctaaacgcagccacaagtcaaagaacggcacattttcggcacaaaaggccgcacgctcagcggcttctcctccatcaacatggggatgctggtgtacccctcacgagcgggaatatatgcatgggaagccctcagcaatccaggctgagggtaggcctttgcgccgtaaatccgtaagttccacactggcggaccgccatcggacggcgcccgggcgtattcgggaccatggaatcagaacagatcggccaggggagtgacggcccagtttgggcatcattcgggcacgagacagaatacatgccctaccaagtggcatggttccgggcattcgaggagctggagtggctgcagacggaggcaggaacgggcccatttgtcaatcctggtgctgtcgatccggccaggaagagagaagccatgcggcgtagcagcacgtcaagacgaacatctgagccgtcaccgtcacggccatcgagccctaacagaggcctgtgtcgagtaacatctaaattcttcgggctttatgtgtagacggaatactagcaatctctgcaagctcgaattgtgcaccctatagtggatagcctaatcttcaaagagttgcctcaaggtttgaaaccacctgggctggctaacccatttaagcacttccaataaagatagtaagggccaatttcttttttcccaagggggtcggaggtattccttttgccttccggaataatgagaagggcttccctgccttgtccaacgtccgccaattttagggccccactggggcccattataaatccctagaaaaagaacattttgtgtcaaaaacacaactcgcgggggtgtttttctcccctctccccccntctctaagaaatttttcctctaataaaatttttgttactacttttgtgttaatacactcgagaatttccgcaccaacccccttcttattttgctccgcgactctcgtaagaaaaatccnaaatatgggggggg

SEQ ID NO: 4479 - DNA, 2392 bp, Emericella nidulans
gggatggttcgcaacttgccgctcttgcataatgagtccaaagatattagcgtgagtgttcatcggtacactttggctcacgtacgtgtcgaactgcctagtagagttggtcatgatgctggtagaaaagtcgcgttcgatctctccaaagaattcgttatgtatgatgacactgacttgggttagaaatcaatccatcctctatgctccggacatactcaccgcttgggaggtagttccattgaggctgtgtggtctcgtttgactcgtcggagcatgatcctatccgtgattagccgcagctttgccaatgctgccttccgcgcctctgggtcgtctcgttccgtgactgcatgtgttaatcaagccaaaacgagaatttgccgtatgtgtgcttactcgggttcaatatttcctggttgaaaactgatacatgactgaatccactatagaacggtcaatatggggatttgacgtgagactgagtagaaggactgtacagtacctatgcttgcatttcgtgcaccgcttctctgtatcctgtgaccagtgaagctcctggcatttgcattgcttacaaaaatagcaggcaaatggccggacctctaagaaccgcaataatgagaagaattccccaatccgattttgaacaggagtgccagaaagacaccatttgtagttggacttaagtgcgaaacaggcgcgcgcaaccccggtggtacgttgctgctagagtcagcatcatgaaaccagtaatgatgaacgagatataccttgatactgtgagcttcgtcaaggatgagcctgtgataatgaatggaatgaatgacacctagtaatcattagcaataatagcgtgagttgaagagtataatgcttactgtcttctttaacaatgccatcattgcgattccaacctttccattcttttcgatggattgactcaaggccagaatctagatgtaaatcagataaagcactaaaatatattagatgacgaatacgcacaggatatcataatcacatcgaactcttcaaggtctctcttcctcataccctttaccttggtgttggtattgtggtagacgagaactttgagcttcccatctgtatattcctattataggaggtcagagaacgaatcagcattctgattagttcaacaaacctggatttccgattgccactgcattagagcaactgggggaacaacaaccagcgacggcctccctgccgggtaatccgacattagaagtgacactgcttgaatcgtcttgcccattcccatttcatcacccaacagcccgcccttatactgtgtcttttcttgtcgcatcatccaattgaggccttcgagttgaaaccgtttgagcgtcctagatatacccgtaggctgcgctgctggcacaggcgtaattggaggatcattctttaaatcatcccacattgttataatactagggtgttgcttctcaagcttttgtcgctccctacgagcctgggcttacaattagccaagtgagtcaatagtaagtcccgtatgacttacacgaaagctcatcccagctgcaagcgcactcgccgccgtgacaggtcgttgtctctgagacgaaagtccctgattccttacactattcacctgtgacgttcgctgcacaatcagtggttggtagtcgcttgcagtagaggatacatcgcttaagtcagaatccgtttcataatcagacccatcgatgtccatagtatcgtcactatctgacatgacgagcttgacatttgagcgacgagacgtcctgagtttacgctcaggggatatctcttgcgattttttcccaagggatccatcatccctggcgttgtcacccagttccgttaagatactaggggaatcgacgaaaccatcaattcttcggaaaacatcattagaggtcattcgtcgtttgagagggttctgttgatattcttggagctgtaagtccctggccaaaatcgcatcagcactctcagctatctcagcatcgaagtgattatctgtttccgtagcaagcgatctcttcgatcccttaggtccacccaggaacatattgcctgaacgcaattccctagctcgaacagaagcactgactcgcttcttggaggggcctatgtcagacgccgccggtgttacagcgacacttgtggctggcgtatcgtacccatttattccatcagcagatgtgtcgtcggcggcaacggaggagggcgaacgacatggagtcggtttcaatggtatggttacttcgagcttcgccaacctcatacctcgacgagtttttgataggcccgaggactttgactcatcctgcgtctcggaaatttcgtgctgtatctccaatttctcggcggatgacgc

SEQ ID NO: 4480 - DNA, 1087 bp, Emericella nidulans
gaagcattggatgatcggagggatgagagcggccgacccaattgacggtgtaaagaacggataattaccattttgaatgtgtaagaagcaaattgctagaagaaaaggggttgctgagggtgaatagaaagacgtatctctagaaaggggtcagtcagctgctttatatttgattttgtgcggtcgttgtcaaggtagctctcatccatgaacctaaacggacagcacggaagagccggggcggtgacggcatgatgtgatgaatacatcaccgaaaaaaagcgcaagagatagactaggggattgatatcttaccaaatacggttacaggatactgtcaagggctggaagagaacgatagtgaatgaggaaggaaatcagaatagacacagggaatataagccattatatagaggctggttcgcctctgtagagcggtttcgcaacctcctttcccctccctccctccaaggccagtcaacccacccggaaagagatccgtgagcggagttcccctgaacgcataaagcaatacatcgatagaaggctgtcaaggcttgatccgtgcaaccacctgggaaagggtggggagcattgtccacacgttattggagggcctccgcacctgcaagcggttacgcatacctggtgaggggatcaccagcctcttcgagccatttgaatggggatcgaccagggagcctcgtcttgaggccttttagcttcagccaaatatggtaggacgttttcacccctgtcagctcttccaatcgtctctgctgcctcaggttgacttgcaaactggccgacatactttgtcgctggctgtcagtatgatctacaacacacggtcttccccgcatgaggggtaaactcccgcccctccccctcacttgactgtcagcaaaaagccccagctcagagcgtggaattgacaaaaggagataagtaataataaattttggtaaaagtagaagcactcgatagaaatctacagtttcattgggacagcctgtttgtagtatagttggcttctacgctcgcgattaaattctggcaaggaaaaaaataatatggttgaaatagt

SEQ ID NO: 4481 - DNA, 2630 bp, Emericella nidulans
gcccggggagtttttcgtagcgccggagacagcctacatcgggatacgctatcgaaaatatacgcgatggctgcaggaaagattaagaaagaaacggggatgaagaaggcggttggtctctcatacaatctctattttgccctccagaggtacagtgaggtagcttcccccctgcttacagcgagcctgcccttttaccggcccacaagctaactcataggaaaggtggtccatctacgcagtacgaatcccttccggtcggaatctaccttggcgcggtggctggatccacaaaagatgacccggcctaagatgtaccgcatctgggcacggctgtttcgcgtatgctatgacagcaactattcaggagagctttgagatgttctgaagcagccatccggtgaaatctcggggatatattgacactatcacggggagggagcatcgagtatccgctagacttggtatttagaggcgatatagcaatgtgagacaagttgcaggaacaggcgaatggtttcgtgaggtacactccacgacagtggctccggcaaaacgcgcggctgcccggctattcctaacagagaactggcggtcactgcttccatgttttgctcgctggctttatctgcgtgagtgatgatctcgtggtgttgccgcctctgactggctgtgtttctcttatttttggtgcacgcggactctggattgggcaagttggcttgaccctatcaccatgcagggcatgatgggacctgtgacaagtatagtgcctcgctctagggggctttgtggtcaggaaatggtattttgttaggatggtgaggagttattcctgttaggtgtgtatatgttatggacgctgacgtatagtgctcacggatcagcatcgggtttggccggtattgatagtacgaagaaacacttatagtgctagaaataggaatagatggacccttcagtaaacttggcactgtggcagtgaagagtgtcttccctaggtcgttactgggtcttaatgctcccacaagggttttgcacgagaacccgtctccacgcaggtaagcaacagatccaaaaatgtcacgtcaaaaagatcccctgattgatatgataagcgggctacttatctttgcttggaagttacatcaagtagttcaagtagtagaagccaataccgctggaagaggcttgtccacgataccgaggccttgtccccgctactatatatatgatctataacccccactaacagcgccataaaaacctcatgcaattacaccggcgtaacccgataaaaaaaaaaaaaaaaagagtattcaaataaaataccccgattcgaagagcatcatgatctacacatagtacactgtagattaggggtatcccttatggtgctgtgcggtgttttgtgcttcaagaagctgctggtgctaaactacctcctggctccgcagtccgtaccataagactgcacgaagcctctatactaagaattgagacaattaacgacctctactttgtgataggcatatgctactccagtaccacatgagcgaaaaaaaaaaaaagaactagaggtgaagatcgctgatttcgtatggagctggaaacagaaaatcttaccgtatggtaaccgagctctggctggacgaagtcgagagtggaacaggctgaagccacaaatttagtgctccaggccaacacctctgccactattaatataaataattctttctcaaaattcggctgaggatctttgctcgatactgggttatgataggagttcggtgtaggaaggccatgatatctatggaccgaatagatggatggtgcatgaacgtggttagtctatgcgatttctctagctctataaataaactgtctgagtttgcaggagtagctctactaagcctgtagaacacctctacaggttgcatgcgttcaactatcttctctagtggattttctgcgcaaaaaatgggtttgaagatgatggcttactgagattggccaatcaaccttaggattgtgtagtaagtcccagacatatctgatcggctctcacccgtgctgttaagcgaaatccaattaacaaagagaaaaactggagttctaagttgtgtttcagtcggctagtgaaacagatcgtgttttgcgaaccggatctgagcctctttaaagtttcgaccaggccaagtgcgggttggcagtcctgatgatcgccccgttggatcgaaaggggagtgttactttttccaaggggttgagcgttgacaagctacttggtgtactttctttccctggcgaactattggagttgcgtggcgcctctagcttccccagggatcccaagccgtcttaggcagtgcgcgcggttgacgccagcatactcctgtcttctatatcctgaaactcggctccgacaattggctccgacgagtagctccgaatgatgagaaggccagtctacggctgaacgtacgtcacagctgagagacgtccttgattaggtcttcagcacgttcagagactcagcctggactatcatccttcctaatcgacgcaatctatcgggagaaaaccctggcgagccggcttgctcagcgggatcggaggagacggggctc

SEQ ID NO: 4482 - DNA, 1733 bp, Emericella nidulans
gagcccggaatcacgattagcgacgagtcatcgcagagggcaagattgtattgcgcatgtgactgtctaccaccagggctcttagacgcgaggagcttctcctcctcagctggcgatacggtctcaggtatatcgtcacggtgccaacggagcgcgaagtcatgcgtctccggtgcgacgagaaggttaaagagctccattactagcatctcgttatcatccttctttgcttcttcgccagcagaatccaagccaagcaattcctcaacaactcctaagattctgtcgtcgaaatagaacctcgcaaagtcctctcttcccggcatatcggggtgcaggaggtgctgcaccccccatattccgccctcggaggcaggaggtggcacgtttgttggccacggtggaaactgcttgggaacggtgcggaagtaaggccaggcaccagttcgggtaatagttgttgcagttatggcggcttgtttaaggtttgcaaattccttagaggacggcgggaggagcgagggaataacgacaaagccgtctttttggagggactggaggtaggtagatggcatttttttgaaaactgttagtttgtttgagatggttgatgttgtcgtggtggttgaagtggagaggaaatcgggagataaatatattacttaagatatacgtgaggtgacactgctagatatagctagtaatacaactgtagtagctaggtcgtatagctatgaaactgactgtcgctgatcaaacctacctaggtaaccccgcgcaagatagggtggggttcacacagatggtgtataattaatgcagatggaggttgttttacaacagcaaacaaatcaaacgcctttccagaaagtgaggcagatggcaatgttgacaacttcttattttcgtaaactttgtagcctcggtataataccatcctttctgttatagggctgcagtgggcagtggggcagggcatatgaatctgaggtcatcttcctccgctcatgtgagttcagctttcttgaccaaaacaaaactctcgccgccttcgtaactcaacccacatcatcataactcttctaaagagcacttgaactagtccagtgcttcaccatggctccccgactgagcttcggtctgagtaccctgctcgcactggggcttgtcctgcttctgctcccctgccaagtccatgcttttggtgccggcagtacgcttcgcccactccttgcctttgtggattcagccacagtacagtgcatactgacaagacagacatcgcatctatctcaaaggtcgaaggcaagaattggcgccatggagatatcgaggacatgctcaagactatcgccttcatcaagggtcataaatggacctcgaacatggtcaagcgggtgtactttggaaactggttgagagattagtgagtgaatctcagttttcgtttgttcgccaaagtatgggattatgctaatgttttgtgttgcagctctcaggctatggacgtcggtaccctcaagagtcttcccgccgatactatacgcatccttgtctggatcctttcgttcctgtcgtttggctatgcgacggctgagtttgaggttacggctgacaggctcggggtttaccggccagaggagcatattgagtaaggtcatattctaaaaacatttgtcgaaagtattgattaaccgttatagcaccccaaagattatgccgataacctggat

SEQ ID NO: 4483 - DNA, 1361 bp, Emericella nidulans
agtgacttgtacgcgtcccgccgtgtttatatagtctcttgacttctgggtatacgcacttcctgggagaacaacatgcgcgatttgagccccacgatcaccgtgatgtacttggtaaatgacaaacgctttgcgaggaatttccgattggttaatctcatctgcaccaagtagccaaaccatcttaggcgttgtttgtgctacctcaggagagggggtcgtgaagccgatttcgtatgccgcagcacgcgatgctgcgcgctgaagaacattataaccttgccactctggtgtgttgaagttgctggcgtgcttctccacaaagctaccaaccgcctcaaagattgctttcgaatccttatgttcggccgcagcactgccgacaataatcatgggtcgcttggcggaagccagctttgtgccaaagttccctgacagggcggccttcagagcagcaacgtctgaaccaaggtgttcaaagtcaaatgtgctttcgaaagcttccccgacgagaccgatttcgagatcagagcgaaggtactgcttgcgaatgcgagcgttgagaacggaagcttcgtggcgagggttcgtcgcgaccaaaaggatggcgtccgcctcttcgatgccgtagatcttagagttgaagaggtaatttgagcggatatcgacgccgtgggcgattggcgagctaccaccgggctgatccaaggcaagattatcagagccaagcttgttagccaagtccttcatcgcaaccatggtttccgcgtccacaaggtgaccagaaatggctttgaattcgttctctttcagttgaagcttttggtatgccgatgcaatctcggtcagagcttgctcccacgttgcaggaacaaacttcccttcctgtcgaatcaaaggagtggtgagtcgttgagtcttgaggccatcgcatgcaaaacgagatttgtcgttaatccattcctcgttgatatcatcgttgagtcttggcaggacacgcatcacttccattccacgggtatctatccggacgttggagcccagagcgtcatgtacatcaatcgactcggtatgcttcagctcccagggacgcgcgcggaaggcatacggtttggaggtcagcgcgccaacggggcaaagatcaatgatgtttccagagagctctgtatccaaattctgctctagataggtaccaatttgcatatcgttccctctaccggtggttccaagttcgggggcgccagcaacgtcgttcatgaaccgaacacaacgagtgcactgaatgcatctgttcatagagggtcttgacaaggggaccaatgttcttatcctcaatagcgcgcttgcctccaagttcgtgg

SEQ ID NO: 4484 - DNA, 5224 bp, Emericella nidulans
atcgtgtcatattgttgccagagcagacatgccgtctccctcagtactcgagttcttccgcggtatgaagacgggctcctgaaccaggtgggttctccctgggagtacacctccacctgtcctgtggtatggtccaggtgggccagtgagttgtataagggaaatcccccgccaattttggtaccgatgcgctcaaaatcagtacccagctgggggtccatcaggtcaaagtagcagtgtcgataagggcgagtggcgaaccgatcgtcgatcctgtagaactccgagttgccctcctgcaggacttcaggctcacgaagagtgaggtcctcggtctgagggtcgatggtgaatcggacgagctgagagacaatcgagctgggttcgggggcgttcccttgtgcgtcgggccaccagaagaagacgttcttctcgcttagacccaggtcgatgactaggtgcccttgctcgttctcataggcattggcagtatggccaggaaaagaattcatatatcgaaaccactgtgatggattatttcaactggagcttgtaaaaaggcggcagatgcagccgtaccttgacttcttcggctttggcgcctcgacgcggcatgacacccaagtagaacggggtctctgggctccattgccagtgctcgcctccctgcttcattcgttcaaggtcgcatacttggggtatgatggggaagataacctgtcagcagcgtaagcgtcgacgcaaccctagtcggggactagatatacatacccagttgtcagtgaccgcgaaatcatgaatcatagccacgactggcgcgaccagccaaacgacctccgtgaactttccagtcggcgagacgctgtaatagcacacgtctggtgtaccgtcaccccgcgcctcgtatccgaaacaaaccatctcgcccgtggctggatcgaatttcggatgcgccgtgaatgtgagagatggcagctggccttcaaagtcatacagccctttagtgtccagcgtaacagggtccagggcgtaggggggcgagtcttccttcagggccaacaactgcccgttgaagaagacgacattggtgttagctgtgctgcgaactttaagctcgaccgcgtcggtgaatctgttgcggtacttgcctagcccggctattagcaccaaatagctgtagatgggtgaagatgaacctacccaacagggcgcgctgggcctcgcgctcgcgtacaaacttctcggtttgcacataccgctgccgaaacgatacacgaccgtcatgaatgtgaaaggcgctgacgttgccgtctccattaaaccactgcatgcgttagccttctccatcggacgccggatggtgttttgttcttacgggatcgtcttcaatgaaggggggcaactgaggatcaggcattacccggtagaataccccatcgatatccttggggatctcgccgtacacctccaaatgagagacgtcacctcaaagcgacatggtttcatgaatcccgagaactgggggcggtccgagaagtgagcttcgaaaccagacatcatgaaattagagctgacgaagtgttagtgctttgcgaggacctgtcaaatgagacttccgccgtttatagagtccaccaaccgtggaagcctgaggttccgccggggaacggccggatctgctgtcctttgctccccgacaactccccggtctagtcccggagtatgagcatgggtacaattggcgcctgtcccggctgatgctatgttgtcgtggtagttgagaagtaattaatgccatgttgagcccatctatacctgcatacagtctatgtatacctcgcatagaagaaagctgttaaataataatatttatcaattaaggaaactgttgtggatgctcaaagggaaagggcagaagctgtatcaactacgcgaacgtagcctagtaagaatcgggggccatatgacagttgattatccgtctcgatggcgatagatctctccttcaatctcttgatgcgatacattgagagatcagatcctcaggggttggagctcgtggtcacttatatcacgtggcgtaagccagccagcggttcatcagtacacttagtgtacacaatgagcatcgcaagatatttccatatcagatagagagggtgtcagttggctgtcaacggtggagatgaagattgggagacaaggcttcgtaaagacaggatgagcaagatgacatgcctagaaaataccttctaagtacctaagtagatagagtttttctggaacagaagtaggcaggtgtgagcttaaacaagtagggctacttacccaccagtatacggagtatagggtatttcctagtcgaacagtagaaactccaaaattccgacgagtccaccaccaaccaacttcagccatccactatgccacgaaaagagcgtaaacggagcaggaattgatgggacaggaaagcaggatccaatgcgcgatataagattcagaagacggaaagttcgaattgccgagcaagctgtacatgtttacataaaggctctttagttaagaagctattaagggctaagattcttgtattcccttccaagcaaaaggtagaggatcatataaaaaaggttgtaagtttgctatctacaatgccaccgtataagagggcgacagttgaagacggaatccgggcacaggatgatatgatgtgtgttttgcagccggcagctggggagaatataaatgccatgatgaatcaacgggatttttgaggggaaaaacgccgtgggagttgctggaggagagcgagtggaaatgaagaatcagataagaggcggcgtgggtagggcaggggtagagtgacgcgggcaacgtgattgaggatgaatactgtttcacagagagtttatagtagagaactccatcctgagcttcaggatacgtatgattgaagacaagctgtcaatatggttaaacacaaaagaacatatatgcccctatcaagtcgccgtatgcagtagggaattataacaaccacatcaagaggcgctgagggaagcgcccaaaatcagctaaatactcccatcagtccaggcgcgatatcatatgcggctaaataataagtagacgctgataggcttaggtagccaatgtctgatcgattaccgtgagttggtactgaggtttacggctacatgtgctatggaaaactatgcgggtatagtgacatatatagcacctagcttctttaccttcgctgagatcaccgactgcgacgattctctctaataatacgctcgacatgcaggtcccgaagacaaaactcgacgcctgcaccaaagcacaacgactcgatagtgtctttgaagctagcatactccggcaacatgtccggtatagggcgcggtctgaggttcgacacctcggtcgattgctgctctgacatccaatcgctcgtgatctccacgtacctcagattcgggcaatgggggttcccgcctgagagcaagatcgcaaacgcattggccaaggtcttcatttgggctccctgcatgccatgaataaatagtgtctatattgaagggggtagcacgctatctagagagtggaccgatatattcttccaggctccccacttggagcagaccagaatactggtaaaccttatccggacgatgctcgagagccgtttacttacccttatgatccctacgtgtacacaatctaggcgtcaccttttaattcatcataagccagtacaatttcctgcaggctgttctgatgcttgcgaagtgctgagtagaatcgtgatgcataaatattctcgtcctctgactggttggggtcattggaatgctcgaaaacgaaggactcgagtctcttgggtgcattaatgagatcagaaaatccctttcgagaacaacttgatcgaaggtcgatatgagtcacgctggagctgccagcattgccctgaatatatccagcaacgtcaaactcgtaattgtcgtcatcattgctatccgtatcgcggatcattttgccatgaaacgagcgcagtgagggaagttggaatatgggaagaatatggtcagttccaatgccgtcttgcgcaccccgccattccacggtgatttttctgagcttcaatagaggcattttcgactggaagtgcttgtccgtgtacgcaatcctacccagcatattgagagtgagatttgaaaaatcatgaacctgcaaccaaaggctttccagattcggcaaaagatgcaaaagaagagccagaaaagcatcattagactcgtaagtctgtaattcccgtttccagacagataagttgtccccaggaccaaagatcgctactaagagcgcatggattggctcctggtcataacgcacgctggaagtaggtcgccagccattgtgcacacgcaaggtgtgaacttctcgcgcaaattgtggatttgaaatgaatttatgtacgagatgacataggtgtcctttgcggtgtttcaacaggtcaagcgattcgaagaccttcggtaggagcagtcgataaaaggcatggcaacagtaggcgaggtagagaatatccaagtgatcattcaggtaacttgctattagaagcagtagctcagctggtagcgtagagaacataattgttgcagaaggattggattgtggtcttgaagtggaagtttggattccacgattgtagcaacggccactcaggcagcaataggctgccaggactgccaactcatccctcttacgccccaaaataaaaaagcaaaatgtattccagagctttcttggaaatagattgtaagcttcccaaaacatcctccctattgataatcaaactctttcactgtgccgtgcacatcggcacgcaattgtgtccatagatcgaccaagatttatatcgctgcgtggagcaacgtcagacaccactctgatgaaaagtaagactaattgacttaacaatgtgactataagaactacgggaagctaaataagcgctctacaaagcttaacaaatgaggccatgatcacctgcgattctcgtctctcagcatctttagttgaagctggaggaacaaaaggacgtgtataagaggggaggaagcgaagggagaaaatgtgtacaagaaggatatcaggctcctccccattcatgtaaagacctctggatatattttatcggcgatatagcctgtccagc

SEQ ID NO: 4485 - DNA, 4538 bp, Emericella nidulans
ttagtgttgtgggggttcaaggtgcggccgtagatgttgttctctgaatcgtcagtcttctttcattagcacttctcacgaacccccagtacaaatactaaccatcagagtctgtggaatattcgtttgcacatagagcgccgctccaaggtcaagcaacagatcaaccatgagccgagttctctgttgccggtccgtgcttcagaaacgagacatatcccaccgttgtatgcaggcctttgacctggaagctatcctttatgctgatcggcaagccatgtagcgggcctacaaccttgccttcgcgcttgagatactcatcaaggtaccgtgctcgctcaatggcttgggcgaagaaatgctccgtcaaacatgacgtctgtacgagtcagaaacagcacagtgtacgcaaggcacatcatcctaccagttgctgcgcaattgccgcccttttgcaaaacgctgtcgtaacagccaaagagctaacgtcaccccgtgccagtcgctgaagaagctggcccgctgaatagttctccgtgatgtccagctcatcctctgagagaatcccactctttcgcacaggatctgcctgcaggagacggccgtctgccggaagcgaagctctgaactccccgctcagtttccagtctgtgggaatcagaagatccagtattctgcggcgctcagctacagcggcttgccaggtttcttccgccatttcaagtacttgtacctatgtataagtcgaccagacaactcagtaggtaagtatctgttcaacggaaggctggcaacaatccaagactttatagtctaaagccgaggtgtctattattaatctattgtgcttttcaagttatttgtacgttggaagatgggaagcaactccaagtgagcctgtgtccacctgtgcttatcgaagctaaggaggtagcgtggggaaggccaacgtatacgccggccaaaccgccggctcgccatcgttcctgaatggacggtcggtaacctagcgagctggagttgcagatccaagtcctaaaccgtccaatgactgcaatcaggcttccagcggatggttgagggaagtgactagtctgagtaagctgaggctgacctgtaaccacacatctctagctggtcctctaatttgatagatatagtgggccaagatctttcaccaacagccgacatagtaatccctaagcccaagggcaattagcaggtaaaatgtctgagaggctgtggatataggttagaaccaacgtagttcggtttctgaaagtactcaaaatcagctacagtatatcgtcttttgaccattcacaatacttatgtaatcaccgacagcaaacctcattcccatcaccatccttcccagacgccctcagttcatgcacgcccgtctccgttcccgatgccctagcacaaaaacaactcttgttaacgtcaacgtccgctacggcgacagccaatgtcaactgcggctcaataacagccgcttcgtccctccttccgagacgcagcaggcactcatggtaacctctcaaagcccacacattgttcgcgtgccgtctggccctaatgaccgaattgtcaaaccccagatcagtcttatacacagccagtgcctcttcaacgtggttttgctccaagaggagcgccgcgtacgcgtgtcgcgccggctgcatccaagaccaaggctcgctatagcccaggctatcgtcgagctgcactgcgcgcgagagatgcgagaatgcagcttcatattttccagcccggtactcgatttctccgtcgagcattgcggacgcgatggccagaatgtcagtgcatttgttgggaaaatcgaggcgtgattctgggaccgattgtgcggcggctgtgtacagtgtttggtacctctttgcctcctgggtattccccgtcgctgcgtgagcaactcccttggcgtagtataccattgctgtcgtgacacagtacagttcttgatcggttgggacaggcaaatcgtgtatgatctcctcccacatgccgaaccgcaccatcacatgcggtcgtacggacaaatacacctctacgaaatccgcaagactaactaacagttcttttgggagtgtcttctccatgcgctcgactgcgtccaaagcgacggctttctggcccgcaaacatggctgcgtagataagggtgtggtagttgtgcaagcggtagtttgaataaaagttcatggcgccctcgtagtgcagatatttctcatctgcgatggttgcgcgctggttcgcccgtatagcggcacggtagtccccaaccagcacgtccagatgtgagggcatgtggtttgcatggccagagtctgggacaagctcgcgcaaataatcggctggtaccaaccctagttccggtgttggagacatctcaatcaggtggatgtagaaatgaaggatgccggggtgattagcagcatttttatcacgcagtgctctttcaagcacgttttttgcgtccagtgtcctcgctcctggatttggaaggcctgtctttagatcccataatttccacggcgttagactcatcagcgagtctgcgtataatgccgcgacgtcgagatcgtctccaaatgcgtgatagaccttctccatggcgtcagcatatgcccggttccgagacgcatagtgctccatatcttctgcgggtttgtcgcttgcgaaccgggcttggatggcctctatgagtgcctgttcaataggagtcgcagactgcgcgagatcctgtgcttttttggatgcctcgtatgtgcggcgaacaatatcgttcaagtcctcgccgaagaattcccacgtaaagttgtagttgggtcctagagcgtatgcgagaccccaatatgcgattgcacagagttcatcatgtgcgattgcttgctcgaagcaagtgactgcttctttgtggttgaaggtgtagacccaggtgaggccgcgattgaaccacgtttgagttgaggggttcgtggtcgtgatggggcgaccgaatgtgcctaagtcaaatggatattctgttctttttgaaacgggagatatggccatgttgagagaaaatctgtctttttgataaggagggggaggggtatatttatccctctgggctagcttgcctatgcttgactaagcagtacaaccaaggttatacgagacttcacgaatgttattagtatagtctagttatttgtgcaaaaaaattgcaccctacaaaatgtactgcaccagtaaagcattatcttttgtactatgtacaggggtacccgtagccagagcataaccaaacgaatctataatttgcctgtccccgatcttgtcgtaacagaagaacaagaagcgaatataatcaaccgtatataacccactgatatcctgtgcttcagtttgagacaccaaggccttctccaccgaccttatggtacggaggctccgcgttggcagccttctctgggctgaatcgccaaacgccgcccgttttgtcgctctccaaagaggtcaatccagcctttctcgcgagctccaagaactgctggtcctgattctcgtcgacacgttcgaagaagcggcgctcccattcgcggccttcggccttttcgaccttgcggagctcccgctgcgcattttctatcttgcctttggctgcggagacggcgtccatgttccctgtttcgatgtttgctgcgacgtcgctccaggcgcggcggctttcgtacaggtcctgttcttcgataggcgcaagcgtaagtggggtggtttgcagatcctgaactgatacagtctccacgtctttcttgattcgagcatccttgatcgtgaatgtattagaccattgcccatctacggtgtataggggcttcttttcgccctcgctttctttgtatagactagccgtgaaggtattcttcttgccgctcacccagcctttcccagaatagctgatcttcgagatgtagccggtactgctgacgatgtaggtcgacttttcaagttccatgaaggggtttccgtagatcagcgattcgacatggagggcggggagggtgatgacatatttctcctgctgagctgggtcgtttttgtcggcgccggggggtgttagggtatacaaagcatgtccaatctgcttgatgtaaatagtgctggaaaatgaggccttctgcgcattgtatccttgcagctatgtttcgattagttttcttggaattcaatgtgacacgtggacaaagtgacaaacctgaacaccatgcttctcattccggatagcataagcagtcgctggaggatggtgactactcaattagcaaatatactcacattgctgatcaaattacctacctgacttgttcgctaatcaaagtagtttcgccgatattcgcatcgctatcccacttgccgagaaacagctctccgaggaacgggttgagaggcttcttctcactgcctagtttctcgctccggctgcagtactgttggcgaagagtgctaaggaaccatgtcagaacagcg

SEQ ID NO: 4486 - DNA, 2125 bp, Emericella nidulans
tctcttcgtcaaactccatttgatggagctatggttgtattctggcttgataccctaagagtgcaggaagccagccaaggatagataatagggcagcattggaagaaaagccctggtcatcaagggcaacggcggatggcgttataggaaggcttctattatttctatattataccgagatgacggtctggacatgtacaagcaatgtataaacacccgttattaaaatcaaaaactagagataatctagattccggaacagtctgtgctagtagcgctgcgcttgtagccgaccgctggggcttggactcggttgatttcacggaactgcggtggatggatccagacttgtagggtgatcgatattagccggttaaaggcaaattaccggtcccccacattgattctctggctcattgttcgaagatatgcagctgaaccagcacttacaacaggtatattgctagcaactcgaaatacagcttcctatccacgtcgcttgtcaaagagcctgtatagtgcggtggcatttacgtatcagttacctaaatcaaggaccccggtgtgggtgacatcagccgcggatcaccccgcgaaggagaaggtcttgactatggcggggtggacggatggatcgatcatcgtctggaacagtggaaaagaggataaattccagaaaagccaattcggtgaagctggcgtttatctccatcagaaaaaagtaatctgtgtgcggtgtttataagctgttagcccatccctcttctaccaaacttgccattcctctccttggcttcagcaagtgctgcgaccagagctgtcattccaagatcgccagagccataatcgacatatcttacataaactgtctatttggattgaacaccggagctcagagctcctagatactcgccctccttcccacaccgcaagaccaacgcagccaaaatgtcctcgcgctcctcttctcccctcaaagggcccctctacatcggcttcgacctctccacccagcagctcaaaggccttgtcgtcaactccgacctcaaagtcgtctattcatctatcttcgatttcgacgccgactcccaaggctttcccatcaagaagggcgtgctcaccaacgaggcagagcacgaggtatttgcaccggtcgcgctttggcttcaggctctggacagcgttcttgatggcttgaagaagcaggggctcgactttagccatgttcgtggaatcagtggtgcggggcagcagcacgggagcgtttattgggggcaggatgcggagaaattgttgaatggcttggacgcggggaagagactgcaggagcagctcgagggcgcgttttcgcacccgtatagcccgaactggcaggatttcgagtacgcagaaagagtgcgacgagtttgacgagtatcttggtggcgcggacaagttggccgaggcgactgtaagcaaggagcatcatgtaagctaccatggccccatatggctaggatgtcgttgctgggtcagtgctgacggtgtgtagaggttcactggtcctcagattctgagattccagaagaaatacccggatgtgtacaagaaaacgtcgaggatctccctagtgtcgtctttcttggcctcgttgttccttggccatatcgcgcctcttgatatttccgacgtctgcggtatgaacctgtggaatatccacaaaggcgcctacgatgaggaccttctaaagctttgcgcgggcccgcatggcgtcgaggacctcaagcgcaagctcggcgacgtccctgaagacggaggcatcgacctgggcaaggtgcaccgctactacgtcgaccgctacgggttcagtccggagtgcacagtcattccatccacaggcgacaacccagccacgatcctcgccctgcctttacgaccatccgacgcaatggtctcactaggaacatcaaccaccttcctcatgtcgaccccaagctacaaagctgatcctgcaacccatttcttcaaccacccgactaccccgggactttacatgtttatgctgtgctacaagaacggcgggcttgcgcgcgaaaagatccgcgacgcaattaacgatgcaaagaacgagaagaacccgtcaaac

SEQ ID NO: 4487 - DNA, 1382 bp, Emericella nidulans
tctatgtcaaaaatcgcctcgaccttctcgcgtaagcctgccccagccaaaccagaaccaacaactcattctcgaagattaacaaaaagaacaggcctcgtgcgcttccatcccaaatccaacccatcctcaatattgatcggcgagcccgtaaacccgagcttggatgtgggcctcgctgtgctctcgggcgccgatgtcccagttgcgctttactcggggtcttccatcctctccccgggctcaagaacagatagaaccgaatcgatcctcaaacttctttccccattatcatcaaaggaggtcggaagtatccgctgcattggtctcaactatgtgtcgcatgcggcagaaatgaaactcgatattcctactgtgccgactcttttcctcaagcccagtacgtcgcttggcgatccataccctacctcttcgacgatcctgcccaagatcacgcaggaggacggcacgggcgactatgagtccgagatggcgatcatcatcggacaagacgccaaggatgtctcggaagaagaggcgctggattacgtcctcgggtacacggctgcaaacgatatctcgagccggacgagccagatgaaccaaagccagtggtgctttagcaaaggatttgatggcgcttgtcctctggggccggtcgttgttagtaagaatgcgcttggtgaagatggtgttgccgggctgagaatcagggggatcaagaacggggttgtgatgcaggactgtccattgactgatttgatcttctctgtgccgaagctggttagctttttgtcacagggtacgacgctgcctgctgggacggtgattctgacgggcacgccgccgggcgtgggggctgcgaagaatccaaaggagtttttgagggatggtgatgagttccgggttgaacttctgccgtttgtggggacgttggtttccaagattaagaatcaggtttagaagccttgctgttgggtactgtagatcgtataaggactcacgtctagaatagaatagagataacaaaaatcaatttactgtctagattatctatatgagatctatctagtcagcaaggcgggaagcatctttatctaaatcatcaccgaaatatgttcaatctatcatcaaaagaactaatctagactatgcccaacaatcggccagaacagacatgaactgcccctctctcagagcagcatagatagtcccaatatgcgagccgatcgtcctcttgtcaccttcacaacctgaagggtaagttgggtggtccactagccccttatgcataggaaccttcagggtatcacgaacaaagttgtagatctttgccgaagacgagcagagcaatttcccagtaggcgggtcggtgaagtacg

SEQ ID NO: 4488 - DNA, 4710 bp, Emericella nidulans
tctgcccggcttgaggttggcccaaagcatctgaattctaaaggtagcctacacggcgttttctccgcctgcgtcacagactgggctggtggtctggcaattgcttcatgtggtttggaatcaactggagtgagcaccaacattaacgtcaattatttgtccactgcaaccactggtgactggctcgagattagaggctatgccaataaaattgggaaatcacttgcttttaccacaataaccatctcgaaacttactagctccggcgatactacgctggtggcccaaggttctcataccaaatacgtcagggcacgttagcccttttcgttacaaaggcttgactcaagattcggagcaagcgacaccgctatcttctttgcatctggcacgaagcacatgtactttgagtgcctggattcactcggacagcggagattcattcattccaccgttttacttctggcctccccaatatttctgggatattcacggtaaactgtgggtacataatttcagatcatctacatgcttataccagcattgtaataggcaggataaattggctcggtttacggagtacagggtacactctgtacgtgactcgggtgtcgcattgatttagagtacgcagatgtagatccaactgtctttggtaaccgaaaccttgttcatacgatattttctcaagcacttttcacgatttccgagtacatggagaagagatgagtacgtataggcagtgataccccgtagtcttgttaatggattacgtaagcacatacttcaactcctgctggttaatttagtcttgacttgtcccaagccccttacagttatcattcaagagcacccttcatctttacttacactactttgcccaacttggaaggccgccctggccggcttgagtgctgcccatgtacagtttaagtcgttcccgctgaccatggacgctccaaacgataccctccgatctcaatctgaccagactccacaaaccgaacgacctgcttgcgaagagggcactaggggccataaagatggtcgattgatacaaaataatactgatggtgcccgattaaagcagttgttggacacggcgctatgctttctctcaacatgcagtaacgaaacgctgcttcttgtactattctgcctcatggggaccacgtacatagtccttggaagacttgggctattacttatcggcatggctcttggtgtcgcattacatgcatcgtgggtgggcatggatcaaagtaattcatcggaaaataccattatcggcaggaaacagctctcgttgagtatagtccataaactacttcactgggaggaaacctattttgttaaagccgattcaaacgctcacggtgctggcgaagatcatcatagggctctgtcggtgtcggatgttgatgtactcccttttgggcccatcacggctagcgctttacactcattaatcgaggcggcaatgcgagattatgtgaagtaagtttccgcatattgtacaattacaccgtcataagctcatgaatttggagaaaagttcttggtacgagccaattcttccttccgagtcgacatttccgaatgcttgccaggcggttttgacaaatttcatcacctccattgcctcacatctctctcgtaaacgagctgcagatactgtcttagagtttctcaccaattcatcttctattatcattgtattcctgaatgagctctctgccgcttttcaggcggctggtcctaacgtcactgcagagcacgccgtgctacaatacatggaatcgaatcctgagagcagtctctcgagtcttctggcgcatcagcaacagcgccaaaagcttcaaaccatctcggatgatcttctctcccggtacctggattcaaatgcatacaactgtattccggtccggaacttccttcgtgaaattttgacagggattgccttcgagtcaacaattactagtctttcgcggcctgaatttataaacggctggatcatttacttatttagcgagggtgaatccgagatcatgagtgcaatcgatgctggcttggagggagctcgcagccatggcgtagcagcggctaaagattcggaagagacatcacgacctgcttcgatctctcaaaatggaagcgtggcggaaggcagtgtttccgcctatcatgctccaaatgtccccggtcaggtgtttgataaggcggacaaagccacacgagaagccatgttggaagccaaacgcctgagcgacatgattgcagcgcaaaatttaccaaagtatattgaggagacaacgcaaagcgagatacgcggagaacatggtacccgagataacaatatcataattgccaacgcaggcgtggaatgttctgcagaagaacagcagagtaatgcagcgatcgaatcttacccttctgagtcggctcaagacgtacagcaagttcaacccagcgaactgggcgatttggtcaccctgccgtcattaccacctatggagacttccacgggttcgtctttaggcagtaatgttaccacctcagcgcccagtctttttcgtgcgtctgtcacggtggatgatggctgcgattccagagacatgtctgcattgcgaacgaaacctacatcaaactacctgattcaggtcgagttgcactccggacattccagtggttggatggtatttaagaaatatgcggacttcgaatccattcatgaaacattagtaacgatagcaagattgaatcaactgcactttggagattcctatccgcacgttccaccttggaaaggacgaacacatcaagctctagcacgggatctagaacgatatcttcaagaagcccttcagctggaaccccttgccgagagtgtgacgatgaaacgatttctcgaaaaagatcgcggcctggggatcgaggccgcggacttatcagaaaaacctggctttgttttccctggtcaagctacgtttgaaaatgttggtaagggagttctgggcgtgttaacgaatggcccccggggagtttcgggaggcagcaaagccgtccttgacagcgtttccggtgtatttggaggaggtctcggcaaaaagtcaccagttgccctccgtgcggataatgacaaagtagcccgcaaggaccctcttaagcatggaccagctctgagaaaaggtgacccaaaagaggaggatttgaagcccagtacagatacgaggggcggtgcatcactatcccaaacgctgaaggtatgcgattcagatgactttgccacgtccggtgagagcgcgtttcctactgaatcatctactcctgtgccgactcccgagtctgggggtaaccctatcaacaaagctggcgatcagccctggtccgtttctgcttcgatagatcgagttaatcagaaagttgattcacccagtctcttagaagaaaagcaaaacaatgatatcgctctcatggaaagcagaaactctacggaaacaccggctgggcggcaaagcaaccctattacgggagacgagacgcgagtggctgtggagcttatatttgctgttatcaatgaattatattcattgtcttcggcttggaatatacgccggactctgttaaatgccgcaaagtcatatatccttcgaccagcaaatccgagcctagagactattcgtcgtctcctgcaggactccatgattgaccgtcatacaactgatgaggccattggaacgtatctggctaaactccaagagaacgctctgccaactgcggaggagctcaactcttggccacctgccatgtctgatgcagaaaaggagcgtcagcgggaggctgctcgacgaatcctaatccaaaaaggacttccaaaagccataacaggtgttatgggagcagtagctagtcgagaagctctaagtaaggtttttgacagtctccagattaatattgttgcaagaggacttgttttctctatctttttgcaggcaatgagggctatagtcttttaattttttatttttttagcacgtgactatcatcctaatgaggaggctctatgcgataaagatgtaatgacgtggcctagattagggcgaaagattcaagatccgccggcggatatttggaaacacttaaatcggtcgttcactataacgttcataaaaactgataacaaagggcggtcgcatcagaggtcccgcgtttccatgaccagcggcactgggagccacctgctaacactttgcctcgggattagtaggacgactaggttcatcaaataatagatatgcttgcgcagattcactcgtccagtacccttttcctagggtggacggatctgtaaatagggctgacaagatacttcataaatgagtgttgctctaaatctagtactttcgaagcggcgtcgcgcgtcgctagccacaaccactggaaaccttgttttgtcaatatgaaggaggttctattgtgcccctctaatttaaacccgtccaatacgaaagttgtgccgtctaaagagagatcttgcctgacggcttgaacaatgttgtgggttaggaatggtcatgtcgctgtgaatattagaacaaagagtttcaggagatgataaagcttgtcataagccggtactgggtttcatattgaggttagataaactgcgaacgtttgcattgaagcatccgcgagctgagagtgatggga

SEQ ID NO: 4489 - DNA, 3035 bp, Emericella nidulans
ccaacagtgtgcctgggaaacggcgagcggtgtctgggaacggctatgcacggacgagtgcattgcggtcgacatcaggtttctgatcgcccgtccaaaccccctatattcgctaaattcgtaactatcgtcccaacctcagtgaattatttcatgtcctttccattcccacctcctgaatatacgcatcattcccggttattccgtgttccattcaatacaggtcgcgtggcgccatgcttttggtatcacagattgtcacatattttgcatcccttccctggcgttgaacctcttcccgcttccgatcttgtctcatagtttttgcatttctaccctatacagctgctatccccatttttgttcattcaatacacggtctcctacgcgttcatatcgtctactttatctatttatgctacgagtcttggcggtctcaataaatacgagaattgttggggttgggtgtatttagtgaaccgagctttgggctttcattgtcattctctatggtgttccgtcaaatatctgattctttggcttctacgcatgcacagacgcaagtccatctatcttttcatgaactgactatacctagacttgctcggcctatggggagttggctactttatataaattgatatggataggtgtctcgacatatccgctcggattgccggggagtttccttttacctattaggtagtgttacctgcgtaggcgcagcctctgaaaaaaaagaaagaaaaaaaacttgcgataattcattccaatcaaacattaatccatagtcaggaggtggttatgttctgatttggattgagtgcacaggctatagtgttccacgctattaaggtggccacacatattgtcacgtcgctgaaggtgaggtatcaaaaggatacgctataatttaatgacttttaaaattgacagttagtcctcttagcttcagtcttgcgtgtaattagagtagtggccttaccaatctgattacattcccttttcctccactctgcctttgctttccctttgcaagcatttacttgctgtcctgaagtaatatatgcctagccacggggtatggcgtggacatggatagatgcatagacggacccggctcgtgcgtttactaatatgtgtggaaagttgtgatcaaaataagattgactggctggctgagagcattttaaagtgcgcgaggtataataagatcatagtagacaggtaggtggtttaagagaggaggtcggcaactgtatgtttgtcagttccatagtccttatcgcgcggagaggtcatggggcggcactcaccattcataggcatctcgtcaatttgcgtagagtagtataattcaatatcgcgtaggatacgcacgtcatcactcgtaacaaagtttatagcaacacccttgcgaccgaatcgaccgcttcgaccgatgcggtggatgtagttttcacggttggtggggagatcgtagttgatgacaagagaaacttgctggacatctataccacgcgcccaaacgtcagtggagataagcactcgcgagttaccctgacggaagtcctgcatgatgctgtctcgttccttttgtggcatctctccatgcatgcttgatactgtgaagttggcttcgcgcatcttgtccgtgagccagtcgacctttctacgggtgttgcagaagatgacggcttgtgtgatagttaaagtatcgtacaagtcgcatagagtatcgaacttccattcttccttctcgacagcgatgaagtattgcttgatgccttcgagcgtcaattcatcacgcttgacgaggacacggacggggtctgtcatgaatttggtcgtcatatcaagcacatcgtaggggagcgtagcggatacgacaacaacttgcgtggctggggggagataacggtagacatcgtaaatctgttctcgaaatccgcggttgaggagttcgtcagcttcatcaaggaccaacatcttgatatgacgcgtgcgcaggtgacgtctccggatcatatcggcgacacggccgggtgtgccagaaacaacgtgttgaccgtaatcgagcttgcgaatgtcttcaccgatatttgtgcctccaatacaagcgtgacattgaacgttcatgtagtcaccaagggccatgatgaccgactgaatctgagtcgcaagttcacgggtgggagagagaacaagtgctacccaacgttagagatgaaaagcaacagtcgttttcttgcataccttgagtttcgcgaacaactgtatcaatgacttgcagagcgctgatcgagaaagtcgccgttttaccggtaccggactgcgcttgagcgattgtatcgcgacctttgcagatctggacgatcgcgcgggactgaacagctgatggggactcgtatccgtatgcgtagataccacggagaaggctttccttcaggtgcatatcctcgaaagtgggagcaacggtgacctccttggaggtgttaaactccattttgtctgaatttgcgccgttagcatttacgcatcggaattgactaatattaacttaccatcggctcgcctgtcaattccgtccgccatttttcctaacgtatgagtagaagaagatcaaatatagagtgctgttggtgagaagtaggacttcagtatttcgccgcgcgacttttcgccgagcggtcgaccgcctcggtcacgtgaatgggtcgcgccgcagagctcttgaaacagcggcggcaatgtcctcaagccgacactgttggtgagattccgaattgagaatcagacctgatacatcatgttgctcgaagatcagcgattcatacacgaggatttggagaggctggagcaagctatagcagaccgtgttgcagaagaaccccgtaatgtgagctgacctgacggtttttctcagtctactcatcgctaatcattgcaatctcgtacagatacgcgaacgtctggctcgagaccatgagatagcgcattttttaaaccgcattgatgatcagtcggggaggttc

SEQ ID NO: 4490 - DNA, 5364 bp, Emericella nidulans
  unsure (1)..(5364): unsure at all n locations
tcagcagccagattcgtgacccagcattgtactagaatatagaccgctttgataaagcggagagggaggattgtaaatgaatgcagccaagcgtccagacatgccaggattccgaaccatagcacctgctccaatgctggggaagcaccagaaagttaaccaatcgctctagcttgacacgcgcagattcatacgggaagtcattcaaggaaggccgatgtatatacagtggagaagggctgcccgaagcaagttccagttgtaaatatgtgggaatggatgctggtggtaaagggatattctgcggtaatggagaaggtaaggctgtctccagtggcggtgggggacttctgagattcttcggttcagcttccctgctgacagaagggcgttcctgcctatggcgagaagtccacgtctgcgccaggcggtcattgttggtccctggcaatgtctgtttccgagtagactgaggcgtcgaaacagtgcggccgatatgaggacgcgtccgggtcgacggcgtcctaagacctaaaccgtttagagcctccgcaccatcagaaacatctttaagttgtggtgctgacatttcgttggaggaagttttatgttcaccatgagagtttctggaaatttccgactcaattggggaaagcaatggtgggggcccatcggagtaaaccagcttttgactatgctcttgatcgcagtgaggagcagcgcgataagggatagactgcggggacgatgtaagctcctgtatcttagcttcggaaagctttagagttcgttcacgatctttgtccttgttgatagcagatgatggctcctgagtgaatcgatgtaatgcagcagtagcttcagaattctcgagcacattaaccagcgacgtgcgatgtagcgtacggttttctgagccttgtttagcagcggattcctcggagtgctcgaagaccaagccgatggccttttctgacgttattgaaaagtggccacttttcgcatcgccggcttcctgacaatcacggtttccatctccggccatcctcccagctgtagcaatgttcccacgttgtatgtctataggctcagtattttgaaccgtctttctgggtgtaggttgaggaaagtcgggttgcggagaagctccagcatctgcactcggtgtcgctcgatcagtagcggctggtcgcttccttgggctgctgagtagtccgttgacgtcaggcattgcgactgaaacgtcagttgaggcgactaggcgaagatgatagtgtccttagcacaacctacgtctcagctgcggtgtccaaagcgagattcccttctgccagtcacgatggcattcacacgacactgcgaagttctcaaacctaaagtaggtgtcaggcaaagataaacgacatttcgtgcaagtcatcaagttagctcctatcagatgcccagcaggacaacgaagagaggatcagggtgaagttgttgagtctggagagttgtcgggaatcccaactattgcggccggcgcggcccaatcggggacgtcagataaggacaatcaaaaggcggtcaacttcctactactatggccctaaataatcataactgcaaggacagtgaacatacaaaaagaaacttaaggttattgattctatatggaatgataaataatgtaaagtccgacttcgctcacattgacaacccaatgcaccaaaactttcaacattaagcgggatatattgaaagtgttccagacactgattcattcgtaaaatacagaagatagaacctgctcttccgaatgcttcattataacatgtactacagcgtcggcaggtatgggaaaggcaccgcccttccatacaaacgtgaaaagctagtagtagtgatctggatgacggggtggttgagggttgtatgttggcgaagtatatgcttgtccaggacgatgctcactcccgtattcagaagctgcttcagggtgtgttgcagcaacattactagcggacgcactgaagggtatatattcatcttgtgccctgggaggcactcgggtgctcataggagtgagtgttctaacaggttgttcgtcatttgagtatgccggtgaaccacgattcgtggcttgggttcctggagtaaacgatcgcggcgggcgaacagactgcggggatgggcgagatttgtgggcatcggaaggagtgtatgctcgcataggaccgtcaacattggtcacagcagagctcggcgtttttgtgcgtgagtaaggatcggcgggaatgtcatagggacggaaagaactggcggatgacggaccattgtggccgtcaggactgtatagatcctgcctccctggagtacccatacgactgggaggcccgcggttataataaggcgcgggggtaaaattcgagcgagaaacaggagtttgggtgcgcccagtgatcatagaggcgtcacccggaagaggagggactggaggagccggggacggttgacgatccagtggactgtatgccgaaaccgcagaggttgcggagaacgtggcaggatcggaataggctgacgattgtgttactgtccgactcagatctggtttctcagggaatgtagccacgttgggaagagtgggctcgcgctcttgcggtgctgccgtcggtgggcgcgatgtatatgctggtagagtagccagagtcgcctgcgtagtactgcgcgaaagggtcgagaccatgggagccttgtcctcatctccaaacaccggtaacgttggctgccggccaggggtgagatttggattcgtaggagaacgttcttgcaaagcgacaccctttgccagagctttattcaccttggtccgaacgatgcgcttaagtcgggtgttgatcttccgacgacaataagccttcagtgtcccatcttcggcggggatgtggtgaaaaaggaaaagcaggtagagaatgattgcaatcaccagcttgataatagacaacacccaaactacaacagtaaagaccataccggccaagaccagggcgcgcaggttgttctcttcggcaaggattttgacattgtcgaagaattgtaagataccggccttgtcttcttcaaccgcattttctcctccgggaagcaaatccatacgcattactgaataaagtgtcataccgttgacgacttggcgcggcccgtcagcaagcactgtgttcatccagcctggacatgatcagcataggccgctagaaaacacactggtctggcatctctcactttcaaaagcaaagtatgcaaacaaggcgacatattcggctccctttctattcttagtgagctctccgaacaccaaaaatctcctccagccacggacatgatgtccgaagcgaatactctgaactcgagcagcgagcgagttcaagtaacattgggcaacactcccagaacgtatcgcacggatagcatgaatccatctccaggccagtagcgcaaaggaaaggaggatgcagacggcgaagatccatcgcgaatatttaaatggaatggcaggctcgatttgtcccgcccaccgggaaaaggctagaagggtcacggcagtgaaagtgtcaactgcatagaccgcgagagataccaggaggaagacgaataaaaagaaataagagaacggcgatagacaggattccgacttgaaatcatctaggttctaaaaagcggcgcatgtcagtatccatggtcgatatcactgcagacgcttgagaatatcccggcgtaccatataatcccattgttcctctaaagctaccggagcagcattcttttctcggtcgccgcagcaaggcattgcgtgttacggtctggtcctgccagacaccgatagagagcgtatagcgatcgatgcgagccgatgtgatcgaatgacttcgtcggtccagccggacaagtcacgatcacaacacaggataatagtagagagcgaaaagggcccaacgggctttcttcagtgagcttgagcgagagattcgaataaaagagtgacaagcaacgaagcctgaagaacagcggttggagttctcaaaggcgcattgtcaccagtcaagcgctgcggctaaagtttcaagaacgtgataagaaaccagacaccgctcagataggcgccatgccctgaaggacactcagctggtatcacaaacgataacgcttatgccttgacgctgatgctatggaatgcagattgcagagagtgcttcgccaagccaggggaaggttggcgcgtaggaattcggcaacacaggcgatccctggtggggagacaaatactggggactctgaaacacgaggggaatggtggatctgcgggtcgatgagttgttcaacgagcgacaagagatgttggtcgcgaggaatggagactgggagagcctgaaagagcggatgagaagcagataaagtgctggcaaagcagatgagaggagaacagcgacggagggaattttcggctgaaacgaacacacacactggggtcacggctgattgcttggacattcggagtttggtctagcaatttagtcagggactagttgggcttatcagcctgtcacaatttcgattggcggggacngtaggcctggcggtcatttttgatagagcgttccatcgctcatacgctatggcttgccccttttcatttggattatgagcagcgcctcggtgttacattattgaacattgaatccattatagccattaaaaagcgctcctaacagtcgtactcccatctctgcagttgtacttgtaccccgccccgaccatggtgggccaaataggtgacctgctagtctgggcttagtcctgcttcagtctcagccttgtaaaactccacctgctccactgttaatgagttgaggattatcatcaaactctagtatcgccttgcaaggcgctctagtatcgcaggcccagaaattgacgatatcagcgagctcgcaccaaactcgtccatctaaggaagacaccaccggcaaccgccagcatacctgctattgtcaacaccaatgagcggttgctaatgtacgtttcctcgtggacccgccccagattcgtcacttctccaggcctgacagcgtccttcgctgtgccttcgacctcataatctgcccagcggacttgcgaaagactgcgctgataatcaaccaccgtcccagaccagttgttggtgatcttgccgttctcggtcttgtaccatgaactgcagttcgcatccgcaaagctgcttcttgccaacgccttttggagctccatgttgaacttttgcagcgcacggacggttggctttatgattaaggtcttgccttgggtacgggcttggaggactctagc

SEQ ID NO: 4491 - DNA, 506 bp, Emericella nidulans
aaccctacttagcagtgaagatccagctcgggtcacacaaccacaccattcgtgcttgcgtttgcccatgatacgtcaatcgttgcctcacaccccggttatcacggccgctcgtggttcttcgcgaatgccgtgtttgtgtatgccgacgattctactcgattcttcgcgatgacgcagacatgatctgccccatccctatccgcaaacagccgttattcccagcttgagctttttgtgccaactctatctctaacttgaaagggatagtagctcagatccatggacaatggtagctctgcccaacgtgggtcgtcctgcacctggctgcacctggcctgccggcacgatgttgatcaacctcaaggcatcctgacgcaaaccctaacctggagctggcccgtggcgtgaccgcgactggacgagtctgattcaagatccttgttttcctgctttctgcaactataaagcccagtcccggccgccttgtcaaggtgtgttgcaca

SEQ ID NO: 4492 - DNA, 4073 bp, Emericella nidulans
gcgcgacagcaggtctgccaccagaattccgtcgcgaccctgtactatccacccccggcgggtatctgcttttgtactagatcgttccaccggctggggagatcgatcaacggggttgacctgacgtactctgagtaggtagcgtccgccgctttaccccgcgaagcgcaagcccagcaccttgtgactgtgtgacatatcaacctggaatcgtccgactcgggggcagtgattcaggcactggctcaatgcacgggagcttccggcgaaaaccatgggacatgaggccgggatcggatcgcgaggatgacaggccaggcaagcacagaaggtacaggaggtgtagaaggtggcggcctccactctggcctggtgaaactgtttggagtcttctggagtctttggagtcgactgctcctcaggtgaaggggcatccacggcgctaaaacggacgacgctgattggagcacagcgaacgagaggaggggcgataactgaagggccagagccaattcgaggttgcagacaccagcgcatctcttcggtgaggcggacagacgagcagggtgtgctgagctcgctgggatgattggatgcagagcagcgccgctctctccctgaacaggcaaaagagcaggcttcacgttagtctcagcgtgtccagaatagtgcggggttggcgacgagtcgatgcccacctgcgttcctcaacactgaaactcaataatgtgatgttagaagtgcagataatggctggggccttcagccaacgggacccccgaccgagctgtggtgaaggcgctgggggcgctgagagcgctgagggtgcgcatctgtcacaggagctggcaatggaggatgaccagcaacacgcaggagtctagtagtcgacgactaggttcagggctgccaacgtgacgaatggagctccaacttgtttggtctccatagtgctccgcttattgctgtagagaccagaatcaatcagatggaggccgaacagacgtacctacccatctatttgtatcacttgctggccccctgctttggaccgaccttgtctgtaactctcttcagcttcttcccagtcttcttcgagcagagagtccaaagctccgcctgagcggtctcagtccagcttcaattggtgattgaccgctccttctacttccacgaatccggttggtttcaccgccgctctctacgtcttcaggtacgagttcgttgtcttgcttggaatcaagagcagctactgaactaaaaaatcatgcaaagcctaagacactgcctattccctcttttcgccagtcgcatgcagcctcccaggcgtcttgcactgctgtccgtggcatcatcgagcatcataaagtatcttccagcaccctcagcagtgccctgattcatcattccactgcatccatcgactctttggccattgacgtggtaccactcccttgatacccgactacttttcgacctcttttcgatctcttgagcacatctcttcgcttcttccgttctttggctgccggtcgcttgatcattgtctttcctttggccacttggccttattcggcatcgaatcgcaaaagaaagagcccgagagtgtggcgcagtcgctttattgcgttgttcacgactccggtttgcccctcggtcagcagcgactcaggcttacgtgataaccttcaaataccgtttaaatacggtgcctgccgccatcccaaactgctgattggttccagtcctcatcgcggtaacatacaatacaccaggggaagaaccactcggcgttgcatcatctcttctttctttccacaggactggatattattgttgtccaggttggttttttaaatagcccctgttaatgcccgctttatcccttagcccttccatcttcgtctttattccgtgtctttccagattgattacaaaagctttccattccccttccggaaaggtttgctcttgtcccctatctgcatctgattgccacatcccgcattgctccataccgatcatctgtcaaggcctggctgtccgagcgttttgccgcccgttaaatactacattgcctgccctgaacacatcctcgacatttatttttaacacagattcaatttccctctgtcggtttgatcctttcgaacgcatgacagtattacctgatttcgacccctacgaagcgttgggggtatccaaagatgcgaccctggctgggatcaaatcttgacatagcaaactaccattgaaaggtgaccgccacacgatcaaggccgagacgattgatgcagggcggcccagacccactttcagaaatgctcagcaagagcgcgagtgcctgtccgatgagacaaccagggccaagtatgataacaaggtgaaattggccgaactgaagcgcgagatggcggcgcgcggcgcttcatatactcgtccaaatacgcgcgagtaccgcgatggacggatctacgaagaacgagtccccgccgatgctcgatcgtcttccgagaatttctttgaagaagagggtcgctataccgagtcaccacgacctacgtcacgaaaacacgctgagtatggtgcgcgcccacgttcgagggccaccaccgatgagaagaggaggtcgtccaaggctgcgccatcgtctagtgctgcgcatgccgccaaaaaggaggctcgcgattccagaaaagcctcccgagcggatcgggacaaggtccgaaccaaggaacggaaacgggagagccacgataagtacatccatattattgatgtcgattccgacgactcttcagccagctcggaggtgtatttcatacctgtaaagaagccctccgacaagcgatatcgagatgcgaaaaccagaccgaccgaatcagttcctcgatcttccaaggctcgttaccgtgatgaggacgactacgactctgatgattacaagcacgataaggttgatgtgctgtcttcccgtgcgactgattatattcgccgttcaaaggaaaccattcccgaacctgatcgacgccaccgctcgtctcgctctcctcatggttacgagtctggagaacattcaggtcgatcaagacgatctaccagacctcctacgtctcaccacagttcttatgagcatcttgaccatgctccacgaactgttccctcaatgcccaccgcctcaacgttccccggcccgcaaacatcgcatcactcccggtcttcgggccatgtacgttctgattcccgtactcgccggacggagcacgtctacctcgctgagataagaacgtcaaaactgcgaggtgagaggtccgactcgggctacgcgagctcaagcccaactccagagatccctgagatttcgccgaaagcctcgcgctataagactgggcctgaaccagttctcatagagcccaggtcacagggaccaccaccaccgccgcttttgagacactcaagaacatactcgccgcctcgtcaagatcggccgaatattgtgaggagcactacctacacttaccctgtcgactcgtcgcagtcctctcgccgaccgctctaccgggaactcgatccggtagatgcacgcatcaaagagagagagttaaggcgagcaagagatgttcagtacatcccttctgcgcatgctgcacgctcctccgactatacccggcccgttggctctggacgacggacatctgcttatgcctagaactacagtttgatagtttcgacccctacttttatcttcagcctcgtgatttatctctcaccccatgactctacgataacgcattttacccggttgcatactcaggttatctttagacattgattcggtctgcactcagacaccatctcacttatagagatattatcagtatgatgttttctcacatttttctttctcagcatcgtttattccgtccatttgctatatctggcgcttaatcggtttactttggatacatatagttcttatcatttttgttttatgttttatttcggtgagttcgcagggtgggttaacttggtggcctggggctcaggaccaggagtactgtttacatcggttt

SEQ ID NO: 4493 - DNA, 1337 bp, Emericella nidulans
ccgctcgattcgctaggagcccagaaccacttccttcgtttgccgtgcccgcggttggggattctgtaacattccatccttggacgctcaaagtgtctgagagtcttgtggtttagggagagatgaagcttagaactaaagtgaaaaggaaagccagggagaaaactgcgcgaaacataggagtcgagaagttgaagcagggaaactgattgcaatggaaggttagacggagaccataactatagcatgctagcccagaggatcagcaacagacgggccgcaacatcacgttcttaaggttcagctattcgacgcccaaaagccagtcttcctgatagtcatcagcgaaccttaacagaaaaagcaaatatacacaagtactatattgaacatgggcgcagtgactatggtcgagttgacgctcatactgcatcggctaagactggcagcgagttgttgggactaagaacctgatcttgacacatctccatacagagctcaaggacgcacaacacagcatatcatggtgtcaagagaagagtcctcgtatcagtcaattacggagtattacggatttgagttttacggtgtagatttgctcctgcccagttaccgtggtgtttacggagtccgatgtaacagattctcaacgcgtcagagtcatcaacctggcgctaatgacagagtgcaagctttgtatgtttacctggaaagaacgtacggacatggaataatgcagcacaccataaatgcatgaggtctgctaactttcaggtatcatccgtggcacatcgtaagacccccaagcaaccgcttacgccatgaatccgaatgtatgagtcataatagatatcgccgcccgaccaagcaaaggacgaattccattaccgcagtccaccctgcattagctgctgtcgcagcagcataatttgactacgctccataggcggaagagcgtcaatggccgactgtggcatattaagaacttgctgcagtagctcctcctgtcccggaacctgctgctgtgttggctgcggcggtggttgagcaaagggcgtgttaaccattggcggtgtggatacttgtcctggaactgcgccgaatggctggaacgctgcggcagcaggaggagcaggtggtggtgccatgggctgtgcagcttgctcgaccacagctcctagggtgctgtaatcgacgaggttcaggagaagtagtgcctggaaaatcgcatacgccagttgaggtgcttgccgcaggagttctgtaacagaacgctggatcagacatggctaatgctttcatttgctggagtacggcaggtacctcaatgaagaaga

SEQ ID NO: 4494 - DNA, 5672 bp, Emericella nidulans
cttaccaccctcagcatggactatcggaagccattagcattttctagcagcactacccgattcgaaaacatacctcggagatagtcttaaccgcgtaaaggtgatcgataccctaagggacatgagataagccaaggatcctcgcagagcatcggggccacacccaccgggtccaaaccgatctcgttcatgacagtaatgccagcatccttgcactgctggtctagctccatcatggccggagaaacgtaggatgtggtgacaacatgcttcttggtgcggatagccgacttgataacctgggcgtggaaggtgtagggaatcaaggaaatggccaggtcgaccttgctcatggcttcatcaagagccttgtcatcgttgacgtcgagggagatggccttggtgttcttgaatccttcgcagagtttcttcgcgctctcgagggttctgcatgctgtattcagggtagcggtcagttataggacaactaagcgcttaattgcaatcgagtacgtaccgacagtaacttcgacgtcggccttgctgagaacctcaacagtgggcttggtgactatataacaaaatctagtcagtcatggtcaggatggtgcggggttctgcgcagggatggaagggctattgaggggggttgaatagtaccgaagcctgagccaagaagaaggaccttagaaccagcaatttgcttagccattgtgagttttagggaggaaattgattgtactaagaatcaaatgagtcaagaagacctgattcaaaagttatccccgccatagggatgatcacgtgaactaattcagggcggtatcggagacagctccggcatttatgccaatagaagcacccaatgataattatagttctgttgttatctctatcaaaatgaagtggtccagaaaaacaagcctcatttgtcattgctatggaaaaccgcgcgctcgccgcggtggttgagtgggtcatttacacgatcaacaggagctctatctgaatatcaacggtgctaatgggaccaagctgccccggtgaatgaaacaaaagccgtacctccaagtcttccggccctatacccctgctatactataagtatgactttatcaagaaacaaactataagattttcgccttggcgccggaactaaccactaggtcttccttgctgtcgtccgaggattcctggaaatcgccgtcaaagttaccctcggcatctgggttttgtctggctttggagaccatccgctgccacctcaataacactggcaagaaatgccataggtcgaactcgggccataggatatccaagaaggcaatctccgtgttttcatgacattgccacagcatgaagtcgctgagacgttccacccctgacgtgcggatcagcagatcgaggggagggttgtcgcgggtgagcatatgatctgccaaggtttgtcgtgtaatggtttctggcgatttgaaaactgggggctcggaatcagaagaattcgtcgtccgacctttcgtaagctggtcgggtaagaggagagtggcgccagatgagagagcggattcagactggtagaccttgttcttgtcgtttggtttttgcgcatcatcttcaccaagtgtggatgattctgatacagaatcggattcattactcaagttttccaacttcccattcaatgtttgggaccgaatgttctgtgtgatatggtcttcagagaacggtgtgcgcggaattgtggacgacgagtgagccgttcggataggcttgctgtactcggctaccgtttcgcggatggcgccagtgatctcgtcgcgcgacgtataaggaaagcaaatgttcagaacacggtcaccattattcttcgtcatgtcgactgcgcggttaaccgcggcaagcacgtcggggcggagcaagtccaatcgacctagtatccgtactttcgctccataccgatccaagatctctccatgttgggccatctgcgacaatttgacccttgccatctccatcaaagcatccacctcaaacttggaccgtttgaaattctcaatactgaacgcgtagatcgtgacgacttgtactccgctcctgtagcacacctcaaggatctacacagcaaaaagaattagttactgcacagctacttgaaagaagacagtaaagcggctgcgaaatagacaggtggtgtctagacatggcatgagactcacccgtgccagcgcctcaaatcccagattatggccctccacggtttcgataccgtgagatcgggcaaatctccgattcccatccattatgaatgcgatatgttgtggaactggcccctgtttgatcgctccaaccagcaggtctcgcagcttggatatcgcatattctatggggggtgatgcaaggaaccaattccggagtttcgagaggtgcattgatgtagccataacgaaagttgtttgtaggacagcgctaataataaaatcaatatccgcggtatttgtctgtgaatggacgcccagaggtgatatagaatagttcaagcgactgtcgtgtgcaatgtgaagaaaggcgaatgatgcgaaatttgacagatgccacgccgaaggtaaaggaagatctaaactcgacggtataatacaactaataataagtgcccaggaaacgtcagcaggaaatcatttgagggtcgactgggcgcagtcagtggcaagcaggctacagtgtttcctgttctctttgtcgatctggtgcggatagagaaatgcgcgggaggcaggaatacatacctgaaagagaggaaagaaacgaaaacggtggacggcagacggcttgagctgataattcgcttcaacagccggaggaatgtgccagtctatgattcgaaggaggacatggaactgatctcattcatggttgcgtcggtcgttccagagcaaatagactgtgggtcaatagtccgcctggcccacgtgtaaagccttcgagtctcaagctacccagcggtccgaggttcttcccctctatcagaatctcaacgaaatgatcatgttgtgatcatatgagcacggaaagctgaccctgagtctggagcttcaaaatttactcaaatgagggacaaatttgccccaagactgtctcattttgctatgggatcacttactacaaacactaaaaggaagtacaggaagaggataaaacgcccaactccgccgctgtcattacaggcagggtgaccctgcaggggtccgatcaagcacaaacattctgttagatatctttccggttgtcttcactgtgcggcgtccccggtccggagctagccatgtcccagctactattatcctcactccgccgacgccgctggactccccgctcacgcatggcatcccgaatcttggagctcacttcgtcaaacccacctttggttgtgagctggctgagaggcttgagctgctggcccgatgtgcccggcaaccctccaaacgaactgctgcggctgttgctgcggctgcggttacggctagagggtcgcgtcgagaaaaagccgaagttcgcaagattatggaaggactcgtttcgaggaagtggctcttgagaaggcgaaccctcatcgaagttctccgtgcttgctctcctgatctccacgctcggtggtcgctgttcaccttcggggttcgcagattgccggttgagctcgcggaaaggatctgtcacaattcttgcagcatcaaagtctgggaacagttcgggtccaagcgtgttaatggtgtcggtgacctgcttggcgagcgcagcacgtcgcaatcggagtttaaccaaggtgttagccgacgaagggttgagtgataatagtagcggacgcagggacttgataatgtccatgccgatctcaccaatacgcagtgcagcaaaagtgatagtcggaaacaagaccatgccaatcggtataaatgaccacagcggcacgaaatcaggaacgtatccatttatgcgattacgatatgcccaataggtaaaggctgcggtatagaacgcgtaaagagcgggggcgaatgcaagagcaacgaggagcttccaagttgccatcacatcgcggccttgaagcttgaccgttgaagcagcaagcgcttcctttgatttcttgttcgaaatcaactttgttgttataaacaccggagtgaatagaaggaggccaggtaaggtcccgattgtgagaagtgctaatttgccaaggcgatatatcaaggtcgcaatcactttgacgaaagaaaatttagcatattcaacctgatggtcacgaattcccaggagtcgcagttgcttgttgtagtctgcaatcgacttcttcaaatccacgatccgcggatcgtccttgaaatgtgagtaacccttgacgagacggcggttgagttccacaaccattgggagcggaagcttctttcccttggtgttgtacagacgacgtgcagcttggataacctggaaattctaaatcagtctggattcataccgtgactaaaaagaggtgaacagaccatcagtgtctcgtaatcagggctggttactgtcactgcgacaagactttgatatatcatctccaatagcggaccaacagcaccccttctgtccccgtttttatacttctccactaattccttagggacctcgagaggggtaccaaattcgattaccgccctcgagcggaatttatgagcgtggaaatagttcattccgcagggtacaattttcaagccgcagtccgggttctcggccaatgtaccgagagccataagagcaacaccagctaggccgatgttaattatcctgcgttcatgggtatggcgaggacttacgtttcaagggcagtagatccgggcgatcgtggctgcctccctccgggaaaatgccgatacagccacctccaaggagccgcccaaatactgcttcatataccgcgctctggtccacatggggtgccgccttgaacttaaaaaccttgaaatcggcgcggtctttgtcggaaacgtctccggtgaaagttccatcatctgtgatatcggtacggcccgttaactggaacagcgcatccttatgagtgaatggtttcttgagtataagctcctccggaccacgaatctcggcgatacttgtactatgtgaagtcccgttaatagttggcagcgcgatagtaccgtctttctcgaaacctggcgcttcaaagtttgtgcctacgccgcgcaatagagtcggttgattgacaggatctggtagatatacggtaccctggccgggcttcagcatgtccatagctctagccacgggcactgtccctatgcccctcgccaaaagcccaatgaacttgcgacgaaatgatttttctgcgataagaaacgagattcggcgatgcgcttcggtgcgcagcacgcgcataagaattagagagtcgacgaactgaatagaaagcacatacttgtaagtacgtaaacgggcgagcaagagcttggtataccgtacctgattggcatgaggggctgccacaatgatcatcggtcctcttcgaggtatcttccatgatccgcgcggatggacctcccggaacaagagatcaacaaggacagagaaagaacacagcacaagatcgtataccacccaattaagggtgaatggcggtttct

SEQ ID NO: 4495 - DNA, 3786 bp, Emericella nidulans
tattttattattatggcatgcgtatggcaacccactccgcagcactcgcaatcaattaactgactatctgggccggttagacattctctgtcggcctccaatgcattagtatcactggcgttttccgagcaggtatcggttacgaccacgtcagcgtcatcgtggcagaccctagatggggtacagagcccataataaccgtgtcgaaactcatcgtcccgctgcaatttgtgtgggtgctgagtcttagctgcaccaagatcagcattctcttcttgtacctccgcatcttccctgtccggtggcttgtgatttcttcatacgcaacaatggctgtcattgtggcgtgggcgatcgcgacgattctagcgggctgtctgatctgtcgcccttttgcctataactgggataaaaccattccaggcggttactgcggtgaccaggttacgagtttcacaatcacgggcattatcaatctcgtcactgacgtggtagtccttgtgctgccgatgcggaacttgtccaagcttcagatggcgacgtataagaagattaccctgattgctgtttttggtctgggcgctgtgtatgtccactctccccttcatccttggcatagccggctcgagattgctaacggaagaaataaacagaacatgcgtgatctccgccctccgcatttccgtcctctccaccatgaacttcgcagatatcacctacactataccaaaagccaatatcttcagcgggatcgagccgtgtctggccgtgatcctcgcctccgtgcccatgatgcggccgctgcttggtcgaaagggcgggagcaccgatgcaacgggccaaacgcccgtctattcggattccaactcgcatccgcacccacattcaaagtccctttccaagtcaagggggaacaggaactccaggattggtgatgatgggttccagccacttgatgatgatacgagtcagctttggcttaggcctctggggccgaaacatcatgttggtgtttcggtgtcgcaggatacggtcacgggagacggggagagtacggggagtctcgagtcgttatcggagacgagggggaaaatggcgaagagaggtcctgggattggcgttgggtcggggatcacagtgaagcaggagtggaatgtgggggagtcgcgatgaaatatgcttcttgaaaaatctctttcctttgttcaacgataccattatacgtctatacctggtctttcgcgcgtatgttcgacagactacttgctgctaaaaaagccttattccatgtaatccgtggtcgtcaagtcatatggtcaagtagtaaactaggcttcccggagccggttgatatcgtggcatgactatttgcccgtcgtagagataatcggttacctcgctccactgcatcataaagactactcgagactattcgacgtgacgtttcaaagcctttgcggaagtatattctcagtcctcatacaattcgccctttcccggacgatatcgacagtcatcaccactcacaaacaaggcgcataaaagagtccaccagcacaaggcaaaatctacttattcaggagaggctatcaatattgagttggctgttatggtacttaggtaggcctattcatgaacggcaaggcgacaaattcgcatgggaggaaatggacaggtcctgtcttcaaacacaactaggtaaccttctatcccgcaggctggtgggtttcaggttttgcggacctcaaggttttagatttcggattcagggggactcaacactccacaagtttggatatcatgcaacgcgtattgtcgctgcggcccagttccaatggtaccttgcgtcctcgtactgaacgagaaaacatagtatttaacaccgggcatctaaggtagcattgtgatatactctgttttagaaacagagcgcgataaactagaacagcgttaggacttcctgtccagaatactcacccgcaatatagaaaatatatcaaaggctcactgccgggctcgcaactcaaaccatcaactcgggacataaaaggctcgcaaccgcagggtgaaagcagcccaataggcctggttatccgaagtcaaggaaagcgtcgttttcacctcgcacatattgccagtcagtagtttctttctctgtgcgcttgccacctcaagactggctaggacgaggggatggtagagcgaatgatcggtattgttgaaaatgatcttgtagttcttcagtcaaatgtgacaggaatacagatatagccattctcagggaaaatatcgaccctagcaactttgactttcaacgtgccatccggttaatttactgatcttcattcaaggctcagactgtaacactttgaggtatgaagttcaatatccgcggcggctctcttcccaggctagcttttttttgcatgttaagacctgaagctgaaaaaaaggtctagaacggggagatgggttgtatttcgtgggtcggtaatgtggaggacattcggcacgtccaccgattgatccgaaatgattaaatccctccccgcagcggggacgctctcatgcctggtacggtaatcagggctgcagtattaaagctgatgtagatggctgcgatataaaaacccttaagtgagattacaccaaacacgatcaagtatgatggaaacaaagctggaagtatattgccatagcgtgcgccctatgaggttgtgcaggtatgcagtatccccaaatcctttcaccaaatgtcctatgcagactataactgtggctgacaacattgacttagaagatatacagcgctattacctccccgctcagggccatcccaggcccattctatactagtctgacccggttgcctctgaagctctccataattgctggacaacggatatacttcatccacagcctgcatcagagatatggccccatcgtacgtgtcagcccgaccgaagtctccattgcgtctctccctgagttcagagagatccaccgtgttggctcgccctttctgaagagcaattggtacgaaaagtttgtaatgggccagcactcgccgggggtgtttgctatcagtgatcccaagcaacacggggctagacggagactattcgcgagggcgatgtcgaataccgagttgagacgggtatgggaggacgtagtgaggagcaaggttcgccaggaagttgatcggattaagggggaattagaggcagatggggccagatgcgatgtactgaagtggtggacgttccttgcgacagatgttgtagggcatctgatgttcggggaggatttcgacatgctgaatatcggtgtggtatgttccttttgccttttttcctttcattttattcttggtttcttttcccttctttttttcccttgacttccccctctaccctctctctttatttcttctttcttctttcttcctttcctcctccctttttcggattttttggtttcctggacaaactttctggctgcgatgcacactgaccgggtagaaaaatgaatacattcaccttctcgaaagtacaatgaagggctcggtccttaactcaaagctcccgctcgttgggtgcattgggaggcatttgcccttttcagtcgttcgatccattgttcgcgccaatgactaccctaccaactacggaaaaagggccctcacaaatgccccatctaaaagtgactttcccccaaaaattttttcgggaatcctgttcaaggccctaaaattccaaattgcaaagtgggttaagcgtgcttatt

SEQ ID NO: 4496 - DNA, 2913 bp, Emericella nidulans
tacttttcctctactcctccacccgaacagctcgaggcgccaaaggacgatatttaatgctcttatttctcccgaatagtaaggtcacttagccatacccttaccttcgtactagtctggcgaatatgaagtcaagcgcaaacattgacggtagaagaatagttccctttgcgatacactcgactacaaatgatagctttcacgatgtgcatcccatcttgaatcctgccaactctgaagctctcggatcactgccgttactctcgcatcaagggcaacatatacgaaacgaagagaaggctggcaaaggtgtactagatataaagaagcgcctcaattgcgagcgagcgaattgtggatcgcgtacaaagactaccggaaagccctgcaaagtcttgctcaaagaagataagattgcggctgcggacgcagtgatcgaatcgctcagacctctcacccagtcatcccccaatcttgaggatcaactttttgagctggcgaacatcgtacattgtcatcaacatgccagcaaagtgcttaagcaacagcgcgttaatgattggttcatgacattccctaccggagacgataaaaccatacctgtcatgtccgtcgcgaagaagatcgagaatatcctttgggataaagtgtcaaactgttgcattggaaagaacaagaagggcaatcgctgtcagaggaagattggtggccaaaaagtccagaattatcagaggactataaaggagatcgtcaagccagacacgtatttggacgacagtgaacttgattacttcctccaggttcttcaacataacactttttgcttctaccacgtttctgatcagggtgccaaacaggtaaaggaatggaaggacactatcacaaatattcggagaaagagtggtatcccagcagcagactcgaatatctcccaatcgggtaaaggagatagtcaacaagcgagcacaccaaacgttcatatggatacatcgagttcaaatatactacgacgtcggtcgaaatctttgtccccagctcaattttggccggaagagcacgacaacactcctttgaaaattgtcaccaagcccattgatacggccgacacgatcccatatcttctgccggagacagatcaaacgaaaggctttgtgtatgcatacgaggtcgagagtaacaaaggcctcgtcaagatagggtacacaagcaaaacggtcggggagcgtcttagtgaatggacctttgattgcaatagggttgtgctgcctatatatcctatcgattcccgggctgcggtggccgttccaaatgcacctttcgtagaggcactatgtcatgccgagttaaggcaacgcaatgtctggattaactgcgatgcttgcctgaaacgacatgtggaatggtttcgggtctcacccacagaggccattgcgctaatacgaaaatggtcaaattgggcgtggatgcaaccactaccgtaccatccgagcttggacctggctttagatgcatgcgctgaggccaagatggaagataataatgcatttgatgcaaagtggccagtggaagagatacaagtacaacttcaggccgtatagagaagccagaaggcccagcgccatcaaaccagaaataaaaccaaaggttcggccctgctcactattcattattgtactacggctaaacatctcaatatgacatgtagccaagtatctgtccccgcgacgtgtgacatggcagtagcacgaacaaatgttataataaatgcactcataggcaagatcacaagcataactgatcactgaatgtctggtaactcatttgtcattagctcatatagtctagttaattagctgtcaaaaacacagttcaaattgtcttacgtcctgccttcagtgcatgacgctttgttcagtgcgtcacctgaaggcccggatgtatttcaagttcacccgcaaggtctgaactgctgacatggccttcagaagttcggagactttcttcagacttcgacttagtttgtcctccttgctccgtttgccctgtcgagggtccctgtctgctggagttctcacgaactcttctaaacattggcaagaacaagaaatcggtaccattaaacctgtaacaggagaagtgaaccttgcaaagaggacagagtataattatgttatagttagtacttgttctgtctggataatctctaaataatcaactagactttttttttaatgaaaaaagaagaaaaagaaaaagagaacttaagatgccctgctatacctagaaagatgtaaacaggatacttcggccgaccattacatagttaagtaggtagaaagttaacagctatttactacttactttagtcaggctaacaactgctatggaaaacctcgtactgaccagccgttccacccctgtgtaataaccgtgcctagtaccggtacagcgggtatcatagggactacaacgaacccaagggtcatttatgctcgggatatgaactacagagccgcataatgagaacatgtccggcttggcaccggttccgtgaccctgatttggtcatatgggcctggaaggcccaggcgtataatctgtcgaaatgggttagaggtagtaccagtaagggtccatcgggcgacaccggtggcttccctcgaccactgaagttgcgtatgggatgttagggcccaaccggggcacaattagttccggcttcctagccgctttagtcaaggcaaatttactccaaaccagatccagcccttggccaggcacagtagctgtggctttagaaccaagggtgttccccgtcgtccagggggaggcagcaattatcgaaaataaagcaaaagatgggccaactcgcgtgctatgtcagtctctggccacaggtctgctgtgtgcctc

SEQ ID NO: 4497 - DNA, 3702 bp, Emericella nidulans
ctaaggagaggaacgagggggagtacgttgaactttcaaggcaggctccgcaatgctgcgtgccaattcctgaaacattctcaacgataagaacacagcacattgcaaagctcataagctgtaaagtgttgcaccgtcccttcctttcgcaaccccactattcaatatcggagatagaaagtgccggggactcacccaatctctccagtaactggtataatcactgtcggtctcgctgttgaagtcttccatcattttgacggtcggcctgttggagcttatccgggtttaacgatatgtcgctctcaaagttcgcctgcagtaggctaagagaagactggcccaaggtagcccaagcacagaatggcctccggagctgtacagcagaggtaacttttttttcagagcattcacgagcaggtgccttgatgcgatcacaaaaaagttgtcttcaaagtgaaggaggggctcacagtgttgaaataatgcagtgtgtgtcttcaccattcttcttacggctgttatcagagcatctttaggtttaggcttagcgcggggtgggcggtcactttgaactgtctatattttaccgctttcttctttttgtgaacgtgatctacttgcacaagccacattccatgcctttgttccacatctgccctcccctatctatattattggctctacgggtacgcttcgaatcaggtgggcgtcaacttatagtgagctacaatctgtatcaatttcttgttatttacaaagccgacatgtaacgcagtcctttatcaagtacgagcctcgaacgatttgcggcctcttagctgctaaggggcgggttggcgttggccacaagttgctcgaagtaggcctggtcgtgtggttagtatatggtactcactcaatcgaaatgactgcaacttacctggaaccaggtgccagcctcaggagccggctgaagggcagcagcggcaccacagtgagcgtcgtaacgctcagcactctggtcagaggtgccatcgctctcaccaccaggcttgacccaaacgaaggcgtcgaccaactcgtcaccggtgtcggtagttgggcgaactccaaatccagttcccttaacattgcaccagtcgccccattcaatctggcctgtgggctgcttgccattgcggcctgcatagaattagcctatgtccctatccaatttttaacggcatacacaccggtgtcaacgatgaagtgggcatcccagcctgcggctgatagctcaggagcaaagctgttgatgtagcccttctcgtcacagaccgcattctgcgacgtataagaagggcaggtgtcgatgctgaaggcattgtagttagccacgttggttgcgagcccacggagtgccgcaggcgcgccagcatcctggtaaacacccgcaaagagctgggctgctgggccgatgtttgcgggccatcccagccatccggcatgacctatgcaacattaggtacgaaactgagcggttaaatgtgttctagacataccagcgtcaaggtacatagatacgttggggagatccaactgggtaatggcgtagtttgtgcattcgaggtaagcatcctgagcattggcacacttctccacattcaagttggtcaccagatttgccagactgtcaggctctgtatttgattagcacagtttcacggtcttgcaagaacaaactaaccaataataaggattatgttggtgtcggaatactccacggcatgcgcgcgaatagcatcaatatactccttgtacttctcaacgcctccatcggcaattgaaagctctccattgctggccagggccgcacagtcacggtctggcaagttataaacaacaaaaataccggcaatcggtgggttggctcccgcgtcattctgctccttgatgtccgccagatactcgcccatggtaggaaccttggccgtcgtatccctgaacaatccattcatcagcgtcaatgtcaatgatgatacacttgatgtaactcacagccaatggaacgatggaatctcagcggcatgggtcgcctgctcggccaatgaaccagtcattgacgggacagccagagtcataacttcggagctgtagtacgggttggcgtagagctggtatccctcgaacggatttccggttgcctgcacaggtattccagagctactcggcgtcccagcaggtgtgcttgtagcctgtggcagagcgttcacgctcacagccccaagggtcagcattgtcgccaatgctctcatactgatagactgcatagcgagtgcaatcaaaggagaaaaaatagaacaaaaagagggaaaaattggtcagaatgcaactggtactctacaatgatgcagaattgaggatgaatgggtctagatgttactttcatcagtccatcgacaagcaggaaggctcttaaatagcttgggtctccaagcttactaggatggaatcgcgacctggaactccaataccgaatcgatcaaggaacgcccaggcggacgaatgacgccttctgccctggtaaaattcaatctgcatggttaaactcgtcgctgacagctggtaattgcatgacaacttgtcgatagatggctttcctagcttgaccaggatctgagtctttcactgcgagacccccacggaagctctccgtagcagaaaaggcacaggggtagatgatcgtcataaaacgcacagtacttcagcacgataattagacgacttttatccattttcatgaagaagaaccagcgatttttgcatgatgcattaactaaatttgttattgagcgaacaaaccttgtagttatccctagtaactccacaaaactcccaatgcctgtcatttagaagacattagaatagtctaaacggaaggctgaagccacaataacgccatttcatgtgttgcatccaagcccaatacccctgctcttcgtgcacctgggctgttgctaaatgcctgagcaggaacggcgtatgctccgagtgcaaggacgcctgccctttttcacatatagaggtagggctactcgaaaaagtggcccaccaagcacggaggggccgcgaaggcatttcttccgcatcacggacggcaagtattcatcattgtttagagtaaattggcgagggactgggagtgctagtggacgttcctggtacgggtttgacggcccgagttcctgaagagtttccccgcattataggcaaatattggatggaatgtggggaatggctacggaagcaccttataacacaagaaaacacaagaatgtggaagggacaagcactacttgaatttcatactcaaaacatcaaacgggcttatatttgttataggtaatctgatggccaatgctaataaattgtccatctcaagaagtggttggtttaattcatatggtatatggttcagtggatataaacaaaggaaaagactgtcaaaccgaatagaaagagggaacaatgaagattagagtgaggcctagtgggcagcagcctggtcacattccgcgatgaatctgcgcatgccgtcagacccttcgcatcccgacagcctttcgggaagtctgtcactcacggtatcggggaaggatgcgcggtcgcccagcaccctcactccaatgcttgaataaccagatgcagaccaggcccatggtttatgccaaacatggtcaa

SEQ ID NO: 4498 - DNA, 1909 bp, Emericella nidulans
cacacgtccaatggcaccgagcgtccactgacgtgccctccctggctcctgagaggctggcgcgggtacgccaaaagcggtttggggctgagcggatgcgcttccagaattctaaacgtggcttagctgtccgaggttaagcgccttcactaagtgtatccctgcagcgctctagacccgtaaccatgctgaagattaactggttatcagtggctatgttcatgagtgcttagcgaaagccaactctgtcccaagccacagactccaatcttggtttgaataagatagagcaggttacctatctgggtaaccgcttcgttaatggcgaaccgtggaatttgcgtgtcattgtacatctataatttcatcaccattctactttctgctacctagtagacgcgtcgtatacattatcacatgtttgaatctattatttctatctttactgtttctgggtgcactatctattatcttggttccattaagattctatctgttgatcatcaaacaattggcttcctgattatgctgtttaacatagcatttcaaatgttcgaacgtatgtgtattctggctgcattctttggcattttcccgaagcttttaaaggtgactttatactctctgctggccctcacttatcttgcttctgttgttagcgtattgtcattcttcagatccgaaataagtttaatttccagcatgaatatgacagcttctctacatatccatatcagcggtaatcatatatcgtagatcggaaagagggttcatgatctgaattgagataatgattggagaggtttcacaatccgtgaatggggtcaacagtcaccggaggccttctcctcggcagtgggaagtttctcgctccctgaccctgtcataactccacatttgggatggtacagtcttttagaatgaattacttataactacactctttgcttgatcacttgccatctggtttatgttcctatctagcatttaaagccatcggacaaaagtcgacccgccttttcatcaatcgcgtccttaaacctgaatctagtcatctgcagcgaaccgcgaggtcagcaagagctagggtcccgatcgtctcaatgaagcttttaaaattgatcacgttacaatacaacggcgcagagacctgcttacagagctcgagggcagactatccctgctagagcaagaatctcagggcgcccggcgctcaggacaaagaccagatagtgatgaatctcaggaaacaactctctcgtggtgcagctccatcaactctgaagactgccgaggcaacttcaaggcagaacaatcacttgtgacatgaatgcaacgatcataagcgacccaagtcgggttctgcggccttcagaaactgtacgacagaaggtctgagtaaaccctatttcatcacttccggtaggagtctctttcctattgaagagatcgtactaatgttcaggagattactaggggattcgttaatttaaatccccgcgatcacgacttctcacagatgaggatctaacacaccggagacaggaattgggtgattttctggaggtccgttgaaacgaacccatgaaaaatagtgtgatggtgcccaaaagccaattaagccagcttagagatcctgatgctgatatttcttttgtactagttactggacagtgatgaatgggcgtgtacattcataagccaccacaagacccatgacaactactgatggcactaaccatgctcctttatgtggcggatagccaggctcatttgtcccgtacttaccaagtctagaatcggggtcaggagaggtatattgccaagccgtcagacagagatgtcacagcatgaggcatgagcgagtagcgggtttcaagattcacaggagaatgtcaacaccctcagg

SEQ ID NO: 4499 - DNA, 3786 bp, Emericella nidulans
  unsure (1)..(3786): unsure at all n locations
aaagtaattgaggtctttctcttccattgtatgaaactgagggattcgggcggatatccgagctagataatgtttgacggcatcctcggatgaccaacccacatactgacggcagttagtgtcgattgaagcgaatgcaaatccacaggatacactaacatccggcgatgaaatcttaaccctgcggacgttttcctcaatgatccggtagtcatcgcaccatgactcaatgaacaacgtctaatatactggtaagcattgtgtcttagatctgagatactcgacggacctcgatatcatgtttcgcaaattcatttgctagggaccgccgtccagctgctgatgggttcacagcatcgtaaatagcaatctggccgttctcctcattcaggaactgatatatatcctcacgacatcgtttcacgattttctgcctgagcagaacagaagaggcagatgctagatgcgtgattagttagagaagtaaatggaacaaagaatatgacagttgcatgttgtacgtggaatcaagtatgaagagaagttcaagcattatcaagcctggattttcggcatgtagctgagtgcttcagacagataacgttgatgacatccccatacatccatatcacatattacgcacaactcgccttagctggtacgtaccgttgacaaaaaagtaatcatccggtatgtcctgcccgtgaggaatagtagcacgtcggtagtctcccaggtggaagatcctggttttgactcctagcctacaacgcggatcaggtgactgctaaaccttgaaagtcgtacaaaccaacctaccatcgaaggtaacgtgccatcgccacagacatgtgactagctagccgtcagtttcgaagaaatgcacatttcgaacttacgtggttcaacgcacgtcttgcccctcgcagggaggcctacggtgatgatgacaatccgtccagagtggaagagtctacctgactcagtgctgtacaactgagccggcgcaaggtctgccttctctggtaaatcatggatggcatcgacaaatgttgacgactttcgccggaaccgtggggagttgacgacaatatccgccgtcctagttgaagttagttcgcgcagcttcagagtttatttgtgaacgcaagaaacgagcatcataaattgtgatatatccatgtgagtacagaagcagtgcttacaatagagtatccatggtgttggagagtgcccgacaccagagctatacaaaacgctgtaaagatcgtggaaagtattgatgacaataattcctgcaaaatgcgatacggatagtacaatcgaggaatctaatatgagagatcaagaaaaaagtcctatttgaggccgcgaaacgtgggaaaagaaaagaacagcacgttgggccaaccgaggcttgaaagtgctgataacccagctcgtagacagcgtaggtataggtactcttcctgccgataggctctaacgaagaaggactggcggggaaaggcggctcccgattaagtcacagatcagacagccacagccctttgaggatcaacagaacaaacaagagaactgaacgccgtagaaaaggtagcaggtaaataagacgaatcatagatacgctatcccactgcattatatcattttcggccaaatagaaagtcccgtcccgacatagcctgaggcggcggcggccgcgcagagcgacccaagacgcaaccccaagcagagccagccaaatgactttttttcaaggctgaactgcgatcctgaagctgtttcctggagccaccaacatcatcaatcatcgcttcgctgctgtggtgtctcttttttacgccatttcaccttccgcaaatattcggcgagatctgttctgtatcttcaggtcgttaagcctagctgctacctctcaagcttaattccggagctgatctgaaattctttcattccctgcctaccaccgacaccggccgcgttccaacgaccaccgaacaatcagctccggctcttttgacttaatatcgcttccaccatctcgtctcacataaatcagctacaatggcagaccatttagcacttccttcttttctaacggacaactccgtcgtctccgccctcctggatacctacacttctttctccgagcgtagggcagcccttggcctgcccaatcccggaacagtggaaaatgttggcagggaggtgcagaaggatgtcctgctgtccaacttcatgttttcaggtctccgtgcggacctgacgaagatgttcagtatggctcccctgttccgcgtgtcgcatgccttctccatgggcggctcaggaaacatggctccgtacgcgttctccgctatgtacggaacctccagtgtaagcaataataaatccgcgttgcgctagcttcaaagaattctgagtaatgaaattcgtggacaggtcttcatgcagggtaacttcggcagcgatggtggccttgctgccctttacaactatcggtggactccgaagttggtcaccaagaccaatgtccaaatcatgcccggggccgagcagggtcttatccagcttgataatgactacactggcgatgacttctccctttccctcaaggctttcaacccttcgtacttggacggtggcctcaccggtatctttgttggaagctatctccagtccgttactcccaagttggctctcggatttgaagccatctggcaacgacaaggcttgaacactcgcccggaatctgctgtttcctactctgcccggtacaagagcgatgactggattgccagtgcccagctacaggctcagggcgttttcactgcctcttactggaaaaagatttctgagcgtgttgaggctggtgttgacatgaacctccagtttgcccctaacgcggctgcgatgatgatgggcggacctagcaaggacggcaccacagccatcggcgccaagtacgacttccgggcctcgacatttagggcgcaggtcgacagtgccggtaaggtcagctgtcttcttgagaaacggatagctatgcccattgcgctcacattcgctggtgaaattgaccaggccaaggtacgttgcatttctttatccattctctcttgggaaggccaatgctggcctcatcctcaccttttgcttcgtgaacagccactaacttaacatcaactatagcaatccgctaaggtcggtctcgctgtctcccttgagatcgctggcgaggaagtcatggagcagacagagaaggctgacccctcgacaatggtcacccctcccttctgattgaatcacccgttccaccaatctcgccgggagtaatcaggcccatctgagtcctaggtggaaggaacctttgctcttctgatctaccatggagctcctccctcttcgtccttttgttttagtagctattcctccgtccatgtgcatctttggaaaatggtgtaatccctgttcatgcagtttaataacgggttgttggtcagtgaaggcagtcgcttggcgccacggtaccaattttgtatagatccctcttctttctcctgattttctcgtttcgtgttattgtttatggcttcatctatgaccggcgacccgtttacttgttattcttattatcccttttgatgacactcttggttggtcaatggggtcttacccgggacgcatgggagcacttgcagaaaacttttctctttagttacgcatcatagatggaaaatgtaaaacacgtttattatcaaggcacggcggttcnnnaatgtg

SEQ ID NO: 4500 - DNA, 1966 bp, Emericella nidulans
gtaggccgctctcaacgcagctttaagcgtgtcgacatcgcatcaattgaattaggaacgggcagtattgtaaaagccgcaaggtcctcttcaatggtaggccttggtagaataagctcaggggcctgtttttcagccgaggttaaaagagttgggggactgtcatcttttttctcgccttcggatacaggttgcttctcctttacggctggaatgcttggggtgcccggatgcgatggcgcgagtcctgctttacgcctatctgcggtagtgggcaatgcgcctagcgggcgcatagttcctaggacagggttatgggcattggacacattcgaccagggcgtgtcaagatagctaggaacaggagcccttggctctggctcgatccaatccgcaaagtgtccattcaactcagtaccgctaactccatttgttgcggactcttggggttgaactgattgcgactggctcgaaactggtgtatctcgcagtgaatcggttccaacccgggaggatcgcccagttcgccgttgcttgcggggtctagtggattctgtaaaaggagaagccatgttcgctgtgtgtggtacaggtgtcgagggccgggaatcatttgaccttgcgtgcgatgatgaacggagattccgagccattgcgacgaaggcagggcacaagagtcgtgaggcctgcgccgcgtacagttagctcctgtaatgacctcggaaagaatattttaactttggcaaacaaattgatactcactgatcagcacactcttgtaacgtcagcaaccgtgccggcgtggctggttggaatcgtggccagcccgcgcggttgaaggaagagagattgcggaggttgcgaaacggagacgggagtgctcgagggaaaagccccaatcacgcttcccaggggttcgccgcggaaattgccacaaacacggagatttcttacctgaatggggtgaatttaatatcagaatactatattgcgaaataaatcatgcgttttgaatgaataaagcaatgactatacctggattggggatcttacgcgatgctcacgtacctcgtctcctggagaccagcccaagtgacaagggaatgagcaaaaaggccggcttgatggcgggcaatatccaagtagatagtgcaaatacggcaatagcaaggctacgagtcctgtgacttgagcctccaaggtgtttggtaaagttgggctcactcttgtgtccaagtcagcatggtgttcagctcagtgaccgctcattgctgaaatctctaacgagaatgatctgatgcttcaaacacaagcacgacagacaaagcagacttgccagagagaagtagacagtgacggatctcgacgatgtattggtaggctcgtccgaccatgggccagggatatgtgacaagtccagagtacaatagagacgcacctttcgcaggcgcagaagagttctttactcggaatagatgataaattcaaagacttacttctcgcagtgagggaaatcttggtggataatggcaaggcagcctggctttctttgttggaaagcagacgaagcggccgggcctttgacgcggtgcaccgaaatcaccaaaaatatactgagagcgccacttagccctaatatcttcttgagagtcagccggcagtctttttccaagaaagctgacacggtaaatgggagcaggagatggaagtttccaaggcccaagacgcagagagagatgcctggagacacagatggatgaaacgaggtacgtgaggtgagggggaaagtaacagcagatatatagagagcaaaacaggaaaaggagtgttaccgtagtcaagaacaacagcgtgttgttgatgaggctgttcaatgaatgcgaatgcgactgtcttgcgtggcgctgtcaccaggcagaagaagggatctcccaaaccgacgtaggtagatttcggtcacgctatc

SEQ ID NO: 4501 - DNA, 7106 bp, Emericella nidulans
  unsure (1)..(7106): unsure at all n locations
aaaccgccagtcagctagatgtataaatgttttacggtaatgagtaagggtatgtacgcacagcatggggatcgaatggccacttgagcgttgagtatgtgtttactgaagttgcgttagcatgcggccaccaaagatagtgtcagggggtacggaccacataatggcgaggaagagggggaaaggagaactctatctaggaaaagagcaaagaccgcggttggaggggaaaagactgtaccacgattaccgtctgggttgagatagactatagactcagtcagacaggacaccaaagaaatgcggttcttcaggcggaaactaaaactaaaaataattcaattcacgcgactcgagtgaacaacatcagtaggcagtcgccggtatcagctggtccagctaaatggtgtgctcctttctttgcaacctcaaaattgagcaaatagctctgttgtccttaacaaagcctctacccgactccttttttttctcctcctgttcgcgagttagttcgagcgcatcccccactccaggtccgcttcctgccacttctttcatccccctccgaactaactacgtacacaccttctaagccccgtttcatattcacctccgacacgctattcttcgacttcgtctgccgctctttcttttcatatacaaccttgcagcgtcacctctgaattcctgtttttctgttctctttgcgccaactccttacatttagctcggcaaacggaccgttggcggcttgcctagtcatcctctccaattcctccgcatctctgttcggcactatttctcattgaacctggtgaacttaggattgggtgctgtaatgattctgatcgaaagcctatgatccagctttccaaccgatccttgctccagatttgtcgtcatggagggaaacgacaagggcaaagaagctacggatagcgcccccattgtacgtcatccgctatagtatacgagattgaaggactaaccgagaccgctgtccagagaccagtatcgtcacttctttcccactttgaaaatctttcgcatcgccgttcaccgtcggcggttcccaacggttcccacgattcttaccttctcaaggctccgcagctagccgacgatccccgttcatccacacgagcctctctcgatctaccacgtccatctccttggggctctgggacagacacgccgaatggcagccgaactgattacgggaatggtactccccggcggaatggtggatctccggggatatcacctggaaggcggcagagcaggcccatgtcaatggtcttccactcgtcgccgcagctgccacctactctgacagtagactccccgcgttctccgccgcgtgggtttagtaccgaccgtgctcggggagatgatgcccgtcccggccgtagtccgccgagtgtttcgcgagaatccctgcaccttgcgtccggcaaaccgtcgtccagtcggccaacaacccccactaattcgacatcagcggcgacagagcggccatccgggctctccccccaattgtcctcctcagtaggatctactggtggtagccctaccttgccccctctcaatcgagcaacgaaacccaagatccccgccaaaccggcggccctatcctttcacgagtcgaactcctctcttgcaccacagggctcgtcgtcgcaagaatatgtgtctccatttagcacgccgccgggcagccccgaaaagacaccgccaagtcgacctacggtcaccaaaccagtccaaccacaacgacgtcccccgagccggcaatctccgcctctatctgcagtggagattcctacgcggaggtcaatggaaaggtcacctggccgcctggcatcttcgcaaggatccagggcgacatcagcgtcgcgccgctccccggcccctgaacctccgcgacaatcgaagccgttgacggtacagattcctcccagagggccttctgtccaaccatcgtctttggcaagtgctccgctatctgcccggcttaatcagaggagcgacagcccccatgcccgaccaggcctcccaccccgccatccatccacggcccgaagaagcggccgatctccttcaagacaaacaccgacttccgaaaatcctgcatttcctcgacccccgcctagagccgattcgattcccacacctaaaattcaacgtcagccgtcattttctagggaaactaagctagggccaccacaacccgtaaataaccctatatcaagcgaagaagaactggttgcggatgagccaccaacacgtaccgattatccagacgcatcgaacactaaccggcgaccgccgcttctgaagtctgggccgagagaaatcaatacgcgatatgacactcggcttatggatgtgtgtgggaagcacgtctgcacaaccggttacatcacacgcgtctgggatctcacgactggtgagcagatcatgagcttaagtcatggtgaaacggtcaagagtctgtcgctggcctttaagcccggggccggacttgaggatgaaggccggcgtgtttgggtaggcacaaacacaggggagcttcacgagatcgatgtcttcagtgggtcagtagtggcctctcggtcatatccatcgcgtcgggaggtgatcaaaattctacggcataagaaggaaatgtggacgcttgacgatgaaggcagattactagtgtggcctccggatgagtcgggcgtgccgaatctacaatatagttatcataatccttacgacagggttgcaagggggcataccttttccatggttgtcggagacactctatggctcgctacagggaaggaagtgcatttgtatcgaccgaatgcgcctgatgacgtttcatttaaaatcctcagaaagcctttgggttcgcaccacacgggagaagttacctccggtgcctacaccacacgagatggtggccgggtgtatctcggtcacgcggatggcaaagtcaccgtctactcagcgagcaattatgcctgtctcaatgtggtgaatgtcagtgtatacaaaattaattgcctgggtattgtgggtgacaacctctgggctgcctataagaccggcatgatttacgtgtatgatacaagtaccgacccctggacggtgatgaaggactggcgcgcgcacgacagcccagtttgcgggttcttgctcgattcaagcagtgtttggaccatgaatcgactgcaagtgacgtcccttgggacagacaactgcattcgtctttgggatggaatgctcgaagacgattggctaggtttgtgttgtcgaccccggcgtggttaactggctaacaatgaagtagaaattcaaatgcaaaagagagatgtggaattctgcacatttcgcgagatcagtgcagtgatcctgacctggaatgccggtgcctctacccctggtagtgtgcgcacatcgacgttcattcaagatgctattcacccagaaagcccgccggagattctcgtgttcggtttccaggaactggtcgacctcgaaaataagaagataacagccagtacgtattggatgtcgcacttttgaacctccgctgctaacttgttgcagagagcttgcttctaggaagcaagaaaaaggaaagtggcgagaaagagcatatgagtcgtcagtaccgcgtgtggatggagcacttgacacgttgtatcaatgactgcatgccactcgaggagtcgtacgtgctcttgcatagtgcgaatttgattggtctttttacgtgtatattcgtcaagcacaaggaacgggcaaagatcaaggacgtcagtgccgctgagataaagcggggcatgggaggattgcatggcaacaaggtaggtttctaaacgctcatcgtacggggtgaggctaataatgtagggtgctctggtttttcgctttgtccttgatgacagctccctctgcttcgttaattgccatctagccgcagggcagacgcaaaccacgcaccgcaacaacgatatcgccgctattcttgagactgggtcgctgcctgtggagacaagcctgacttctcggctggatcactttgttagtggtggagatgggtcgatgataatggaccatgaaatatgtatactgaatggagacctcaactaccgcattgactcggtgccgcgacacgtgatcatcgaggatattcgaaacaataatctcgcanaacttctcgaacgagaccaacttctcgcatcgagacgtaagaatcctggatttccgctgagagcgtnccaagaggccccgatcacgtttgcttcgacatacaagtatgatgtgggcaccgatgaatacgactccagcgacaaaaagcgatcccctggctgggtgtgaccgggtcctgtataggggcctaggtcggattaagcagcttgagtaccggcgccatgaggtccgggcgtcagatcaccggccggtgagcgcaacgtttaaattccgcatcaagacagtgctccctgagaagcgagaggttctgtgggaagcctgtcagaaagaattccaggccgaaaagcgaaggctcgcgtcagaggctaggtgagcaccaagctggtatttgtctcggaatttcgcatactgacataatacagcattgagtacctcatcagcgtactcggaactaaccctaaacaggcgcgagcccttatcctgggcaactgaagctcagtaatctctcttgagctttctatactttgtttaattttctgtaagtagaggttggaattgcattggtgcctatttggaggcacaagaactgcatagtatctcggtcatcgtgatgcgctcgcaaggatggcctgtacgacttatgactcacgatagacatgtatcacgatagagctgccgatgaggcgaggcaggagttacaatcaaataatggtgtatactagtattaggtatacataaatacgagcgttgaattaaattgtgctggaaggagcttgatggtggcctccttcctgtctcggatgccatactcatatgtcgccgacatccggtctctcaacttgccacaacgtgaacccattcttctcttatttgtcgttcatttatagaatcccgtctctcaacccgtcaactttagtttattgtcatcagggtcacagactctacactcgcaatccataacgcactagccaccatgtcatcggttcaggaatccgtcgacgaacaacaacaaagtcaagcgcgtagaatagcagaacagagagcacacgaggatatttacgccgtgacgagtggctccataaccattcggcggaaagagctagtgcaccatatcgaaaagtgagcttgctgtgtaccagtacctaaggatccaaaggcatatccagctgatcaaacacctcctagtacacttataagagacagtgcgagtgccttcctctctgacatgatcatcgaatgccagaacatagaatttccctgccacaaagcaattgtctgcgcccagtcgccgaccatcagggcttgtgtccaaaaagctccggtgagagccgtatgtaaattcctcacttcatcctcctgggatcttgtagtgtcgaaacctaagcattctctagcgccgctgtagagtcaagataaaatgtcatccgcttgtctttcggatggcaatcgagttcctctatacgtgcaactatgagttctttatggattttggatttccaagccgattcatggcaaaggggcagacggtatctgctgatcctattggtatgctttgcgctctcttggaaaataggcagatactaactgcctacattagaccgtctggattgttgcgagttgtctcttcacctccaagtacatgttctggcacagcgtcttcggatacgagcactcaagttctacgccgtcaacagaatcgttagtgttctacagagaacatcttttccaacagtttatccgcgcttcgcgcgcgaagtgtactggaccattaaggagaaggatacacttgtgaagagagttgttaccgctcatgcagacaggatcacgcgtcagttgagggaccggaatcacttcgatgcgcgatttccgctgtatttgcttcgagagattgaggagtttggagtcgactttctggcgtggatgccagactgggatgatcctctgaatggtgattgcagtagtggtaccttagccccgacccattggtattgttgacttgatgttgcctgctagggtgtatgcttagtctctaattcttattttaggtcagacatggctcagtttgggctcgaaatcagtgtatctttcgtcacattatgtgtaacattagctggtagactaaggttggcatccttcattatcacgtggtattcatgtgtcaaacagtatgagaacaagtgcatgcaatatcacaatcttaggaacataaagaagacggagaaaacaggctaccgccacagatcccctcgactgtccctcttgaacccaccactactcttcggcctgccatcatcaaccggcacagccaaaaaccccccaaacccattcccaacaagcacactcttcctcgcatcaccgccccaacttcgactaagtgatgccccatgaaaactcaccggccgcgtcacgctatctcttcttccacctgtcgacggaccaagcggctcgtacggcgtgaagttccattccagctcatcaagacccttactatacacgttcaagggcctcacaagaccaccacccatgaactgcggccccgactcgcctcctccgtacaggcgtgggggcggggctaatagcagcgcctcgggaaaatccgcgtcacggacgtaaaggtctgttagggcggggagggaattggacattagcgtggagatgagataggtgtaatagcttgctgccttggggggcacgccgtaagagcccggcggggatgtgatttcgtagtgcaggaggcggagtgtacttgaggccagggggggtactttttcagcgggaaacgagcgggtgacctcttgcgtgatttcaagaccttgcaggtttggtgtgtgctgtaagagagtgtggagggttgcgggggcgacaccagttaggagagagttagaaggtaaggttttgcg

SEQ ID NO: 4502 - DNA, 1196 bp, Emericella nidulans
accctggagatgttcagagtcagcacctttcctaggactctcgaaaatgcggatgacagctaagtaattggcaattatgtcagtattactagtgacggtgagtacaccgaacacgaaggggctacgcctgatgacagcgtactatatcaggttagactggccgcatcctgtgttggtttttcttcgctgatgattatctagaatcattcccaagcaccaggaaagactcggagattatcaaatcctggttcagacgttcagcatggagcagctgctcactctacgctatcttcagcaacgatacctggctctacatctacaacttccgagccaccgtctagcctctcgtttacacctcttaacttcattcccattgcccaagagacaattaaaaaggatagccggtccacgttgtcacaagcccccgcaccgtgtcaaaagcaaaccccgggccttctggactcaaatgagagtaaccaagtggagtgctccatgaacaggttcagggaaaatccaaattcccagccgacgggcccgatccggtatgccgacccaccttggcccaccacagactacagggcccaccactgtcggacaggcacaattaccgcaccgcctacacttctcacaagaggaagagcaactggtagcgcaagctggtcatccgcccacagcactcagaacttgttctgagagtccaaggctagagaaagcttccgaagaactggtcagccatgttaggacttttgccgaggacgttgaacatcggatcaacgacctgatctctagttggagcctcaaacagaaagaactttctattcttcgagattctcataagaaagttatcctggagcgtgatgagctgaggggaaagcttaacgttgagataagagagaatgaaggatttaaaaaggagattgaagacctaaaggcagagctgaagctaatgaaagaggaaatgcggagggttgaggaggacaagaaaaaaattaccggtgtttacaggaccctcgaggagctgataagatatgcgaaggattagattttaattagtggctgtcatttgagattgacggctatagagttagtcctgatttatgtgggatattgtaatgcaaaaccccgcggttgttgtaggtagactatagaatagcataatatcataagagggctgtaactgtctactctactctgat

SEQ ID NO: 4503 - DNA, 1293 bp, Emericella nidulans
gaactgggcgaaataaacattacaacacttccatactatcggcattgctaataatagccccgtcagccgcaaatcgactggactccgaccggggatctagtattccgagtacgagtacgagtccagagtactcatcgccgaatgccgccccggtcaaattggccgatctgacgcttgtcacttggcagcctgatagcagtctttattgatcacaataaagctgacctggtgcaacaaaaatctgtcttgcacttgattccaattttgcagactgctctccttattatctcaggccgagtctgcattttcctgtcttttttttttttgttgttttccaccttctcttggtggttccatcgcctcagaatgcccgtatatactcctcaatcaggctcactgccggagtactccaagatgaagctcctttactttagcaacgaactcccgaaggatgatctccaaggcctcttccgccgtctgtacaaccacagcaaagatagacgatatcccctcctcgctaggtttatccatgaagctacactcgctgtccgtgaagaagtgcggcagttaccgacggctgtaaaggctcttgttcctgcctttgaaacagtcttgaaccttgccgactaccccgaacttcggaagggtcctctgggcggatcctaggagggtgttcttctgtgcgtgctagagatagcgactctgatagggcatgtaccacgactgtacttaaaagaggctgatgactgatggagttactatgagaatgcttcctaacgatttgacctacatgccgtgtccacgtacctggctggtctgggtcttgggcttttgtcaaccgctgctgcggctttatgctctgcattggccgacgtaccgagtattggtgccgaggtagtgcgagtgactttccgtctcggcacgatagcggatgagatctagcagaacctcgagcctcgcgatacgtgctgctccacaaacacctgagcttatgctggtgccggcgctcagggtgaagaagtccaagctggggtggacgctatccacgcaggaaaggtagctgccataccgtggtaacgcggtaaagcttacccacgtcttgatagaaaacaacccacctaacaggtttttatccacggccgggacgaggggcggccccaataggggccccgttcgggtaggggggttggccctttggaatttttaccaaaaagggggggggccttttgtaaaagggtttgccaaaaaaaaatgtttaaaaaaaaaaaaggccgggaaattaacccggaaata

SEQ ID NO: 4504 - DNA, 1616 bp, Emericella nidulans
gaaacaagcagtgttagggttcatgttggattcagaaaaaatgggcttgggtcttatccccaaaggaccaggagacgtagaggatgcgatggtggggaggaataggaaggagaaggagaaagaattacaagatgagtgctattcaaatgctatctctatgccgagacagtgctgagttgttactctttttaagaatagttgtgaatttgaaacaatcaatcaaagggaatgctggaacacttgtgtccctgtatttgtgaataggaatactaagaaacaagaagtcataatctattccttgtagctttgcacacagacaaatggacctgaaatggctaaacgggggtaaagagttaagaaatgggaatacgcacgttgggggtccgccgctgataactgagtcatggtatacctacagtagagccgaaaccagctgtctgtcttgttgacagcttgctggagctggcctggagaaactgggccatgaagtggggtgccgcacacaatctctagtgtgataatgaccatgttttgtgggtgcctcacagggtgcaccagcaatcctgaatgatacttccagtatttatgttttgaatcatcgtcagcagggtttattgtaggcttgccgtagacaagcgcatgctagcttagttgagcagccgccgagttcaattcaccagcaatgcaggccgcgatggcgtgtagccacagatagctaaggacgagatcagtaatatagagaaagacatctaacaggtgtatgacaggtaggaatatcacacggaataacaagtcgaacacatggcgactctgggccgtccaattcatacggggatatccaaggtgcagggactcgagcttgttattgtttatgatatgtatttgaagaagtatcaagcttgaccatatacagagacaattcttcggccagcgaaaccgcgcaggccatcctagatagtctacacatctaatggtgtaggaaactgagaaatgggacgttggtggcttgtgggcatcagctttcgggatggcctaatcgaactgcaccgctattagggaagttgtcctcaacgctgcgcaacagaacttaccggtgtcaggaaggactcagcgacaaatcgagcgcgagcattcagcttgggagtgtcagcatggacttcagccagaggggcaagatttaaaaataacatacgaaaagcttcatttcagagatttctttatccacctcctccatgaactggagaatgaagtcgaccaatttgtgcttaagcatggcttctgtgtggaagttcgtaatgaggaaagatatgtcgtagccctgctcatttgtcagccgctatgcggtgtggctggacgagttcatgtccttatgtcttcgtaccttcacaggctttcttcgcaagataaagaaagattccgcgcgttgggtcaagaaacgttcaaacttgtggacaaggacttgattcatgttagcgtatagcccgtaactctgttaaggccacattgcaacggtatcaagcttactatgctcaatttcatctgcctgttttatccgaatgctcacacgcacgctgttcacactaaggtcggataagaccttcttgttcccgtttcga

SEQ ID NO: 4505 - DNA, 4569 bp, Emericella nidulans
caacaacaatctcagagatgataccaatgccggtgtgtggaaggggaacagaactgtgtcctcctctagcatggagctcaaaatgcagattaatatgacccttttcggtgatcgcagggtggacgtatatagttttatcatcaagaggctgggatccaaacccgccctcatcaagaataacagcaacgctatcgtttccatatctggcctgcaacacgtcgctaatctgcttagcacctctgttggtgccgacttcctcgtcgaatccgaatgccagaagaagagtccgtctgggcttccagtccgactcggaaaggagaccctctacggcagacagaataccagtcaaactattcttgtcgtcggaggcaccgcggccccagatatactcgccgtcaaagtgtgcttcgaacggggggtatgtccaggtggatgcatcagcaacagggacaacatcctggtgtgcagtgagaagtgtcggctttagagagggatcagagccctcaagggtatatagtagcccgaagtattgattttctctattttcgcccgttcatggctgcgaacaattagacgtgttggatgtatctcgcatgcgcaagatcaacttacagcacaggatatgtcttttctattgtgggatacagcttgtaaaaaggctcccaccgttcatctacacctatttcgcccaggtcatcgtaggagactgaggggacctgcacgatgccttggtggcgcttcacctgcctttccagggcctcgtccgacgagaataggctggcggctgacggcaatccatcaccggcagggtccaaagggaatggaagatcgcacgtaaagtcggaattggaggctccaattggtattgaggtttggctaaagaaggggagcacgaaggctaaagcactagcaatgtttgccacgaccaggaaccgtgctggtaccatattgtgagcctttaaagctcagtcgagcagtaaggttacttcgaattggtaaaggtgaggaagaatagagaaagaatagacggcaagtaaaggggcaaatttcgaagagggggaagttggagaattggagaagatagcgtggatagatagtaccgacttatacgttactgatccgctgagtatattactaaggattcaatcaagcacaataatccatttaatggaaggattcaacagtattggattattgaggtgtaacaatgtaccagctagtgttagggcatcctgctctgcggagaggcctgctagcagctcatattcgcagacatggcgccattatacgtgattgggtcgtctactacttgttctaactatcaatgaacaccctgacttttggattcacgcttaatcaggttctggaatgagattttatgaccaagtattagtattggaacaatcatatcagataaagccgcagattcatcctcacagctgatggacgagaggtaagggccacgatacaaaggcatgggaacgacttcctgcacggaaatactccagttctccaattcttcaataatccaatcgtatgcagttgggacgatcagaccagcctctgcatccagaggcgccaaagccgttaggcagccttggctgcaagcctacgtgactcgcctttgtggaaagaggtaggggaggtatcccgcaagcacatagttcggcagcacaagtgatctatcactctcatgctatagtggtgttggtcacaggaaatcaagcagatcggcccaagcagcaacagttcagccacgatatgcctctccgtcaagggaaattggcctgttaacgggtaaggacaccaatgctatgtaaagctatgctagaagaacgaacagtcaaagtaatgcaacaccagaccctggagatttcctagactggggggtctaccatagtcctaaatacacctatgagatacacggatgtaacccagcaacaagaacatgatagagtctagttgagaacggcgggctaagcccagtaatctcgctattatagcataacccgaagaagactgcctaagtctcaatcgctcatctgaagcccctcgatcgtttgcttgacccctgcaatttctgttattagggcctggcgggatctctaacaatggaggatgtgccgagccctaacttcattgatcctttccgccccatctaacacccaattcaatccagccatggtatatcacactaaggcgtgccatgaagacccaagctagataaatatattcggagttaatccctggtttctctatggttcgatctgtcaacatccctgtcggtgcgtaaccctctagactcttcctggagaacggagataacggcatgcgctgccatcatcggcaatgacttggagatcctgtccagcccagtaaaacgagtttactaaagcccatgtgaggggttcttatctattgcatggataagcgtactgaggtgtcacccgagtgatctatggcataattctccaacctaggcgcgcagcctcggttggagtccgaactcaggtggaataagagcacaatatctgcttcaattattggtatatactaaaagggttttcctggtcatttccgccgatatggctcaattcactgttccccgtggtgcagaggctcaacagaatgataaagacatatgtagttcagcgtttaaggcctgctcaaaactaacgaaaccagcacaactgcacggagcagaggagctatccgctgagaaggtccaatctccagagaccgaagcttagtcgacggccgtcctctagaagccaaaaccagtaccgaggccgattccgctgacgagtcgcaatattactttgactctgccgagttcaagaacatccccgatctggtccggacagtcgttgggttcgaagatgacccttctctaccagtattgaccttccgatcaattcttctctcagcgatatcctgcacgctagggagcattgtttcgcagctgacctagtacgtctttgttttcttgaacaggatactacatactaccaaccactgctagtttccgaacaacgaccgtgccattcccggttttcttcgtgattcaggcgtctgatccacttgatcggttccttgctcggatccttccggcgtataaggtgccgctggggagagtttcgttctcgctgaatccggggccgtggtcaccgaaggaacatgcgattgttggtattgctgctaatgctggaagccgaggacaatgggctagtgagtgatatacccagtctttgcacgaacatgtctgatatcgaaagcgtttttgcccacgaatgcggctctgtactataacataaccctgaacccggcggttaccttgttcttcggatgggtaggcttatacttccctagaaccgtagattatgcttatcagacaagggctcatctttactcgggtttgcattcgccgcaatgggtacgtcctggactcgtttgtgtgcggatctgctgctgacaggcctacccagtccgggcaaccctgatagacgatcccgaatttatcttccctctgtccctgcaacaagtgactctctatcgcagcatggataccaggaatcgcacgggcaagaagagggcgcttgatcagatgaaggtacgcctgtagtcgcttgagtcctggatgcgggcaactaagaagtaaacttggtttgtaggtgttctggatcctgctcctggcgacatttgtctggcagtttctaccagagtacctcttcccgtttgttgcttctctggcgccgctatgctggatcgccagtcgcaaccatatggtcaacttcattggagccggccgaggcggtatggggctgctgaacataaccctaaactggtcgaatattgcttccgtcgtcatcacgtacctgtacagcgtgcaagcgatcatctgcctcgcgtttgttttgacggtgggtcagtccccagcagcccgcttgagctgtgggctctgatgttctagtgctggatcctgatccccatcgcggactctgggaagctttggggatcgccggcttacgatatcatgtcgaacggcgtgtttcagaagaacgggtctgcgtacccgttcaatgacttgagtaaattagttcggtctctaactattgaggctgagggtatatgctgatgactgtagtctatcttgactcgaacggcatgcagtacgtcaacgagacaaagtacgaagaagtcggccttgcctactcaggagcccagtatacatggcagatgttcatggcaagtcctctctaagaccactcacctggttcttttccttacgtacgcagtggggtggcctcatacatgtcctcatatgtccggtgcgctctattcctgggcccgaaaatgtacagaatatggaaagccaggaagcaatcgggggcgtatcatcaggatagactgaggtatgcacgcagcatccagtccatacatcgccatctgttaatcaaacggttctcatagtcaaatcatccaaaagtaccctggtatcacgaaattgtgagagtcacagtcatatcccttcactataccagtaccaccaaactaacagacaatagggag

SEQ ID NO: 4506 - DNA, 4556 bp, Emericella nidulans
  unsure (1)..(4556): unsure at all n locations
aaacatcatctaccaagcactcgagaacgccgctttcctcacgacgaaaggtgtcatacctgagcagttcctcaagcgctggggtggggccgcaaaggtggaactctggagcacgagggcttggcttggtcatattgtacttcagtactttgtgctttggagggcaagggaattgcggaagaaggcggagattgaggggtcgtcggaggagaagcagaaggagctgaaggcggaggtaagagcttggaagaagagcttggtgaacaatgtttgctggacaccgttgtgcctgcattggagttttgagaatggaattgggttcccagggtctttggtaggcgttgggagtttcatggccggggcttggggtttcgcagatttgtgggcctctactgcgtagaggctggctgctgggagcttggagattgtatatatgggagataagagttaacttcaaattatgtgttctagatagacctaaatgagtatggctgatttggtgattcctagtcaatcatccttaattcaaggatatggcttgacgatattggggctcagtagcgtaagaaataggcgaaaagaatattaggtttccgagaataaaccaaggtgtatataacaaatatccgttctaacaagcaatgaatatccgcaagcgatataatctagttatagctgaaaggcactttgttttgttctctaaccatgttcgcgtagagctgaccagatagaaaatcgtctatgggccagaaagatgtttccataggttgcagttccgtattctcagaagtccagctccaaacgaaagttcccgcatctacggatttttggcttttaacctcgtagccgtggattttgtcaatcagagagacctggacctgggtgtctatgaatatgctatgcccaggccgtacgcattcaacctcttggacgtcactgcgttgttcccttgtcagcccgaaaacgagcattccctcgaccacgtctgacgaagacgatgatggcttaattgttggtaatccaggcttgccgttctctgcgaaatggtgaagcgtgtatcccgggagcgttgcgtagaccatgtccactgtggtggtctgaggaatgtcaacgatgtacttgagggctgttgggagcatcaagtggccatagacgaagacaggcgggtagctagattttgcacagagttcttgtaattctccttctttcaacggtgatctcttgattgcagtttggaagtcttctggataactgtccttgcaacgcatattcgctgccacagaagggtttgagcgggcagcaaaccgacagcggagatgactttctgaactcttgcagctttcagcaagagtgaaacagaggcccaacattgccgtctgaagatcgaaaaaacgaggaaaaagcagaacttttgataacaacccaagaaaaaccgttttgatctgctagacatgactgtttggagggccacctgggtcgcctatggcagggattaatcgtggcaaactgggaaacacaaagataaagttaattgattaacaacaaactatattcttgaccgatccataaagaacctgggaagcaaaatcgctgtcccacgagctcagcagctgttgcccgcattgctgagtccgttgcatagcttctgggtaaaggcgcccggcgaggtagtgccatataccgctcttcagttcacttgctcgttgcgcatatgtctgggtgaagttataataatggctccggtatatggatgaaaagttggatcatgatgaactggagtgtcaaaggtcctcaggcattgactaactagccaagagaccctggttgaatcggccgtccattctccaagctgacgcaaaccccggtagcctaaactagcgagtgaaaagcaatctctgcagagaagatgcgatggcaacaaaagatgacagactgaagattatgactgagtgaagttgctacgaccaggttccatttgcttcttccaggcggtggcggttgatacaagtcgccggcttaagtcatcaacggaacaccttggcagtcgagttaatcgtcacctcttcataactggaactgctctgtccacttccgatttcacctccaactcactctctatctgtccttttcccaactccatctatctccgcactttgctacgttccttgggcattctcgctgtcctttgaacttctcccgttttcgtttacgtccgattttcgcatttcctttgtgttgttggggcggttccaggtccggcacactcaacctttgcgtaaactctcgtcgagtctacgttgcgtaatcgatttgattgcctttccatcgctcagcgctttccgtcgagatgagctcagaagaacataagaagaagcttctgtatggcgttcacttccttcagttcctgtccaggcgttttgactaacatccgcctccgttagtgatgcttctggtgccgagaagaaagaggtaactcaaatcctcaagaagtatcgctggctcagttactgacttcttgcaggaactcgatacctctacggcgattctgaagaagaagaagaagcccaactccctaatgtgagtagccgctccattctatgtgctagtgtgaaccagcttggacattgctaactcctgtttctcagtgttactgatgccgtgaacgatgataactctacaatctccctctccaacaacaccatggacacccttgggctcttcagaggcgacacagtcacagtccgaggcaaaaagcgcaaggagactgttttgattgtgcttgccgatgatgatctcgatgatggaagcgcccgcatcaacagggtcgtcaggcataacttgcgcgtaaagcacggtgatatcatcacagttcacccttgccctgatattaaatatgtgagtttcctcgaaaataagggacgtgaatagcggctaactgctcttccccgtccacaggctaagcgtatcgccgttctccccattgccgacaccgtcgagggcctcacaggttctctttttgatgtctaccttgctccttacttccgagatgggtaccgacccgtgaagcaaggcgatctcttcacagtaagaggtggcatgcgacaagttgagttcaaggttgtcgaggtggatcccccagagttcggtatcgttgctccggacactatcattcacagtgagggggagcccatccagcgtgaggatgaggagaacaacttaaacgaagttggctacgatgacatcggtggatgccgaaaacagatggctcagatccgtgaattggtcgagctgccgcttcgtcaccctcaactcttcaagtccatcggtatcaagcctcctcgtggtatccttatgtacggtcctcccggtactggtaagacgcttatggctcgtgctgtggccaacgagactggcgctttcttcttcttgattaacggtcctgagatcatgtccaagatggctggtgaatctgagtcgaaccttcgcaaggctttcgaagaagctgagaagaattcgcctgctatcatctttatcgatgaaatagactcgatcgcacctaagcgtgagaagaccaacggagaggttgagcgccgtgttgtctcccagcttctgactcttatggatggtatgaaggcgcgctctaacgtcgtcgtcatggccgccaccaaccgtcctaactctatcgaccccgctcttcgccgcttcggccgtttcgaccgtgaagtcgacattggcattcctgaccctaccggccgtcttgaaattctttcgatccacaccaagaacatgaagcttggagaggatgtcgacttagagaccatcgctgctgagactcatggttacgtcggttccgatcttgcttcgctctgttccgaggctgccatgcagcagatccgtgaaaagatggatctgatcgatctcgacgaagataccattgatgggaaggtctggactcactggtgttaccatgagaacntccgtaatgcccttggcgtttccaacccctctgctctccgcagggttgccgttgcgaggtccccaatgttcgctggaaggatattggtggtttggagaaggtcaagcgcgaacttatcgagagcgtccagtaccctgtcgatcatcccgagaagttccagaagttcggtctgtcaccttctcgcggtgttttgttctatggtcctcctggtactggtaagaccatgcttgcaaaggccgtcgccaacgagtgcgccgcaaacttcatatccgttaagggccctgaattgctgagcatgtggtttggtgagtctgagagcaacattcgtgacattttcgacaaggctcgtgctgctgctccctgtgttgtgttcctcgatgaactggactccatcgccaaatctcgtggcggctccgtcggagatgctgggggtgcttccgaccgtgtcgtcaaccagcttctgactggtaagttatattaattcgtcctatcttatcgaagataaattaacataagttcagaaatggacggaatgacctcgaagaagaacgttttcgtcgttggtcccngacagacctac

SEQ ID NO: 4507 - DNA, 2833 bp, Emericella nidulans
aaaaaaaatgaaaaaaaagatagataaagtgaaagaaatagaaatagaatagatgacaggaaaaaatgaaaatgtaaagtaaaagagagagggagatttgagaaaaaaagagagaaaaagaagataagagagaggaaaaaaaaagaaagtaaaaaaagagggagagaaatatataaaaaggagagttagagataaaaaagagaagtaaaaatagacaaagaaatatagagatagataaaggacagctaaatagattatgaaaaaaaaaaacagtatgaatcatataacaagaaacccgaataaaagaagaaaacacatattgaaagtaaaaaatacaattctaaagagaagaatgtgacaggaaaaacgagaatactataacgataggaacaaatcaaatcggtataaaaaaaaggtcaatgacatactccatcaagtgaggaggtatatcatagagcatggcagttaagaagagttagcactatttaatgagtcatgtaaggatcctggcaggcttgagctgaccaaggaagtttcgcagctgaatgtttcggcgggctcaactagccaaatatgcctggtgctagacgcggttgacgaattgagggaaccaacttcgtttctgtcgcacatcacgaacctcgtcccgtcgggcatcaatttattgatcatgagtcgagatgtaccccacattcggaagaagatgacattggcaacgcatcttgaagttgattcaaaccccggtgacctcaaagtgtacatcgagtcgcgtttccgagatagcgacttctccgacgaggttgaggaagaggacaagatgatagaagacgtcgcctcgagctccggcaatctgtatgtacatcttactctcgattctctcatactccggattttaatgtatccaggtttctccttactaggttactccttgatgatattcttgatctggcctcgattaatcagatacgaaaggcgcttcgtaaaccgcatgcaagtctccatcaggcattccaggcaacgatgaatcgcatagagtcgcaatctaaaggaagaagttccttggctcgacgactactttgctgggttacatatgctaaaagacgcctgaagctgaaagagatactctgcgccttctctgtggaggagggagaggagttcgatcctgacaataagccaaactccgacgtcctcctccgagcctgtcatggcctggtcgttgtggatagagttgatagcactgttgggctcgtccacgccactgcatatgagtttttcagaaacggaaacgttctaggacaagagggcgatcatgacattgcgcgtaccagtctacaatacctcattatgagcaacatatctccctgcatgacatccacagaattgctgaaacgtctcgagtctctagagttcttggattattcggcaaaatactggggtcagcacatccgagggccggatgaagaatgtcagctagagggacttataaccaagttgctgcgcaatagtaaaaccagaaatggggcctttcaagttctgcagtatagacaagaattctccgacgtgtccttagggggggagatgctgcaatcaataccaacagatctgggcacactacatgtcgcagcctactgggggcttgcacatactacagagatacttttgaccaatggagcgaggcgtctatgaagtagacacttataaatggacagcccttcatggggcgtgctctcgaaatatgccaatgtcgccgccatactggtcgaaaacggggctgatgtaatgcacgtgtatacaaggctggactccattattttgggcggcgttcaagggtaatgaccagatcattagtcttttactagaccatggtgtcaatcatctctctcgaggtacgtacggatggactgccttgcactgggctgtgtccagccgccacccggaggccgtgaaaatcctgcttgagcaccacgcccggtcacaggctaaggatacagagctgctcaagatgagcattcaagatgtcatcgcctacgctgaaagcgcccagcccgtcaaagtcgctgcggatagtcaggatgtggaaatattcaccctcctagctcaacaccttcaaacaccgaagggcattgttggggatgcgcagttcaacgaaatctgggccaatgcccggtttgaccagcctgcctcaggaaacccttggagaacactgacaaagagtgaggagttcaacggacttgaatccagacttccgagattcactggaccatttgcggatgattcagagccgtatcgagaggacgcgacggaatggaaaacggctcttcttacgtctgctatcagagacgggcaattgtcgtcagcgcgcatcctcgccaaaacaggggcagatgtcgactctgcgctttttgcagcttcctgtcggtctgatcccgaatatgtacgttgcttactggaaaatggcgcagacccaaataagccttcttatgggaagattccactgcatgaagctgttcttaatgggtttctggaaactacagcagccttgattgacgggggagcagatgtgaatcaaagagtaccactgcggcgggacccctatcgcacgcggtatgaacgtggtccggccaccactcacgtcggtgcgacgcctctcatacaagcatgtgggtttctctttctgtccgatccggaactttctctacaaatggctcggcttctcatttcgcacggagcggtggccgacgcaaaggatgactcgggcatgacggctttacactatgctgtgatgaggccgtatctgccgttgatagaacttttggtgagctctggctgtcca

SEQ ID NO: 4508 - DNA, 3225 bp, Emericella nidulans
atctcgcgcgtacggctctccgtgattacccacccgagtcactaccattcggagcctggagaatgatttcgagctacagtgtcctgaaaacaacacgtgcaatcatgagaacgcaatccatgaatacgacccttgagattttccagaaacataccaaacagctccggaatgaggagagaagagagcaattcattggattcctttggagccacagacgaaccattggctccgtagcagtcgctgtgttcgtgggcgttatgtctgtctggataaggaagagaggatttgacaacactatactctcatatttcgatcacttcagggcagctttccacggccgtttctgacacttgtctgaacgatgagtagacgataccaaggaaactagtttaccaaccatgtagaataaaaattatatctaattgtacattatgagtaatgtcttacttacgaggtgaccacgccacagcgtatgcaaagactaggagggccacctcaggttacgatagatggttatgaagaaatcgatttgtaactacttcgtccaaactatcataaaaagggcctagaatctctctccgcacagcacgtgacacgctgggggttccccgctattcttatcgcaggtttcccgctctgcgttccgaccttccgctctcttaaatcccgaggcaggtgaattatcccagaacatgccatgagccttgctagcctttgttgtttccgaaacttacattggtgcccacggagaatgaagccgcaagtttgcgggccctgattgcttcgtcaatgcttctgctatgtcctccacagcgcatccgacgaaccttgcaccctcaggaaatggtgtgaataagcgcaagtcaggtactggcgtcaactcgtcttcaaggatttttttttccccccgctgctaacttctcgtgctttttaggctcagctgcctgcgtccactgtcatcgtcgtaaagtacgatgcgacgctcgtctggtagggctaccatgtagcaattgtcgttcggcggggaagaccgactgtcaaatccatgaaaaaaagaaaaaactggcggtgcgctcgatactggacccagttccgatccgttgacggccccctaaccctgaagaagcgccgaagccgatatcttcgctatcaccgtcatcagagcctcccaatgctttcacaactgcactccgcgctgttcagtcggatatcacagctccgtctggggttgcgaaccgtgtcgcacatatccgaagccgtagttctcagtacgataccaaaggtaccagatccaataataactcgggtaacaatactcaatatcaaaatgttctgccggagccggattccccgccctagtacggccccgcggcctcagatccgtcggagggagagtcgcgtgcggatattgagaaacggttggtgaatctgattgacggggaagcttcggatagtcgggcgattcaaagaggtgtacgagcaatatacgttgggcacgagctctcgaatatgtctttcttgatccgccaacaacgtgacacgggtgacgatgtataccacttcgcgggaaacgagatacctcggcggcagctacgaactggccatgatcagctactcatggatgctctcacgttacctaagcctgcccttgccgatgagctcgtgcatgcatatttcgcacaagtcaatccaggctacccgattgttaaagaggagttgtttatgtctcaataccgtaaccgagacccggccgatgcccctccgattctcctccttcaaactattctgcttgtcggcgcccatgtcactcgtccgaagtccgaacgcgatacactaaaagacatttttttccgccgtgccaaatggctgttcgacaacaggattgaacggaatcgtgacatcctggttcaggccgcgctcctattgacatggcactcagacctagctgacgacgacgtgtctgccaatgcacattattggattggaatagcggctaggattgccactggactaggaatgcaccgtaatccagtttgcagtagatttgtgcctcgggatcgccgaatgtggaggagactatggtacatcttagtacagttcgatgtgatggtgtctttgtcttatggccgaccacaagcgctgtaagtggtctatgctattgcctaagattatccatgcgctaatttgcacgattctagcaacctcgaggattctgatgtctctccgttgacattttcagattttgagggctgcggtgcccgtgtacaggctgattttgtcatccacttttctgagttatgcacgatgatctcttacattgttcgggaacgttttggacttagaatcagcgctgaacgccgcaagctgcgctccttgaggctgacgaagcccttgcaaactggtcactgagacttccagatagactacgtttgagggcgtcagatatggacccctggtctgccatgcttcatctcacttacaataatttcctaattcttctccatcgacctcatccaagagcttcagcgtactcggatgactatggtccccacgacgccgaaatctgcagcgcagcagctggagtgatagcctcgatttttgaagagcttcgtatacacgatcgactcaagctcctctggtattctggcgtacacactctattcaccgcaatgattcaagtacgggtcgagctccgattttccaacccggttcttgcaatcaatgcccttcgtcgctttgactctgcttcatattccctccgcgagctcgcccagtattggtctcatgccagcaccatcctacgattatttgaggaatcgagacgcctccaggaagatctgcgaactacaaccagtgacagaccccgtcgattcagcaatctcagcaataactctacaaacagccctgcctctcagcagaagaacacctcaggcattcctcacttggcaaatatcaactcatctgatgctacaccacccagcgcccctagcataccccctctacaaccaagcagtcagctatcctacgaagtcccaacaaccgaatctgctcaccataatccacgctcgcaacccacgttaagtgctcatactcacacctatacaacccaaccgtttgacacctggattccatctaacaacctgacacctatggacacagtcgataattcacgcgaaatgcttgactggcgccagctgttttccttcaccgatctggagggaccag

SEQ ID NO: 4509 - DNA, 2276 bp, Emericella nidulans
gactcagcgggcgtggaaatgcagtcagcttttaccattcatagactattaaaggtgcaggatgaacttcgtgctgcgacgcgagttgatagcatgtgggcgacggggccgttggtgtggtttttcggatggcatgggcaggattggtatgttaagggtagtttcatagactataccagcgggaccccccatagatacgtgagtttttctcttgccccattctctcgtactaggcgaagttgatattctatagtgcatcgttgacctctggcaaggcaacatctcccaacaaagccgtgcattgcaacttctactcgtcgtggattacatatttgattgggctcgagatatctacagaccatgtatcatcagggaattgtctatactagcagccagagaaatgcagccttgcgatccggatatattctccaccgttgaccggagtcagtcacagatcgcatcggagttgcctggcttctcctggtcacaggagtcggactctctgtatgtgagtacgacagggctcgagtctgggctcggggacactcatccgctttctggagtggtgcgagatgcttccaatattgaaacaagattcctgagcctccatatcactgaagcaaatatggacgagctgtgggtctccctgccagcacacctgcgggagtctgcaaccacattcgtggacacattacgaccgtctctagacagctcatggcgagttactagaaagactctgttctccatccaagctgcttggacaagaaatgtgaatgctccagaatttgcaggggggagcaatacagatatcgcgtctgatgagatcttcttcactaacatcgttattcttttccacatgacagacgattggactcttgtccggcaacttacatatctcgccatctccgaaggcgctctgcaagtactgctattacgacatagccttcccgggctattgcgggatctagaggcgcagaaccccatcattgacgactccagcattgagcccttcattaagtccataaggagacagacaatcgcaagcagtctaacggccgctgtgagcatgctctgtatctccagctcctttacccgaggccctggccggatcccaggaaagtggctccttagcaaggccaagaacatctatgccgggtttgtgttcgacaattcaccgtcgactctagagattgtggcctctttccacgaaacacgtgagaaattgatcgtgaattattttgatgacccctatcttgtttattcgcggacgcgaaccttcctgtcaaccaattgccctgagcaggggcgcttgtggcgcgctgagctggactcatatatcgtaagagacaaggcatgggatgcggcgttgacatgagatgtctcagacctgcctgataactgtgcaggtgcaggcgcaagatgatgcgacttcatcacatctaagattgacatggaccggactgacgttgacacagctaccattgtgagaggcttggcggaggggggtctgtactactccgctctacagctagattcaagtcagagggtgcgtgagtgctatgggtatttgaatagatccacaaagggagaattgttttggcgaaatgcagatagtttgggtttgctgctggagtggctagaagaccttggttcccaatctggaagggcaggatggtcagggggaggcccaggggagacaccagattcgcctattatgatatcatcaagcgaggagttggagggagatccgatagaagaggactagaaacggtaatcctggagtataatgcttgcacctggctggaaactaagtctgcacgccggtctaactttttgtgcagcgcgagccgaagcacttagtttgagctagcaaatgaaaaaactgtgtgtattgaatccacacatcactttttcccctgaatgaacgcctctcgcgatccaagttgcctctgcgcgccacacatttctcttggatggatagaaaagctttacaaatcaggatccttccgttaccttcatttgccagtcctcgttggtccttccaaaacatatccctttggtaccctacctaactttctggacgtccttttttctaactccacttgggctatcccagacaaccaaacacccctcgcttgtctatcataatttcagcttagtctagtacgccccgccctcaaacccgaaagtacctctaccccttatacttcttcttgttatgcatcctctcctcctcgctagtgctccctccccttcactccttcttttttcacccc

SEQ ID NO: 4510 - DNA, 1443 bp, Emericella nidulans
actcctcattagcgtcgcgtggctgtccgcatcgtcgcttcatcattctcggggtcatgtccttcgcagttttgggatccgcgcgcgtctcccgcccaaaagacaaagatttctcaaactcgaggccttcaagaaaacgcactacgtcgcgacgctgaccgcggtcttctttttgaacgtgggcattttcacccctttcttctacctcccgttatacggccaatctcatggcatgagcactggcctagctttctatctcatagcgatccaaaacgcatcctccttcttcggccgtctagtcccgggcgtcatcgcagacaaaatcgggccgtataacatgctgtcgaccgtaagcatcatcaccgccataatcaccttctgctggatccggatgaccacaaatgcgagcatcatcgtcttttccgtcctctacggcttcttctccggcggtattatcggtataacgcccgccgccattgccaactgtgccgggcatcctcaggaaatcggcacttacattggaatgggtatggctgttatgtcggttgcaactcttattggtccgcctataaacggggcactgcttaatgagtacggtggcttcctccaggttcagatctttagtgcggcagtgatgatgttcgggggcgttctggcctttggagcgaagatggtgggagggaagaaggcttttgcaaaaggatagctggactaattgacgtcgtttccgttcttaattgccttaaatacgggagtagctttgtttgagcagggatatatacgacgttccatctagtacagcatttgaacttattaactattttgatagatttcattttctggaggtaaatatataaggtatctcaaattcagaaagtagaagagtgtatattatgataacagagggtaaaggtatgagaaaattgtaagtattcaacgaaaggatcctcgggagagcaccctcttattcatggataggtataggtaaatgcctccagtcggcaaagcaaatcttcttattcttactatatcttcctctataatacaatcacatggatttgactaatgtccatgttcatgcttatcaggtagtattatcaggtagtatctaaaactcatattcggcatggcgtctgactcctggctagtttgcacctgaagcactcacatccaccgactacgggccttcgaggtacttaggtacccgacgccgaagcgaaaaacgggttggcctggagtctggaccacgtgtagacgcgtcatagccctacgctataagacattactacttaatggcgtactccagacgtgccttgccgctccaccactcctacctgactagaccgcaaccagcgaccacgccgtagccggattggcgtactacgtacgagagggagggagcaggatggaacacatatacttcggctccgttgctatcgtggc

SEQ ID NO: 4511 - DNA, 5568 bp, Emericella nidulans
  unsure (1)..(5568): unsure at all n locations
aattactagtttgaagcgaatcatgcccaccaagcccaatatcactggccaatcatgtgatagcagaaagcgcgcttaggtgattacaggtcgaggacttggagacaacggtcggaaagccgaagaacgaaaagagaaaaaacgtggaacaagacgatcatcagtgatagaacgcgcggagaattcgagcttgtgcctcgaattctaggagactggtggtccgagcgttttcgcgttgcagggcgcgctggaatgcgtgatagtcgcgagtctcataatgaacccgcattaagaagggagaacaacaataacatcgccaggctcaagggacgcgctcacccaatcaccagctgggcgcttcgcgtcaataacactcgaaagcgtgtttgggcagactcgagccatatcgtgtgatattgtcagattatggttgaattgaatggcccagagcgattcctctcccctcgatctcactgatagagctaggcgatgttgttgcgttgatggggagacgttattcgtgttggcctgaggaataaacagctgaacaacaacattttgatctgggtcagaagcccataatacattgctgtctcgtgaagcgcctcagtcagctcttctctgtagtctcacccagttgatttctctcctgcctattgataattattcaatccaataagaaaggtgacaaagataggcgtccaaacaatcaacaagccaggccagcctccctgggtactgaaaaggtatagcgccgcctacgcgtgatttaaggtaaatccccttccaacggtcaatgagcagaggagggcaagagaacctgcgtatctctatcatcctcgctagaccgtggtcaggtctctctccgatgccctcctcgacctgtccgactcgatccatctatccatgcgtctggcgcgagaactgccgccatcaacatccttatcgcccagtctactagtgtacttcgtcactccttcaacccacttccgcctagattccaaccactccattcgattattgtccggagcggacgtgtgagcccagctgctgcatttaccaaccgcactgccaactcacgccctcgaatgtccacgaccttcctgttatccttcttccttacagttgtccggagacgcatctgattcgcccgttggcgctggcgaggttgcagttcgacccttagacctgtcgcattcgttcgcttcattgccctccttcttgcgatcgaccaccatttaggacataccctcttctctaccgccatcatgtcagagagcaatagagcctcaagcaatcccgcgatttacggcagtgcgagagctttgaggtcaacaggaacacatattgtttctcctccgggctcaagaacccctccaagcatgccagccaaaactaccctctatttccccgagccgactggggtacatcacacaagccgaagtgtctcagggccaattgatcctaacgcgctggcaaaggcgctgagggaatacgaagacgctggacgatcccgtgaaaggacaccggggaccagcccgagtcggaaacgtcagagagtctacggtgacaggtatgcacatttttgtcttccgaagctgctaatctgtcgataatgtcgtagaatacctttgctaacaatcattttcaccacagattcattcctaaccgcgaaggtcaagatctccaagctacctacagtctgcttcatgaagatggatgtccttcaacaccatcgaaaacgaaaaagcgaactccacactcagagcttcattttcaaaagagtatgcccaccatgattgattttggcttctcatgctgatattttctagcggaagaagcaaatagaatgtattcacgggttctgcgcagcgagttatttggaaatacagttcctcaggctgacttggattcgcttccttctaacacgattcgctcatccggtattaacgacaaaacccggtctcatacacccccttcgcatgtcgtctccgctcttccacctgccagtatcactccctccactcctcacaaaaacctcttcaattacgcctctccacgcgctggatcggcgcatcccacgccatccaagaccccgcgtaatcaacatgggccaaatctcaacgttcgctcagagctctacagcctatctcccatccgttatgacagccaacggatacttgagacgcctcgcaaacagccgcgctacgtgaacaaagtaccctacaaggttctcgatgccccagacttgcaggacgatttttacctgaatttggttgattgggggagtagtaatgttctaggcgttggcttaggaaactcggtgtacatgtggaactcacaaactgggagggttacgaaattgtgtgagcttaaggatgacacagtcacgagcgtcagttggatacaaagggtaagccgacgtcttatgaatgtctgggagcttatgttgataaacatctagggtacgcacctttcaattggtacggggaaaggtatggtgcaaatatgggatgcagagcgctgtcgccgcctacggaccatgattgggcacaccaatcgcgtaggggcgttggcttggaacgatcatattctgacatccggctctcgggatcggcatatttttcatcgtgacgtgcggtctcctgaccagtatcttcgtcgactttctggtcataagcaggaagtgtgtgggctcaggtggaacacggaagatggtcaactggcatcagggggcaacgacaataagctcctggtttgggacaaattgaacgagacccctctttatcgcttctcagaccataccgcggccgtgaaggctatcacatggtcaccccatcaacaccacttactcgcatccgggggaggtactgctgatcgaacgattaagttttggaacacggcgacgggttctcttatcaaggaggttgataccgggagccaagtctgtaacctggcatggtcgaagaattctgatgaaattatcagtacgcatggctatagtcagaaccaaattgtcatctggaagtatcctcgtatggagcagattgtgtcgcttacgggccatacttttcgtgtgctctatctagccatgagccccgacggccagacagtggtaacgggtgccggcgacgagaccctacggttctggaagatattcaacagacgtcccggtagggagcacggacgcgagggcagcaaattagcggaatggggtacaattcggtaacgacttgattgaactcggtgccacagcatcttttacggcccattggattctacatcatgcattagacgcggcgttacggctggtttggcgttagtgtttcctttctcagcgttgggcgatcctccatggacggacttgggaggcggcatcacggggtctaattcggcatctagcatttgctcttctttttttcaggcggcttctaggtggttgttattctgcgcaatcttgatatcatcggatcttcgtctcatgttactatgctttgcgcgttcagcattatccagcatcaatcaggcattgtatcctccgctgtccttctccctcgtcttctgctgctttttattccttggctcgctatctagacttgagtctagtagcatgcaagactacctcaaatcttcctttcgctttccagctacgggactggacgtaaacatgcgccattggtgttgctctggcggacagaacagggcctgctggttgtttcatgaacggcttttctcttttgtcctttacaccggaactcgactagctgctcaaggttagcttgaggttgttctttgtcgtcatatctttgcgttcattctctaggtagttttcccgcgtccggccgcttcattgcgttgatgacgagatgacacgggattttgataattagttgtcttctttaacttacggttactctcaaggcgagtttgttgcattgcctacattgttactaggatggatcgggtcggatgtatgggtaatcgattgcattaagatactttcatactgaatctgggattacgcttattataagtgcccgtgtctttcaaagattggactggttggatttgtgttaaacaaaaagaaaagggttgcaatgatggttccttgcaggtaggtaaactagtgatatcccatattgaatgctaaataacataacgaatatgtcttctttgtcgctacttcgattgttacaaggtcaaaaaaaattatgagaagtgagaatagtctatataaccagccgggctggttcaacggtcaggagagtcttgacgcgctccaggaaggttcgggctcgcttctcctcgcccaccgggacagtcaagctgaaaacattcaaagcttgttcaggttcaaatgaatcgatcgcggctgcaggtggactgcgctttgtcgttttggaaccgctaaggaaatcgatgagatcttccttcgccgtatgaccagctcgcacctcgggagtaacgtcaacggcgttgagctcagggatgtattcaccgcgcgagactttgacgggctccgcacccagaagctcgtcgaaaatttcgtcggcggattgcttagcgtacggtgaccgaggaagatcgtcgttggccaggtcagcggcccgggcgacgaaggtggatagaggaattgtcacaccaacagacttctgaagctttttctgagcacggagaacagtagccaaggagatcgaaaccgcgaccgatattgtaggaggcgttttaacgactggctcttcggctgccggtgccgactctggtgctggtggtgctggaggaggagcgatcttgatgttgcttagatcgaggtgagcgagcttctccatccgcgctgcttgcgaagcgggatagtctgacggaatgaggccgaggtaggcgaggacatcggcccttaagaagtcggcctttggggccggaagcggggattttggaaacttcgngactctggaatgccccttttggtggaggagtgagataacagaaggataaagagggtaagcagggttatgagtctgaggagcggaggtggaagcgaggcctaaggaagacatttagcaagttagcattgttgatcaatctaaactgaaagctttgggttgctcaagcttcttaaaaaaataatactcacgtcgcgtgctgtaggcgacgacccgaggctggctcttacgcagcatggccgagaactgtcgagctgagtagttggaggccattgctgtatacaaactgcgtcctctcgccgcagtccgttttgggatgaagagttgtcgagatcggcgggtgaagcacggacggtgtcaaggattcagagagatcccgacaacaaatcacccacagaagctgagggacgaaaagcgccgataagcctcgtgatccgcgattgttgattgtaatgcttgcgcctgtcgtcaagctagagatgttgaggttgttgaggtcctgatttggtctcaccggcgggggggacagccccctttttctgccagaacagatctgattcagccgtcgctgaacgagagaactacgctcgtgcagaaaagtttctttgaccattgggttagttgcgcc

SEQ ID NO: 4512 - DNA, 1865 bp, Emericella nidulans
atccaatcccaccatgatggaggatacggcagaaaattacggaagacgggcccagcgacgtttccgcggcagccagtgtaatcagcatcactttgacacggctgggagttcggactcctttggacctgctttaggtacctaatatatattatcttaggcacctagagccgtcggccgtcggtgccgtcttcaggcaacgagtgacgaaagtctagataagtgatcaccaatacggtaccagtcaatatagattgattgaggactgaacgaggctgtgtgtgtcggaataaacctcggcgctcaggagagacgtacgacgacttggaactaggctctctccccttgcatcgaggacgagcacgtccaacggagtcggtgaggaattcccgcctgaagtcgtaagtttagtctactctgtacagagaaattcgtacccgacccggaaatagatcgtctcattcttgatttacgctggaatatcgctgttatttgagaggtccagtcagaggagctatgactgacggaaatgatccgagagctctgacggtggtgacgatccccatcattagacgacttcgcaatcgccgttgtaaattaagactaagctcgaggctattccgtaaaagaagcattccttctccatagaagtggcagctaggccagctaggcttgaaggtggtcctcgaatggagccgatcgaactctcaactccgtactcaatgcacgacatctttatggcaaccttatttcgaattgaatctgggctcgggcttgactcagtacccaactcagttttgatggacatggaaggcagaactttttcccgccggagttgtccccggttgctgaagcctaaaatcgaaacaagcgagtacaacccctcactactctggtataccccggtaagaatgttagtccggtgggccttacaaggatatgactcctttggattctgccgttcgtattaatgctaatatcttactaatattttgtatggccaccctctgcctcgattactgcctgacatctggcttgcatagacccaataaggccttccaaaaagtctgtagggactgcatcccatgaagctcgtacaatttctcgtagggcatcataagatagctggcggtcatctggatatctctcttggatccagtctttcatctagttctataccatcttaatagggttcagatcaggggagaaggcaggccaactaataggatagatactatgctcatgaagctctgctatagtatctttactggcatggccaggtgctctattatgcataagacaaagatagttaccttgctgtcagttcaggcaaagatagctgtcaataataggcataattcgctcacagtaactctctgcattgatagagccctattctttctcctagaaaaggcaagggcctttagtatctccataaaatgatccccaaaacatccaaccatgctttttaggggtagatgaataaatacaggtctcatctagctcttctcctgctcttctggtaacctagattctggtatagaagcctggagtaacccaagtctcatcagaccaaagtattcaattccattgcttaattgtccaattcacatgctcaagggcccaggcaagacatacatgctttatatcgtccgataaaggtggctttcgaagagctttgcatcgggaatagcctcgttttttaagtgctcgagcaagtgcagtttctccgcagggaagatttagttcttcaataactcgtttataagatagtcggcgcgtacgttgtgatgaagagataaaggtaatgatattgtctatatcctcttctgatagcttcgggcgctggccaggaggctttcaaggag

SEQ ID NO: 4513 - DNA, 5391 bp, Emericella nidulans
gtaaacaccccagatgggttgcggtgctcatccctccagcgtttatcaaggaaatatctgaatgcgccctgcacaatcccgagcacaaacagatcagctaggctgagggtttccccgaccaagtactctcgcccacaaagatggttgtcaagaatctttagccgtgctaaagtgtcatctttgctttgatatatgttgtcagcattgaagttggctcgtccgatgagcgggttgaaccagccccctaacgctgggaggatttcggtgatcccgaaggccatccagcgaatgatggaggcatattcttgtccggtagtcccaagtaaagtcgtatttgaatcttgagatgttactatacctcttagtcaggaattgaatagatggaattgcagtagcagcatggtaccatagagagcaatagcaatagattccgtcaatacgtagccgtcggcccccacaaacgtaggaatcttgcctagagggttgagctggagatactcttcggtagcatctttgaatgaagtgatggtcttgattttcagaggcaaattgttcgcttttgcaatcgcaagaatcgccagcgaccgcgggttgaacgggcgagtgtacagagtgccgaacggcattgcagaaatattctcaattcagagctgattctcgtattgtatgcttgtggcaacctgctaaatacaaatactgacagcaaatcaactatatgtcaagaccatgcccttcagctgtccgcgtaaccctaacttcccccaggacaacggccttcatctttccccgatccgtgaaacggtcctcgtccgccataacttcggggctgctcatgacggggacaaactcctcgaaggtggcttggctcgcaaattggacaacagcaaatgcgtcgaaggtcaaatcgatcgagtcgccggccagcggggtgaccggttgctgcaggtagtgtcgggtgtggctgactggaaaggccctcccgccgagtcgttgcagcagggggatatgttcggtctcccagtggttacgaaattcgctgggtgtgaggtcgccgcgacgggctacaagaatcaagacagtgaacatggtggagtgaaagtgctgtgtatgtttgtccacaccttgcttccagaatctcgcgcaatacgcctctatatatggcctgtccctatctcggtcgccgaacgaactaaaccaattattcagagagactcttcttacatttttgtcattgttgccaaagtcacttcactcattgctgtcctccaaccatgtacacaactatcatcacagcggtatgcgtgctattcgctcttcacctcctggacagcttctatcaagcccggcaggaggtatgggccctccagcgggcaaacctagtacgagccctctgacccaatgattggctagaggacgattaactggtgatacaagcccatgccttctttcagcctgctgaccggccactttggtgccctcaaacaaaccatcgatggcatgccgcccaacgcaaaccctgcatagcattatgctgaaattgtcgcaaaagttccgctcagggatgttctacatcaacatgtggccattcagcggtacatggctagtggtcgcaacaccgtctggcgcggcccagatccagagtctgaatctttcgaagccgaacatcctgcgaagaccgctggagactatcaccgggggcccaagcttgatgagtatgcatggtgaaacatggaaacggtggagggcactgtttaatccaggctttaaccccaactacttgattgggctggcgccgctgatcgccgatgaggtcgttgttttttgcgagcagctacggcagaaggccagaacaggaacagttttccagcttgaaccgctcactctgaggttgacagttgatacgatttgctctgtgacgttgtatgtggttactcccgttgggcgatggccctttctaacccctgacttagagattcacagctccaccaccaaactcaggaccacccccttgcctcagcgctgcaacggcagatcgaatgggcctcgtttggaactaccttcaacccctttaagcggtacctgaccgtgcggcctctggtgatgtggtacaataaccgccttatgaaccgcttcatcgaccaagaggttgaccgagcgtaccgggagcagtctggccgtcagtcgaaatccgtgatctccctcgccctcagagattacatgaaagagaaagatggaagtctggaagacttcaaacgacgtgttgcgccacagttacgggtctttctcttcgcaggtagagatacaacgagcagtacactgctctatgcattctacctgctttcccgacatccagaggccctagctaaggtgcgcttagagcacgaccaggtcttcggcccatatcatcaacaagtacacgagaaaatccaccaagatgcgaaactcctcaaccaactcccctacacaacagctgtccttaaagagactctgaggctcttccctccgtctgcctccatgcgtgaaggccgtcccggcgttgaaatcaccgacgacaacggccaagtatatcccactgcagggtgcaacgtctggacgctcaccgtggcactgcaccacaacagtgcgcactgggctgaagccgagtcatttatccccgaacggtggctcgtgggatctgaccatccgctgtacccagccaaaggcgcatggagggccttcgagttcggcccgcggagttgtatcgggcagacgctggcaatgttggagctgcgggttgcactagcgatgacgctccgcgagtttgatattgcaccggcgtatgataagtgggatcacatttatccaaatgacgccgtcaaggagttcaatgggcatcgggcatatcaggcagaaaaggggggagggggtgcgcatccggcagatgggatgccctgtctggttacatttcgggtgtaaagtatatagtaaagaattattgaatacgtgaataatgacataactggactttctctaagaagacctgctgatggtgttagtttcgacattctcttttgtttgtagatgtctaaccccatggttgcatgctgatacaggagcctcgatggtaaggagacgacgagaatctatacgaggcgccgagaggtagatcagggtaatgcatctgatactttgatatgcacttcaatctccgtaagaaaaaagtatcagttaactctaatccatatttaccaatcttgctgcaacattgcccatcccaggcttatcaggaaactcatcccaggccccctcgacgccgcaccaacgcacccatcttaccatgacgcgaatgatctcttcgtcctggcgcatctcttcccctaccttcttccgaatgctctccggaaccttatactgctccggtccaagcatcctttctacagaatcaagacccatatgcgcaactttgataaaatcctccttccgcagtggaaattccggacgcgggtcagggaggccttgggcatggaggagagcccgtgtcaccttcgaaatatggccgtcgtcgccgtagatcgacgcgcgatgcgctagctccatccatccatcagctggtcgcttgggcgtatacccggtaatgcggtctgcgtagagggtaggacatccacagcctgcatacgtcacaagatcgccccaaactttaaaatgcaggagccgagctttattcgacggtgagatccagtcttgcgccaggaaagtcgtgtagaagatggagagggtgagcgtatgcaacatgacaaagtccaatgcttcgactttgccagggctctgggctgcacccaccatgtatgcgcaggtgtgcaccatatctgttgtctgctgtgccagctcctcttccgtgggactgacgcagtactgagcgagatacggaatgagcttgtcacggaccttggccagcagcccgtcactgattttatttatcggatctgtcagctgcactgcgttgcggatgactgggtcactatgtagttcatccatgatgtctagcatcgacttgaacggcgccttcgaatgggcagtctgcatctcctcggttgggaacaaaaacgaattgggccagtcatcgtgcacgcaaccggctgcgagtgcttctgctatgagcaggggctgattgaactccagcgcgcatccgagatggatcatcgggtgaagaaaacctgcctctcattgagcgaaagattaccactcgaggaggttacctaccagagtgcatgcggcccaggacatcattggaaatctcatcattcgcgaacaaatactcgttgatgacatcaggcacgcctctctgcgcaatctcgtcctggaagtagcgcagaaagctgtcgtagtagctgaggtcgccaatacactgcttaaagaaggtgcggtctttcagctgcacgacgactgaggctggacggtactgaacgagtgactgatacccaatgttgaggtcatacatggcccggatctcctctggggtggctcccagggcaaacagggtgagcaggtggtggacggtgtgatctgtacaggttcagggtctgcacttttccagatgattccacttactatggaagcccaccgcatcaaagagggtatgatagcgggcatagttgatcatcagcaactcagagacgcggtctgcgctctgctgcgtcaagccatctacatgcgtgttcccgggtgtcccatcggccgacagctggatgttgtacggaccgctctggggcctcgttgggcctagggttgtggaggtgaacatggttactgcatgccattctattctggatcacaatgtgccaatatttgtgatgtaatactagccccgaaccccgaagcacggtgaggctcgctgagcgaagccaaaatcttacattaagtccagatcttggtggtgcaaataccctcacagaaccaaacaatgccttcctatgcggttctgggggctacgggtaatactggacgggcgatcgtccaggtactacttgatcgagcagacaccgacaccagaattcacatctgcgcctactgtcgctccaaggaaaagctcttccttgtctgtccggcggccgagacttttaaaagcctttcagtctttcaaggacggctggatgatgatagcctcatcgatgaatgtctcaggggcccccatgccctgtttctggtagtcgccattgtcgacaacatgcctggctgttcggtggccatgcctactggcaaggcggttggagcgttctttaaacggctttgcgctacaaaacctgcaataagttttccgtgattagggatttctttttcgccttcctggagcccaactttctgaacgatgttccctcccggtgacttggtcctcatactgccgtttccattttc

SEQ ID NO: 4514 - DNA, 1875 bp, Emericella nidulans
acatttcacgcatcattctcattcggatagagcgatcgatctagcctagattgagactgcttgttcatttccaaaaattgtctcatgtgtggtgagaagatacggtcaacactaggtccggtagcggcgtttgcttcttccgcatactgtccattcgttgccacggcgacaattcctgacgtgatggccagcgacacctgcgacacacggaattatcaaggaatcgggaggaggacctttgtgcgctgatttgaagatgagaattgcttttccgcggggttggtcgtgatgcgtcatgtggccctagctggatctgataaacccattcgggcctagtgtgagtgccttactgccccagtataagagtaagagcatccacccagctcttaactccaaccccagcttacttgcagcgcaccttacaaggcttcaagctgcgcaaggtacgattcctgtcaactcaagttctgtctctaaccatggcgaccgctaacgtacacagatgacactgcaatccattcgctccatcaccgagtataatatctcgaccttccgacggcattatgtctctgagattgctggctcccttggagacctggggactttcctcccaatagcgctcgccttagctgccaacggcacggtctctcttgctagcacgcttatcttctctggtcttttcaatattttgacaggcctcttcttcggcatcccgctgcccgttcagcccatgaaggccattgccgcagtagtatcgcgcgatccttctcgccgggatctatcgctgcagcagggatatttgtcgcagcagttctctttctaggaagcatcaccggtctgctgcagtggtttacccgcgttgttcccatcccagtcgtcaaaggcatccaagttggggctggcctgtcccttgtaatggcagcatgcaccaccttgcacggcctcgggtggactcacccttcatgggccgacaaccgtctctgggccattggcgtcttcgtggctctcctgctcacgaactctacacccaaacgactgccttatgcccttgttgtcttcattatcggtgtggtcctcgcaatcatccgcagctccctaaagtccaacctcccctcattctcgatctggcacccatctatcgtgattccagttggcagtgaatggtcggaaggtgccgttgatgcaggccttggccagcttccgctcacaacgctcaactctgtcgtcgcggtcgtccatctagcagccgatttactcccgtctgttcccacaccatccgtcacagccatcggtctcagtgtctctatcatgaacttgattggcgtctggttcggtgcgatgcctgtctgccacggctccggcgggctagcagcccagtaccggtttggcgcgcgctccggagccagcgttgtctttctaggagtctgcaagcttgttcttggcctggtgtttggcgaaagtctagttaacttgctgcaccggtttccgaaggccctacttgctgtcatggttattgcagcggggctggagctcgtccgggtgggtgagagccttaatacctctggcgctagggatctaggaagacaggtggaagatgagagtggagagcaggtgcacttgtctgaggaggagaggaacaagaggtggatggtcatgatggtcacagttggcttgctggtgggatttaggaacgatgctgtgggattcgttgccggaatgttgtgccactggagttttgagttgccagcattgatacaccgtgccagacaccgttggtcggaacggagggtgcgattgccttgaaactcaacactacaaactgaacgccggtacgaacttacgcagccattcgtagcatgacgagcatgacaaaag

SEQ ID NO: 4515 - DNA, 3099 bp, Emericella nidulans
tccccgaactccatcaaccccacaaccgcccacgccaggccgatttccagacctatctccaccgtatcggtcgtacaggacgattcggtcgtgtgggtgtctcaatctcctttgtctcaaatcgcgaagagtgggaaatgctcaaccaaattcagaaatatttcaacacggatatccagcgtattgacacaaaggactgggatgaggtcgaagacattatcaagaaaacgatcaagaatacccgcgctcaggctggtttccgatgagcgaaatgcgttacgttgcctttgctgaataggccgtatctcccttaagtttgtctaatcgtacagcttgagttacaatcaacctcaggcgtctgtttgctctgcttgggctcagaaccggagatctgactggggcgggggctcagtacatagttttcgaggcttatgtgtgaagattaatgactctttccttgacattatcgaggtaaaggaaaatctatagataccagttgatttacacactcttttgtctagtttgtaactgcaaaaatttgacctgaggaaggaagcaggcgaacggtgggtccagactccataatgaatggatacatctagccctaacttgaacaattgtcgattcaccaaaagtaccagcaggggcccaaggaagattcaaatgtagcggacgaaccacacaaggcccagaaaaagcaccttaacgcgtatgctggattatcaaacaaccagaccacccccttcgaggtccaatgaccgtatgctcgcaacccgcatagacctcattcgtctgtgtttgaatgacaccgaacaggacttggtcttcaatagagtcgacagcgaaatttccagtgaagtcgtaggatccttacatcatttaggtgttgctagtctattaatcagtactcaatcaataactccgcttgaggcgcggagcgaccagtgccgcggaacaaatgcataggctgccgtgttctctaactctctgaagaccattgcaccatgtagtcagtcttgcgtagtatttctctgtgggagtatgagtaggtgtactaggaatacgcataattattccaccccacccgaccgacctccatatgaactccaaatacactcgaatgtacccagtaaagccgtgcttctctgctgcttgcagaaggccgtgatataactgtgtcaggctctggcttccacggtgattgaataccggagatgattcttgtcgcatcttcgtgacgacatatcttgaacctaccgcagctgtcaggacaagattcaaaatactagataccttggtaacgtaaagcgtctgggaggagtaattaatagttgcaaaagagaatcttgtcggatgaaggccgataaatcttgatggagcgcgacagagagcatcagcggataagcattaaggacagattggaggtatcaagctgctcatgcacagtatacctgtcgtccaccatgtccgcaattctcgaagagccagacactcaattgcaccatctagcttgcaacgattttgccagaaaaaagggggaaaaaaagaagaagaagaagaagaagaagatcaattgaagcaggttgcagatcgcctgttgtacaataatggcgagttataaatgttgcatgactgtttcccgctgtgcaacacttagcttacccgccgttatctggtattgggttgtgttgaataagccaaacttcgactcgagagtcagcataccagaagcctttaccagaaacactatcgtggccgttttttctctttgacgatatcaggtacctgggtgcaagacttgatgtgggccaaagccttatcgtcggcgttgatccctgagtatggaggcgttggtcggggacggccgatgaggggaactactgataaggacgataaaccactgtgggagctcttaacagctttcccagactgatcattactaacgtaaattggagatctactcagactaggcctgaagatactgggttctccaatgtaaccttcttagcatttttctgaagcgaggtaagatgccatgtacggagtcccgacgtaaggcagctcagcagataaggtgcggagaaacgggtcacatgcagtgtagggtgccttcccagttctcgctttgcttttgaccttcccttttctttcttcttctatctcttctcgatcttctttcttcattctgaccaaggtgacagatattcgttcttaagaattgccaacatgacttcagatgataccaatgtccctcccaaggatgcgacgacaaccgccgtccagtcgcccacctcagcatcgagatacagcaagcacattgttgtaagtacttttaagctcttaaaatgagatgagatgagggcactacttatagcctcagttaacaacatatcccggtcaaagcggtatcgaccctgttcctctcgaatggggggctccagacgcagaatctcgcggtcctgtcgtcgtctctcgcagcggagccttcgtcaagcgtcgcaatgcgatgggcgctcatggtgggagttacagtatctacaatgcgttagctattgctgcgggagacctggatcccaacttccgcccgaacttcgtcaatacggagcctacctttgatttcccctggcagccagcctggtccgacaagactaagattgtgtctatggacccctacggtcatgatgttgtcaagtacttttcggataaaatcaacgctggctgggatattcggcccacaatggccgtgactcgtgccaacatgaagcttgcggaaattggcgaagcggttcgtgatgggctgttggaagttgacggctcaattgtagtggactccactggtgaagtacgtgtgacaaaggttgcagtcgagcctgtgtggtatctacctggggttgccgaacggtttggagtggatgagcctacgcttcgttggactctgttaaacacacaagagggtgtacccatgatagctaacacaagactacctgatgcttatcttcccccaatggcggatgactggtttatcttcggcccccgaagggatttgatgaaaccaaaattgcttatctgtcataagggtgtacggagcatttgtccaat

SEQ ID NO: 4516 - DNA, 1850 bp, Emericella nidulans
atgaaaatcgatgcattggcacgtcattgtctattgttatcccaggatacaatgtgttgagtacagccgtgctttgatcggctagatctcgtgcttttctgccaagcttatcaagtctagcttttgaactctgtccttaacttatctacaggcaatattccatgtacaaagtaggtgaaaacgagtctacagagtgcaaacaagacaaaacagatagcagtgtttggagggcgttctaggccatactgaagccggagatggccatttgcgcccatgcccgggcggtgatgtcatgtgaggggagccattcacagcttgagcacttggctatatcagatacacgacctcacagataaatacgtcctcacgtatctcctgatgttgcaacgaacgatccggagctccgaatcttcggctcgcctaactcgaatccctccctcagtcactggttgatcctttcccattcataccgcccctcatcgccctgatggccgtcgcactcatggagtggccaccgccccttgggcagccagaagattcgtcgcatcaagaagagaatgaagagaaatcctcacctataacagaccaagattacatcacattacagaatttgaagatgccgcttcttcaactgcctcccgaacttttgttcgatatcctctcgtacctgccagcaatcgaccttgtccgcgtctcggcatcttgcgcgtactggctcaacatgcgaacaacgaccttctgtgggcgaacttggtcaatgcgaacttgccagatccaatacaagaccctggaatttttgactccttccgcgctctctatatcgcccatcacccatactggttcattccgcggaataaggtctggttttcggataccgagcacacaggtaatctcatcttggccagatacgataattcgccgggagtgatcgaggcataccgtgtgactacagaaaggcggtcctcgaaattccaggtctgggaatggaatcccgatgttgtgatccaagcatttgagcccaaggtgagcttgtggcttgatgatcctatccttctcttgcagagggcaccggatgggcgccgaaaatacctcgactgtgagaatcgaatgactatgccggtcgaagtgcagtacatctacaacgctatttccctttgtcggccggcggatcccgatcagctcaccgaagacacacagtggccaccgccgaatatccccagccagcaccgtgtttatcgcaacccagaagtgcattggaaggaatggaatcgcgtacccaagcaactgtctcagatttcagagcacgcatttcgaatccggcgatgggcgcactttcgcttgggcatgccgatgttcacccctggacagcaagagactatgtccacgtacagcactctcgatccgagcctatacaccccaaccaaggaaaaaccataccaaggaatctgggtaggtgattactccgcgcatgggtgtgagtttctccttttcctccaacgggataaggagagcgacgaagatgatgcccgcgacccccggaatgatgatatcatccagaagggaagcctagaggccgtgaaactcactggtgatcccaacgtcccgcgaggccaattctcgtttgtgtcagatgatattgggcccggcggcactgttcgcatcgcaacagaagctctcttccaaggcgcaagggtagtgcgtagtagaggccatgttgcggggcttggctttagagatggtacgtttactagtgcgaaccaatattccgcttgctaacccactagataccttcattacatctcaacttattcttgtatcgccgactgcgtgctcactactgggaacaatgg

SEQ ID NO: 4517 - DNA, 2360 bp, Emericella nidulans
gcgcttagtttgtagagttataaccaatgctcaatgcattacttcttggatcaaactcctgggttgagctgcctggcatttctggatggcacagatatccctgacagtttaaataattctacctcccttttttgataatgatttttcaggcctattccatgcagatgatggccccttctatgatttctctgtccctgatgacttgctggatatgtctggctgtgttaatgatctttttaacagtccttccttcaggacagagccaaattcaggctggagttgtctgattatatagtagcctattatagaccatgatcattgatatgatctattctattgagtgtgttcttttgtctaggcctgtgcttaccagactgttcataataagaatactttgactaataattcaacagtttaatttagtagtcttgattaagtgcatgtcttcaagagctcgtagtattttgcttggaatataagaatataagttactgtcacattactgatcaagtaagaggcaaataatgcgtgattgatgttgtatagaagttgcttgaaagtggagggaaggagatcttcataacagccaaaggctttaaagacttagagtgaaagaagggaggcaaaaatagctctcaaggaatttgagtatgatttgaacaaggatgagcactagctcagcatgatgtgtaggcgtcaaagagcctacgagcgcgggcggtggcaatagatctcctgttggccatgcgactacttacacatgatttcaagactaccgactgttagcaggatgcgcaaaacggcgtcaaggctagctgtttttggctgctggatacctgtttcatcattatatggagttaagtgtgggcgcccctcattgtggggagaggagacgggacgtatatgtacgatcgtgggaactgcccatcacccacaatgtatgcaatagctgccactgccgttcccacagccgagttggctgatgatctggctcagcattaaggtaggtaccccgagaacccctgaaaactctgtgagaacccgaaatagagtaggcaatgtgttcaggggtgcggcttctgcacggagaccacaggtagaactctatggctagtcggattcagctgcgccgttcctcagtcctagtctgaggcatcagttgccggttcagaaataagcggtcttcgggccccaggggcctacggagttacagattttctgctgcgatggctactgatagacattcctggttcaatctctgcgtccagatggcactgtgaactgtcgcggtcagatgagaaagttgctaccgtagccactggtgacggtgcaattgataggtacgtcgggattcacagtatcttgttgtgttatggcattcaactagcgtcatacttcaccagaggcgagccagcgcacccggttcattccttatccgcaggaagattatctgtggctgtggatagcctaggaggcttagatctgcatgggtggtctgtggatcatattatcacctgtgaagtaatgagaggtcgaggtagggctcggatcatctagctagggccttggggtcatatcattcgctaaatgatagccactaccaatctgagcaccgctggatgccaagggatcaggacagatgccagcaatttagaaaattcctgtcaaagcagtactctcacttcagctattcattgcctcagctacttccctactctcaaagcaaagcttggttcgtggtttagagttttgatatgccgcaaataatctccagagcgttcctcactggggctttgacaccggtgtactccctggagccgaacgaagaagctgttcctatcatctctgttcgcaatgagcttggaatctttgagctgaccgaacccgatactccagaggtatcctccgtatgcgacgtaggacgcgaagagcttccaagtatagcacccaagccacaagatgtggaccggtggatcataaagctgtgagcacaggcttatgtacctggcgagggccatagatgggacaaatccaccttaccgagccaaccagatttctcagcgaagcaatactgaggattcgctagccctatttagattgtgtagcccgggctcctgagacattgatgcactagatcagagtggtacctacttttgaactaaatttggacagttgagtgttccagattgcctttgcatctgaacgaatggatttaatattctattgataggaaataggtcccaggtacttattaactagtctcaggaaacatataaagatcattcaggtggtacgatgatctcgaacagaataccatcgagatcctcaatcatcagctcaaccatttcattaaaacacca

SEQ ID NO: 4518 - DNA, 1148 bp, Emericella nidulans
cgatcactgtgtctagccgatgacgcgtaatcgccgttgtgaactcgcccctctccgccaaccctgggtactggcggtagacgtacggggcaaggaaattcgtcatgaaatttccgggccggatgatggtatagtatttgaatcctgcaatgcgcaccgcttcttcaacttgtttcttgctaagaacgatcttcgccacgaagctggtcgggtcccagtatttgcggcgttcggcgttcgtgacgagcccgctgctgtagacgacctggtggacaccgacttctttcgcgatttgtaggattcggttcgcctgagcaagttcttgggcgatctcggtcagattcggcatcagattgaggaagagtgctgtgcagccggtcatggcggtgcggagggagtcttcgtcattgaagttgccctcgaagagcattaccccgccggcttggagggccttgctctgctcagaggagggatcgcgggttataccgtggatcttggtggtcggctggtgtttttggatgctggagattatggcactgccttgagtgcctgttgcgccacagacaaagatggtgggagaagacattctggagggtcgtattctgaagcggaggcggctcagcattgaagatttggttgaattgttgaatatggaagatgctctgaagatactctgtagatactgaggatcctctggtgcggtcttgagaggttcttataccctttccccagcgctgtgttgagtacgactcaatacagccttgtgacgagactgcggaattccgctgccttcaccccagcccgcccactttcacttccactctccccaacccatcttcatcttcatccattcgcttcaacttcattcatgcgatgatctagctcgacgctgtacagcgacaatgttctgtctgttgacactttggctggtcttttcctctacaatgcccgtcgttgccttgctgtcatcgcctagtgttcaagactcgactgtcttggtgttatacagttccaagtgtttcccaggtaatatgtgacatcgaaatatatggttattaggacatacagacctaaaatcgtgcagagctgatcccctttgtctaggaaccggtcctgtccagataacacagtggtagttcttagcgtgc

SEQ ID NO: 4519 - DNA, 3095 bp, Emericella nidulans
aattagctatattaaaaagatcactaatctccttctcttatgctgatttagtagcagaattataagttctaactctaggcatgattagcaggatcactttaagacttgttatatagcataccttgtatttaggttgtttggtttccacagcttgagactggacattgatagtaagttgggtttctccagtaacggagacttctggccgggtttggggtgtgccgccccgcaatgagctacctctctcatacctttaacttgattccagctgtcataaccaattttggattggggagctgcactgcggaactagaactgcggaagggagtggatatggcgtctatcctgcgaactctaaggagtaacctccagcgaacgcgactgtctttcagagaccgctctactgttgcgcatatcgccagagaaagcccaatcgaggaagaaacgttaccacattacaaagcatcgcatttctatccggtaaagatcggtgatgtgtatcacaccagatacgaagtcgtagggaagcttgggtatggggcatattcaaccagctggctctgccgggatctccagtgcgccaccccagttcaatcgattctaagaagagctttgacaagtcgtgagttaagagcacagaaatacgcggcaatgaaggtgtcagcctctttgccagactatccaactgcgacggatcgcgaattcaaagtctataaacacctagcaacagttgactcttctcatctgggccagtccttaatccgcgagctctatgattcattcgacctccagggtcctggaggcagcacgcatcgttgccttgtattgcagccgatgactatgacactcctcgagatgatgagaatgaacccgcggccgttcgacctgcctctgctgaaaatgaccgtcaagcggcttttactggcgcttgatttcttacacgcgaaagccggggtgattcataccggtaggacgcgcgctacttaagtgatgaatccaggactgattccgcaagatctaaagaccgataatttgatgctcagcctagatgatacctccatgctagcggattttgcaaccgcggagtctgaaaatcccagtcctcggaaggtgattgataagtcacgtattatttattgcagccgaaggtttcgaagacctacgggacgcaggaactacggccttcctgttctatgtgactttggtgaggcaaggataggcaaaacgcaggagtcggggcctttcgtccaaccgcacatataccgagcgccggaagtcatcttcgaaatgccctggggaagcgctatcgatatctggaaccttgccggccttgtaagtcaatgctacgagcattcgtgctactgccttgcttagctgacaacccatcagatctgggatctgtttgaaggacagcatctatttggagatatattcgactccagaggtggccatgacccgttcaggcatctagcgcttatggtagccttgattgggcccccgtctactgaattcgtgcggcgtagcgagacgacggtgcagtgttttgacttgaacggttagagcctgttgtcagtagacactttttgcaccgattttgagactgattagttgcaggtgactggattgctcatcaaggagcgcctgttccctctgtttcgcttgaaagcctagaaacacggcttactggcgaggagaaagggcaatttctggcattcattaaatcgatgttgaaatggatgccagaggagcgcaagacagccaaacagctgcttgaacatccgttcttgctctagccgccaattatttttctggactacgtctaagatcgtttcatagctgtttggccaaagttttagcctccagttcttccagatgggaatatactgcacaaattgtttactgcgactaagcgccagggcctcttctgcctctaaggaaccatcaggatgacaattgtccttaacccccagcgcaaagtaggagcggcgctaacggtcaaaatagactatttaaacacgatcatgtcgcgcacagtcctgatcatagcgaaatgggcaaacttgcgagtcttgtcggtgggatccttgctcatagccactgttgctgccatttactggtcttcgatctagacgagagaacccagtgtctagctcagacatctttgtgttcctttcgctcccgactgaacacccgattgtgtatttaccgcggggcggtgcgaatactagaagccctggaaattgaacggacaagaggggatagcagggagggtagccaggtcggaggcctataacgaaaacacaaaaaggataaatgcgcaaaatttctgtgcaacaagcgatttggaatgatagaaaggattaagaactaatagaggccaggaacaggctcacccacttatgcatattacccacctttgcataagcgcgggcaaatcctatcctttctccatgactactccacaaaggatgacctacattgtgatcgtatacgaaaagaatcatttactaatgccaaatgtcaaggatctcaacctagaagacgcttcattgtcactgcagcagttcgtgtttacgcgaactttgtatgataaaactgctattattatcgagcttccggcgtacacgtgctgaggaaatttgagtgataatgatccagtcaggattaaactgtgaccaaatggatttcttcactcattgtactagaccatcccagaacaactcaatgcgatcccggaagcatctgtccaatccgctgacggtcccgctgcaccatttcttggaggaactatcataccagttttattcattgccgcccaatttccggtgcagttgctttcaacagacagcagacatagaagcgaataagatagaacttccattatattcaagggtttaagcaagaaagccatgaacttcatgcgagtcgcttctggcaacgctgttgggtcgggcaagaggtcgcggttgcattcgaacgcgcatctccaaggcagcgcagcagtgattgtagtcagtatgatgatagagatagccaacaatcgatgaaggagaaagagcggtatatgtagaacagtttgttgagcttgagacggg

SEQ ID NO: 4520 - DNA, 4990 bp, Emericella nidulans
gcttgaaagagcagtgcatactgaacatccttggcacgccttgtcggaaatcttgtctgtatcactgatcggcccccctgagttgtagaccgtcgatcatgagatcagttgtatgcgtgcaaatggctccccagcattccagcagaagcacgatggtgtaactgggacggtctggagctggctggcacattcgaacatcgctcaaactgccgagaacgcatatctggcccgcgaaactggacgagctttacccttgccgtgagtccagttgagggtgatgatgttagcgggattgaaaatttcttatgtcttcttattccataagcataaatcggacaagaaaatgaccaaagcaaggatgagggggtttcgcagttcggtctcgttacacagcagataagctcttccagccatatttctccgcgttttgtgacagacggtatcgagtatggtattcccattacaatcggcggcagggttcaggttacagtgtcatcgaggcgattcttcgatcgttcttccggaaaagcggaggtgcatatgtcgaggcggcaaccgcgcgtaagcttgtgcgaagtttaaagtgctgcttttcgtctgagtagcaatcatagatttagtttggtgcagcttgcgttccatgagaacgacgattcaaaatgacccgagatgtttagcaatatagacctctttgtctgtgccctcgaccatatggatcaacccaggcgcacgggtcaaaggaatccagaggcatcaatcatacagctctaagtccaaggtatcgaagtttctattgttgctccagagataccgcatttggcacaccatgcagccgcacaggcgaccggtgcaaatccaagagacgagcgctgtcccgtgcgctgtggagattttacctccaaaatgcctcatacaaacttgccggttataatgaaagccaatatccaatcaggttttcgagatccaacatgactttcagatcacttgagatatacttgagttatctttgtagatcttcatagtggttcgtgcacacgttggcaacggtgatgatcaatggagctgggctatgaatgagatgattgaaaactttcctttgagctcagcccgggtaccgtgtgtatggtaattcggatcctggccatctccaatttagccgagctacccctctgtgagtgacaattcataacatccactgctcaaatcgttggattggcatgcagtgattgccccatccagagacgggaagaaagctgcctatccttgggcggcatacggctgctctgcaggcgctgatccatctttcgaggacaatgctggagatacctacttccatcataatatatggcgatgacggacggttcgtggactacctcgaagaattcaatcccgcctaagaccacatggcgaaagtgttactttttcaacacgtgcgagcacgcatgcatagcaatgaagtagtactgtgtgatttgaaacctcgtataagtggtgccaaccaacgagatagtggagagtcccatagctgtgaaacgtcaacattatccgacaatcaacgcttaacgcgtactgagtaggtatccagtactatggacgcaattagattggatccataggtttggctctcagctgaacacctactcagagtaaggcgccggaagaatcgattcctgaatgcgagtttgtccctcgtgctcgtatcctcaaggcttcttagttgcatgcagcgcgtaagcgaaaccaattgcgctaggctgaatgactgatattaatgtatctaccagtttctgattgctggagaacatacgaaatatagaatcgttgatcgaatgagatcgctcctggtgctgatatggtgggggaatccttgatcaatctgaagcttgtccagcgaaatgagatcccaaacaccaagattgtcggtgagtttgcgctgaccaccccactttctgtgagcgagggccgattatcggatcgcagctggcccctgaatgggctgcatgaatattgtgggggaaattactgcttcttctggatgccggtcaggacgacagatgatcatcgttggcgttgcgcgccaaagcttcgccgtcaatgctttgcatcatggactggtgtatatcagcatattctcgcacactcgcgagttgcaatgctgtagtaacgatagaatatgacccgtggaccgattgcgtggaactcaaatccgagctttctacttggttccactgtgccgtatgagttgtagagtggtattggcactcgtagttcatcatcatccgtcccgtgtggttgtttcggtagcactcgatggaggaatgagacacggcggctttgcggtcctgatgtggtttgagtgccagctctctccgctctcgtgcgtcgagtctaagtgtcgtatagtcgatgataataatactagtttcatataaggaagacaagtggtagtaactaacctccatcaaactcactacgtcatggggtaccggcttagcgggtgagctactaccggaaagagaaggtgctagacaaccaataccaagcattcttattatgttggcgctgctataagggtctgtggttaattacggaggaggggccacaacaatgtgaagcgcgtagagcgccgtgttttgaacctttggaggaagagctccgtcatcttggtgcctccagtccttggagtcacttggacggctcgctctttgatgcttggggttgaatgttgggatcctggaattggtggacgccatctcaccagggaaaaccacggcttagatcggtgtcccaggcacaattcgggccctagggtcgacagtctttggctacagtgacagaatagttcccttgactctcgttgtttcgagtcaccagcaccagtgagtatttgccctcttagtaaagagcagctgaacagaaaactcgggaaggaaaggcagccggaggcctgtcgtccctccaagtcggaactgaatgccgtggtggtaatttaattacgcgcaggtgacggcgcgaagatgccccggtgggttagggccagcccttcgcatgggggcgccgcaatgcacggatgatgatggcgaaggcgaagacgagaaacaggcaaagacggcaacagctcgtgccgccatctgagtgcgtcttcgtggggaagaacttggagacgggaaaaaaaagttcattgcctgaaatacttcgagattgctttaactcccagatggcagcttagatctgtgtaacattcaacacgagcagtcatgccgccgccaggaggacagcatgaagtatatggacttctaaaaacccgtcatcgaatgtagaaaaaaagagcgtgccttgaacagccttgctgtcgagttgggtttccttcttgggatggcctctcagcccaggagtgccgagaagatgtctgtcctaacctcaaaatccctcatagtaaaagactcggcagtgctggcagtgagtgacttggtcaggaccagccttgcccggcggttgagaccgactcctaatgaacccgactcaagaaaaaatacgtacaaagcgaggccgttctcaatcttaatactttatccctctggcagtctttgactgcttcgttcaacctcgcttttgatggaacatcaaagaggcaaaacgtcagtagccgcaggtgccaggaaccgacgatgccgctgtctgcaacccatcgggttttggctcaagcccgccatcttggtctgcggtttcggcggggttgattggacaaagcgtctgctgagtaatagatatcttccaatcaataccaagattacaggcagggttttggagaccttggtggcgatccggcgtgatgataccgtggctttgaatacagcgtcctgacgaacttaccgtaccacgatacagttaccatttataaagaataatcaaattagaaaaaacgaattttattttcgcttttggctttagctctgcagaggaatccacaccaccgaccactaacccccctccgcccgctctgcgtcccttattactttttttccgatctgctttgcattccttcttcctttctccatcgattccgatcttcttcacctgccaactcacacttcttctgtttcttcggtctcacaaggcgcgtcttcttctggcgctcctggagctgccaccctttgaagaaggcgtgaattcctcttgttcttggctgcatcgccctgtcttttccctgctacctaattctgctgcacctctcacatatttcacttataccttcacacccaccatgtctcttatattatagccctccttcgtccacctctgggcttcacattcggacgatcgttcgatcggctactgctgatcgatctttgagagctgctcttctcctattctttcattgtcgccttgcctacgccgccccgtcaccatctttaccatcccacatccaaccacgatctcatctacgattccgtctctcacctcccgatgatcgtctctcaatctcgaaaacgatggtacatctactccgcggtgatcgaccaatcttttcggtacatcacctgttgaagatgcttctctcatcaaaccagtccaagcccacggacgaaaccaccgacgtgcctgaggacatggacgagcctcctgatcatcgttacctggatacgtctgccgttatggatgatggtgtggtttatgtcaagtccccggccaaactcactgatcacaaggaatccctcctcacccgggctctgaagagcagccccgagttcggtcccaccgaccaaagtacatccactcacgaacataccttctaccattcatattcatatacaaacgccagcggcatttcgactgccgaattgaccagtgatggtggcctcacaagcccatcactatctcacaccccgagtcctccactaccttcacgcatgactagtcgggctcccgccacagccactaacggcaaggagctcggtgctggtagcggtgaatctccgtgcagggtccc

SEQ ID NO: 4521 - DNA, 3117 bp, Emericella nidulans
gctgcactcgaggctaaatgcagatggctaattctaatgttagcaaatgatacacttagttcccatgtagaacttacatcgggcatggtaagatcgttgaatgactgggtttgatcaggcggcggaggctgcacaagagtctgttgagcgggagcggatgtgggctgaggaggagcgcccgcagtggcattcccaccagacttgttaaaggattgatgatgctggggagtgattggcgtcgctggtgtaggagtcggtggctgctctgcctctgatgatggtgtagcggtcgtgttgttagccgccgccgctgcggctgcagctgcagtcttcttgtttggtcgctttaaacagttagcattgactgaaagaacgcgttgagattaatggtaggaaaagcaaaccttggctctatccttagtctctttcttcttcggcgcggacttagatgcccatagcggactcaggggagcagcatttacagcctggggggacggaggaggctagacggccggcatctggctgcaagaggatgccgaggcagcattgtactcacactctggggcgacacgactgttggtgactgaagaatcaccaatggatgcgtaacaacaggttgaccacctggctgttgttgccagcctccattcggcattcgattcgccgtgccagcctggactggttggcccatttgcgggccactaaatgccgggttggagctcggtggccgcataccgttggcgccctgcataccttcctgcatcgtcttgatgtagaattgacctgccatttcggggggtagttgcccggtgaagttcattgaagcaggagaaccacggccctgcatcattgcgtcgggagcgttcggtgaattcggaagaccagattgattcaatttgggagtgttgcgcttcatttggtcgttagggattggcgacgccccagtcctactgccctggggagaagtacccggaggcatttgacccggttgctgttggccctgctgcccaggcaagggttgaccatcggggccacgagtcatgctgtcctgctcttggcgagccatcatgagtcggcgtttgttttgctgctcaaggagcatgagttgcatttgatagtcctggagagcatggttaccatgctggccaccaggagtttgagccccaggcctaacctgcgccatttggccattcggataaaactcgccgttgttcatctgatacataccctggccgtctgacatgggaaccagatcagcctgattcggcatcacgccgggattcattaaaccattaggcatgccctggttattcattgctgagcgagagtgatgtagagccaagttttgagcatatacctggattggttttggctgtgcagccggacccgattgctgaaaagcaccaaactggttagggttcatcgcgcgcggcgtaagtccattctggatcaacatcgggttctgctggccaggcatcgcctgaccctggccacgtccgttgggtgccagttgttgcccattcatgggaccaccttcaaggcggggtcgtttcgacggggatggcgcgttctcggcggaggatggagagggcggtcggtggccgttcatatccatatcagaatgctcgcgttgcatctgcatcatctgcatctgttgactcttttgttgtagttgcgcatattgctgctgggagctataaaaaatatcagcattcggttgcccaccactggtagggctataaattgtagatatccgcgcataaaaggggtagagggcgagcacacgtacaagccaccagtgttattctgcaggacggccttctgtaagttgggagggaccattccgttcccacgcatgttgttgagccgccccatctgacccggcatcatttgttgctggtttcggaacatttgactttgttgctgctctctaatgcgcatcatattctgcggcgcagagcgttagagggtcggcaagggggtaaaattaataggatccgcgctcatacctgagtgtgttggagatattgcctcacatcggcgctgttccctttcttacgctgggaccaaaaaaactcccagaacaggctgaaccaatccaagaggaacgaagacgactgactttcgctgttgagattgggacgaggcaagtcgtcgggaatcttcagtttgtcaccgtctttactgtctgtcatcaccgcgtcgccgtcgacaccattcacttcgccctccctgcgttgacccggacttgtcttgataggaggttcagtgttgagcttgattgattcatccttgacgagggctcgtgcgcagtcatggtaaccgcgtttcaggaagtagtcataaatatatgtgttgaggttgccgatcatgacttcaggggaattgttcatactgccatcattacggggtaccatcgaaccattattgaccatctggacacctccaaccggaccaccgacaccaggattcattttggcgttccagtgactgtcaccttctcctattcggttgtcctcggcgggagcgatttagatagctgatacgcacatccacaggctggaagcaaaacagccttatagaaggcggaaatcgacgcagaagtagtagtgggaaacgataagagtagatgaatattatgagcggcgaaagagtatgcaaagtgcgccggagagttcggcgtctgcacgctcaatagcagatgtagataaatcgaaaggaagtgttctcccagcgcacgataagaagctcgtctgacaggaggcgtaaagagatattggaggtgaaggagcaagtcgctataacattggtcataggacctcagctgtagagatcaaccgcgcgagatggctgggagttgcagctggcagttagcaacacgaaagaagcagccagaaaggatcggcgttcagtgtgcacgaaaagtcaaaataagatgagcgcgtggacagctgtatcgcggggggatgataaaaaaaagatagttcaacagtaaaagacgatgctggttagagcgctcatatggagtacggaaagcgaagtgatggagcagctggaggagatcaggccagcgagagaaagaggggggcggtgggtggtagaggaggcgaccgtcaa

SEQ ID NO: 4522 - DNA, 2837 bp, Emericella nidulans
gttcattcatcgccttgtgatgtggtctgcatggcccgtctgcaccttgcccgacatcgcttcttcggcattgatattcctcgctacgaaatttagtgcgctgcggaaggaagcatacgaacactccaagttggaggagtttccgaggcgaaggatgagcgaacggcgattcttgactgttgatatacttctttcttccccagatacactattctccgctcttatatgtatcatgtattataaagaaacaggaccacgtgccgatggtttgctcggttgaatgcctagaaatgttttggaattttttaccaggatgctaagctataaccactaatattgccgcttagaggaatctctcattattataaactccctaggtggaaggtcttctaaccaaggaaatgtcatttattagcccactgcaaccctcaattcctctccaagcgatgcttatagcgctcccttgatgagaaagtgaaggttgtgagaagatcttcatgcggactgtcgtaattcaattttcatctagctcattcataatatgctgcttgaactcggttggcgtaaagcacgaacgcatactcaactctgcggtgcctcgtgccgaccctgcgtgcatcagcaaagcgaatcgatcgacatcgagaaaaaccatctcgaatagaatcgagaggagaaaataagggtagaatacaaaccagacagtcacacacgaaggccaacatcctgggctggctattcaagcctcagaatcaacctgtatcgatgctgtctgggtaagctaggtaaaccaacgcccttggcagaactgataaaacatggacccccaggcttgaacgcagaaatttccatacccgtgcaaaatccaacaccataacgaaagggtatctgatgctaacgtaaaatacatgatccacaatatagagaaatggaacgacatcaacacgtatgccatcacttaactgctagatttagctgaccgcgatgagccctttctcgcgcattatgaggtccttgtccatgtcggactgtgtcttatatccgccaagtttgagtgcttcatcattgctgatggaggatggaatgttctctaggtcaggacgaagtcgcttcagccgagcagctcggtcttttgacgcttgcttcttcttctgcagtttcgtcaatttctccttgggctcctttgtctccttggtctttctaccgcctgatgaaggctttgccgggagaggatgagtctctgacggaggcggcggcgcgggctgattcggaggcggaggactgtaaggaggtggtggcggcgtgggtggtttgcgatattgtgcgaacctggggtcgttttcgaaaacctcacgaagctgccatcgaagctctgtgtactcatcaaaattcgccgcaatgatggcacccaagatactttcgttggtcttccagatatcgcgcggaaaccagcggtccttgagtaacggaatgcatctgcgaaagactcgaagatcaacgcaatttcacgagtgccgccagatatgtcagtatctggattgttcgcgttctcaatagaaagacggggccccattgttagctttgtagaccccataaaccctctgtatttctgaatcagcggatgcgtgatgcgccaaaaacgattagatcactcactttgttgaagtagccaggagggttcatacgaatcccaacagtttcgtagtcaaaattattaccgtagaattggaaaaagtccataaggacactacccaggtttggatagaggttaccgtggggcatgtgttgcagaaggctggtaacaagacaggtaatagagaaacctcccaagccaccggtgggaacctcattgagacccctaagaagaagaaattgtttgatcaccgacacgataacaggcatcgcagggtactctgatttccattgctgaaacgtcctgtttgctatgagcccgctgtcgttatcaaatgataaatccaccttcagtcccgtcaacttatccacaaacttcagaatcggaacccgagcatgtgcaattgtttcaacggagccgggaacgcgaatattctgatttttgaggaaggcagaaaatgcatagatctgaccctttctctcgccaaacgtcttgacgccggtgcgcctgaaactagtggagaggaggacaagatcgatatcggcattgggaagatacagtccagaggcgaacgagccgaatgcatggatttccacaccataatagcgactctgaaaggcggcctggagcctcgccactagatcttgccgcacaatgtgctcgtaccttacaggttttacccagtggtaaaagctcaaaatctcatcatggagcctgcacaggttaggtcacttggttgaagtggttgagcattgaacataccttgtgcccagatgtagagttggcggcattagactcaaccaaggagttcccgtttcagaagggcgcagtttccattcatcgataatcgaaccgtcgttgtagtaccgactcaccggttttccgcccatcttggctggtccctttatctcgtcgtcatgcgttcgcttccggtttccgagtgctggatcgcctccttccaaatgacgcctgggtccctttggtgcattctctggtgctttatccgtttcgtcatcgtccaccagaccagctaaagagataaaatcctcatttgagacgacagcatccgtcttcgcaggctgcgcactaactgcaagacgggctttccgaattaatttcaccacatctatctttttgaatagactttcatccggaggcggtagtgcagtgtacggatcagggttgacctttcggcaagtttaga

SEQ ID NO: 4523 - DNA, 2643 bp, Emericella nidulans
taaagctcgaccgcaatccggtcttcttcccacttcttctgcacctgtaatggcggtagtttagccctttcagctaggacccgcgccgcggcaacagcctgccactcaaagaccttaaatgtgagtcccgcgccaacggcaccaataaagaccagggtcgggtcagactggtggaagacatgcaggtacaggtctgggacgcggttgttccttattgggatctgtgggaggaatgggagagtccatgtaaaccccgtgccgaagatgaggtggtccacgccagagacggaagtgccgtcttcaaagtggactgttcgggactcgttggtatcgtcaatatgggtgattgcgggacggagtgaaatggagggatgcttgaatgcgtggtcgccaaagtaaatgttgtatttgccgcgggtaacggcctaaatgggcgtttgggcggtgcctatgagggagacgaccgtgtcggccgccgagaccgaggcgccaattgttactaccttctgtttggttttagcttggcgatttgtgggaggagaggaatgggaggcatacctttcctttatattttcctggcctcccgatattcgttcgcatgctccacgctctcgggatactgttcggcaaactccttcagtccaggaatagacgggacataaggcacgtggtaatgccctgacgctacaaccagcgcatcaaacctctctgtccaccaatagtccattctctccttgccctcctcttccccgcccgccttcctcaaagtcaggatccattcgtccttctcctcattcttgacagcccgctcaacggtcgtattatactccactagatcttggtacccatttcgattcagcaagctctccacatagccgcatatgacttcatggtgcctgaacggcgtatcttcaccatgtaatccgatcgaccactccgagcgaactgttgggattttctcaccgggccccgagtactccatcacactagcgtcgacattcgtgtgtagattcgggtagatgtgcgagtctgtgtaacggtgcgccttaagcggcggcgtatagcatggtaaattggccgggatctcgactggcttgtcggctgtcctagcgctcaaattgtcgatgtccaacggttctgcccgttctgttttccgagataccctgcgcatgaagttagcggtagatcggcggagtactagacacaagcaaggggataacgtaccaattcccaccagccttctcttgcctctcgaagacacggataacgtcaaaagcgccctcctgcacgagtgcatcaactgcaattgcgccggaggggccggtgccgatgactgcgacgcgtttcaaaggcatggtgctgatctatgcacccttctacgctgcgcggtagatggaaatcaaaacaaaaggcacagcatttgagtgcgagtgtcaatcccgctgagccaaaccaccaagataacagtttaaaaggtgtgaatgagggcgttcagctttaaaaaggctgcacagtctgcattgcgataagctccttatctgccactgctaggcataaagttccccgcgcttggtgaaaggagcatcttgattggttatgaagtagactgtggagattatcaccatcaagtgctgagattgcatcattcggatggaaggatgcaattcagcatataaatacccatatactgactttcaggggcctctggagaatgatgagtatattgtgccatttggaagaagttagaggtgatacagagactgccatcgtccactccgtattaggtagatcatcctagcaggctagattagttcgtttccgtctaagatatgcttgttgctgttcaatcttaccgtcgttcttgggcttctcgtcatacacgacgaatggagagtatcttagacgtgcaactaccataccgggcttagagattgtggaagaaggatagttctcaatcggtgttgcggtgttacaaaatgaaactgatcagacgagagtatagttagttgtgcataatgagcttactaaccagtagttgcatcatttatgcatatcttccggggtctcagcccaaacataatcatcaaacactttacacccagtacttgaatgttggctcctcgtccaacaatgcagcatagtaacaagcacttatgtcgacggctcattctgtcccccctggataccatgggtctgccaagcttcttacgcagtcaccttctaaaagacggccgatgggtttcaaagtttccgccgcaatcaatcctcgaccgcctcccacccttcctgacagcgacacaggaattttgcccattgcggacgtttcagccaaatgccccgcggtgttctgctgactgggctaaggagccgagcctaggctctgttctgggcgtgaggtctgtttaatctcaaacagcacacgcggctctccagcttctggattcctcgaatcaactccggtgcttcccccagaacgcccggtgtatggtgtcgccatctcaaaccaaccgaggataccaggtccagaatgacgaagcctgcttttactaccgacgggccggccgagttcggtatttgatagccaaaaccctggctgtatgacctctaaggggcagtcgtctttccgcatcaaagtgggaaacg

SEQ ID NO: 4524 - DNA, 1329 bp, Emericella nidulans
tctatgatatacacatacgatttaggtggccactatagaatactaggatctccagaccctgaatatctgcacagacatggccgcctggcagttgggaacttaataccctaggtcgaatgatctgagttccgcatgagctgtcatccgatcttaagatcctatcgggagagctcctgttgattggcgtgttgattggcgttggaccggcgtgaagatgaaacagttcgagcagtcggcgggtgttgtggccagtccagccttggccctcggcgcctagttgcagtcgctccaccaccgtcagtctcagtcggtctcagtcctgtatatcctcactggatctcctccagtcctccaccgcgctctcctttcttctcaaacattccgctctttctttcattgcttagccttatccatttggtcggctggtcctgcttgcttcattatcccttgtctagattttcagaaacacaatcgctgcattgtctgcttcatccttctttctctcgcctgcgacgctggcgtccttttgctcagttgtaggataactgccaatctctaccaaacaaggaatgccaattgacttgccgatctctattgtttacgatacccctttttgcattgtgtttgaactggcgatctctgatgtttatgcagatcatctacctacatcgcaatcacattacaccacgctttactgcggccaagacagcttccaatccaactccacaattttgtctttgaccgaagtccttcgtctttcttggttccttaccagattcccggggctccggcgtctaagggtgacagctcgacaacattcctcccgttcccccctgccaccaggaatctgcgtcatactagccggcgctctgacttaactggcggtaccgactatcgttcactgtccttttcaacgatctgtttgcgtcgatagacttgacggctgttgtatagatattttgcatttgattccaatggaacaccttccgggacatctcgtccccaggggtaactacagcacaaacgagacctatgtctacgcgtactcacggggtctgcccggagtcaacggtccttcgagatgttctattcacgcgaataatccctgtttctggcatcagagttgcattatcctcttttgcgggcggatgaccagttaacacgcctccttcggcatatttctccttacagcaggaggcggagcaacattttgagcttgaagactacgtttggcaacattagaacaccgcttatcccaatggtggaagcctaacggagatagttttctgttcaacgggcccctcgtagatcaccaccggtgggttactc

SEQ ID NO: 4525 - DNA, 2781 bp, Emericella nidulans
ttgggagacgagttgggtgccgagaaatgagcatccttcgatcccgaaagagatggtggacgagtttgcgagaccggcaacgaaaggtatttccttgggattggcagatggggcgtttgcatacagggggtttggaatggcaacctggatggattcgcatttgagggcgcggaggaatttctaggccgtatctggaaaggaaaggattagaggacagaggaggctggatgaaaaaggctgatggacgatgatgaggatgaggtttcaagtagagatgttgaagagatgcgggctaagggggcaaaggagagtatggtgtatctatctggctagcatgagaatgcgagggttaacttttggtgctattaaatactttgtgtgatacggtagagagggcatgctcgagggataagatatcttttgagattccattcatcccagtggaaagaaagtattatgagctggtgagagttatacgtaaatcgcagtggcatatttggacttgctggttttctagggctaggctatatgggtgtagccctaagttggagcgccgagcgttcggccgaatttggcatttgtcagcgttggccctgagctcttcctcacgtgacacgtccacgggcttcttctcgtgcttcccatcaccttgcaagatccagccatcatgctcgacgaagatatccatctccccaaacggagaaaagtccgtaaaggcacccagagctgctgggaatgcaagcgacgcaaagtacgatgtatgttctcttcggccggacacgccatctgcaacaactgccggcgccgggggacggcatgtgttagtcaagagctgcctgacaccacaggcacatcttcggggcagagccaggtcgaggcgagacttagccttgttgaagagctcatcgaacgattggtcgatgctcgcgcgaccccgagcctggaaagagacgggccagatgcgggatcgccggtgtatagagcagtcccctcaagaccgccaacgacaacgagaccgctaccggttggaccgggccccgaccagtacgaggagctatctcgtgacttgctcgatgtgtggcccagtcgagacgatctcgagaccatcagctctctccccgtcggtctcctttgcctaccgctctgttggagaacgtgcgctctgcccggcgaccagtcgccccgggagatgcttaagctgccagcatcaggcgctcatcctgtgcttattgcacagagactgctgaggcttggtatattcctgcagggcgtccctccggcagctattaagcagctgggtgaccgtggagtctcgtaccgtgagaccatgacccgctccgttgagcgagcaatcgcactggtcacgaccaacgacgaactcattacctccgtcgaggggctcgagtgtatcatgatggaggtcatgtaccagaactatgctgggaacctgcgccgggcgtggatggccgtcaagcgcgcaatatcggccgcgcagataatgggcttccatcgcgcccaagacctgcctgcctcccgattcctggacccagccacgcgcgccgcctttgacgccgacaatatctgcttccgtctcgtgcagatggaccactatctctctctcatgctcgggctaccgcaaacggcacccgaaggccgcttcgcaatccccacagacctgccagatctcgatccgcaggaccgtcttgaacgccttcactgcacggtctccggccgcatcgtgcagcgcaacgacgcgggcatcaatgacctctccatcacctgtgaggccgacaagcttttgcagaccgccgctgccgagatgcctccgcagtggtggctaccgccaaccttcagcgaagattcgaacctcgttgcggatactatccggctgatgatccaattcacccaccaccacctccttgcccggcttcatcttccgtacatgctccgctcgtccacttcgacagaccacaatcacgaccgcagccgaaccatagccgtcaatgccagccgcgagctcctatcccgttacatcctcttccgcagcagaaacccggctgattactactgtcgcggctgcgattttctagcctttgtcgcgacgaccatcatgtgccttgcgcatatcaacacgaacacccactccaactccaataatacgaacccttttgacccgctcacgcacagccgtcccacggatcggggcctaatggagcgcactgccgagattatcgcctccacagccgcagccgagtacggcgtctccgaagcgatagcacctaaactgaatcgcattatccggcacctgctcgacgtagaatcgaatgccgcgaatgggacgatatatagcacaagtacgagctcgagtgcggcggacggcgatgagggagagattggtggggctctgagccagggtggaaagtcactgcagattcgcattccgtatttcgggacgattaggcttgagcgagggcacgggagtattctaaagggttcggaggttgaagtacagggtcaaggaacggctgcgggcagctatggaatggccagtgcacatgcagaagttccagtcagcagcagttggggagtggaccatgatattcgaacaagccactcgcaagttcctatatctaatgagtctgggggaattgaatctcaactagactcaatgtactcgggcgcggaagacgattggaatctccagggcattgacgtagccctgttcgatagtctcttccgcgggattgggatcccagatgcagacacgaacggagaagcatg

SEQ ID NO: 4526 - DNA, 2280 bp, Emericella nidulans
tagtgagagacaaagcgcatttgctgtagtttaacccacatcgatgtagtaagtgggaaaagacagagttccctgagtacatttcatagcaaacataagaagtcggtcaagtcatgtaacatacttcttttgtgtcagcgatccatctgatttgggtcaccgccgttggtccataggactttggagtaaatcatctattatgtatcctccgcctctgtctccagagatacaaacgattggtcagtttaacaggtcgtatccattttggccccatctgaacctgaccgagcctctccatcgtgcgttaccattctagtaggaccatcaacaataagttaccgctgaaagaaaaaaaaaaaaaatttttcaatgtcagcctccttctttacttagaaccttcactgtcgagaatggcgattgtctcagtagaagttactagttcagccgacaaacgctttctactctgcgaagaactccttgagatggttagaccggggagtaaagcggcagatctgaaaactagccctttgccttgaacacaattcttatccttcctggtgacgagttgaggcaccacgatgttacgttgttcctcacaggcttctcagacatcaaaggtatcagtcaaacctcgacacatgggtacatgggtatatgttgagggcatacaataattaaaccatggctgtatttccagtatatgctggcaatttccattgaccggacgtgctttaatatgcatgcactgtttgaaaggcacttatggtcgaactgactgcaatgcgaatgttactactactacagctaatatgtatatttgatgttaatcatgtcactacttttcaaatgatttatgagcagactcataattgttcgaccaccttggacctctttgacgaaacgacgggctatgctgactattccaactcgaatgacaggaagctcgtatttggtcgttgtgtttctgcctgaaatctaagccataattaccttttagacttgtatacacctgtgtgtccacttgccatacctgccacttgctgtattctatcattgctttgttaagtgggaggtcaggacagcaattcctccaatgatactgcgggcttggtacgacaataagggcggagaccggccgatgcgttgatggctagcccgcggagacagtgttggaaaaaaatttgatattataacggacaaatcgactgggctgaggatgattaggagttttcattcctattcaagccattgttactcttctaagagttgtctcgagtctcattacatatgtcttcataggtctcaaagccaagtcccttttatcataagatataataagacgcttttagataatgtgtccgaagcttgtaatatttcatccaacaggaacctaatttcgagcctgggtctcttgctattgcctttgcctggtagactgctccacgttattagctgatgccacagcagtgacattatcgtgccgaacctgcttgttctgggatactctacggggtccaacgtcctcaagctttcgtttgaagtctttgtcagagcacacttgaggctaacaccacgtcccgttctctcatccttgaaggtgtccggtggtcctttgaggtgaccttccactcaatcaggtagtgaatgcagatctgaccatcgtacacattcatacaatacaaatattaacagatcatgtttctctgccactatataagggctagcatcctggcagtgcctttgaaatacggtagtagtatttcagactggattccagagtgtgaagctgatttcacaatcaactgtatagcgcatctaggtcgattgtttcccagcctcgtttttcttattagatccacggactctcagaacccgtaagacagaagacaatgaacaaccagtattcgtcgcatatattgatattaccaaccccaagaaaagtctaaatcggataacaaccctattttagatcggatgaaatggatagagtctatgtaggcaaccaaaagaggacaaataaggaattaaatgaagtcaaatcatgaagggcgtgcatgaaggttaaagagaaactaatccgtccgcgagttggcgatgctcaaaaccaagatatccgtcgcgccaaccttggtcaactcatccatcactgtcgcaatctgctttttctcgaccatagagctaacggccacccagccgtcctcctccagcgccgttacagttggtgcgcgcttgcccggtgtgatactgctggcggtcgagaggctgtcgcgggggatattg

SEQ ID NO: 4527 - DNA, 1900 bp, Emericella nidulans
ttaatccggagagagccgttgagttttccggaggcggattctcggatcagatttgcgcgcccatcatatcaggattccagtgttcttggttttttgaagacacttggtggcaagtgggatggattatacaatccccagggaagaggaatccccgacgtcgccgcgcaggccaacaactatattatcatcgaccatggcaaaacatatcacattggaggcaccaggtacgtagctttgatctgatcagatctctgtactaactgatagaccagcgcctctgcgcctgtctttgcagctattgtatcacggttgaacgcggccagattagaggacggcaagcccagattgggttttctcaacccgtggctttattctttgaatcaaaccggatttaccgatatcgtggatggcagatctgtaggttgtctgggggccccaggggtcgaaaacctttatgctagctggaacgcaacgcctggctgggatcccgtcacgggcctaggcactccgttctataatacgctggtgaaagtggcaagagagttgtgattgtgatctccatttttgtatgcgctgtactatactcaggatcgtggaccccagtcttgtgattttaaaaattcatgtacatttgtgcttacctcaagatggatgatcacccagatgaaatataccaacacggatgcttttttgacctcgccagcaccaagtagaaggcgattccgtcgagcacgtgcagcacgtgctatgttgactcgctgtcttaccatgtgaaactcttcgcaacaaaacgcctaaacttcgattccaggaacggccgttcagggcatccaagatcatttccgattcgttagatgaccaattctctgtcgtttaatcagaaccttgtccacgcaagcaaagtgctgtagcaggaaagaatgctccaacaaagactagcctcgacctgcctgtgtttcaatgaagaccaggcccggaagttcggcgtgggcgaaggcaattagtgcgggtacgtacgtacaggtcacactgtcactgagtgtcaattgcacggtacccgatctgattcttgcagccgttaagtcgccagtccagtgttggaggcctgccggtgcctctgtgcactcgaactcatagtcctcgaaccgccgaacccattacatcaagctaagcgtcgaaagaaagtccggcttgttcttggcgatcttgtcttcgacggtcaatgccaagccaagcccgttttcgccccatacctgtcaaccaatcgatccaagcgtcatctgcggatcgcacagggcttacgaagcggctccaaccgcggcctagcactctgattccctagaactttgatgcgcggcaaggctggtccaaacctccgactcacgaaattagttcaggctggtttgcatcacataatgcataggcatgaattatgccgctgagtcgcgaaggcgtgagggttttttaggcttcaagagtgattgtgagaatgctgagccgtgggcattgagactctacgatactgtcttcgggttagacggatttgctctaacttttggaagcctactccgtatacagacccaaaaaccaagcggggcttgactcacagagcgcctatgatgtacgggtgtcaccctccttggcccctttgctcccgaccacggatcgtccgatctacctacccatgttagtgaatcaactcatcacatcaccatcagccaacaatgatatcttcggcctttattcttaaataatattttccgacccacggcgctgtgacgcggtcaacgtgatgagctcaacatcaccgttctctgttgctgtcgcttctaggtccatttcaatgtccgtcccgtgcgcttgaagcaaccttatcccttgcgatggctccggaaggcag

SEQ ID NO: 4528 - DNA, 2028 bp, Emericella nidulans
atacatcgtctctcatggttctgccgcctcgcaaggcagatgcagtgggctccgcttgctactccgactttgaagctgcgtcaattggcctgacggaacttttcttggttcgtcaagcatacgcaataaatcgaaaagctgaccgctacacacctttcattcctgttcgcgactatgtaattatttggtatcagccttatgatggaggatttcagagcggatgggaccaaacgcacagtccaatcatgtagttatgattatgttcattgtcaccatatcaataatttaagcaaagttcttgatgctgggtcatgtgtaaacattaaccaacacaaggagcatcctacggggtgtctattccgactaactttctcggtaccaatattatggaaattagaactcataatattctgctcaataatactagtcacaagacccacggacgtcggacgattaccgttctgattgaaatagtacgcccacatagttcgatccacttgacccctagggaggggacactaatacagagagcggaggtagatcctttcttcgcgtcttctagaagcattctggtttcggagtgcaatgttgctttttttgtcctgcgctatgatagtagtaagctgttatggggtgcctacgtgtgtagcacggggcggactaggctagactaaatctacgccgttaatgagctgatgatgatcatcatcattcgcatggccggatcgacaccggccgtgtctgtgtatctgtgatttacggaggatattcagctaccttcccgtagcgggtctgcctgatgtatgacgggtgatggtcaaacggagagagtgagatagaggatgtttggttatgggttccagattcacaggctgtttcaaggcggctttatgacgcttatgaactcctgcgtaagggtgtaacaatgttaggatctggcctatcctcttgttgacattgtggtacttacctaggtctgtatgcaggagtgatctcatggcaagtggtggagcaaagccgtacggagtgctgggaaacctgcattgttgcgattttccgccatcatcttgtttcaaaggatccccaattgtcccaggcatgctggtataacggtacgcaagggatgtagttggtacctcgtgccaagcagtaacctaataatcagtttgtacacacaaatgagccaatggtctcgtatagagttacgtataacaacgcccaggcggaggtggtgacaaccgggtctcgacgagtgaccatcgttgcttagactggggatatgcttgcagagcagaccactcagtgagcagaccgagagaacttcggttgggaagggtatgcacagggcggtggaacgctcctagtccagatcggatgtgaagggcttcgagaagctccatgacaagccgaccgttcaaacctggggaggccgcggtgtaactgccgtcttcggatcacaatgcgtacgcactaccacttagtcaatcctgctaattcatggatgatgcggctagggatacacggcgcaagcgccctcatcacatcgtcatcagccacgatcgagacccctgaagtcctttttccggttccagcatcactctgtcgcaatgcgggagtggatcaaatgctattattaatagtcctgagttgggtgagttaaaactgctgaagtctgtggcctggagcggctgagccggagcaaaacttggcctcccgatctaacctgaaatgcccaatgcatgggtcgtggggcagatccttgaaccaccgattggcttcaacacgggcctctgcagaaggagtttcctaatgctgaatgatgtatggatccagggaggcaggattaggaaaagggggagggtgtcgtgaattaccgcagttgcaacagaccagacactatcccacggacttgtgcttgctgctgtgacaccagcgtgccagctggccattctcgttggacaggcaggctcctctcgcccaattgccgccctaacggctggggccggagtggctcagtgccaatgccac

SEQ ID NO: 4529 - DNA, 1530 bp, Emericella nidulans
gaaaataatggaggaagaggaaaagaaccaataaataagtataacacgaaaatatggagattaaaaatggagatataatatgaaaagatatcttataaaccagaaagtaaatagagaaaaacaaggtaagaacagaaaatagaaagatttttaccttggaggatgtaaaaccccttctaaaaatccaagggccgcctaggtcccagaaacaccggttttaacgatacccaccttgaaaaagttggggatttggcttccctgaccgaaaatgaaaacctcgcctttaggaatttctgggtccccatcgataaggtcttcgatctggtaaccggggtaatgtcatatctgcgggtgcccgccatcgaatcgtgtgctatttatgaacactggaattgacatttgcccaaggaattaccgcaagttcccaaatcgcttcccgattggctggtccctgaatccaaagcacacctcgtccaagctactcgtgctctaagtggaggccaggagcagttcgagcgtatagaggataaagatagcacgcccgggctgaaagacggtttcgactggtacatgagccctgaggataaggccaagtacgaggagatatactccgccaataagaaccagcgcggtgaaatagcctgtacgtttgtcgctacggcttgggattctggcatgcgctaacttgcaattctctctgtgtccagttggatccctagaacccccccactgaatctcttgatgtcccagataccgatatccgctcagcctggaacctagtaaacccatccgcggcccccgaaatcaataaggatgccacacttgcctttctccatatcctcaactaccgccacgagggctaccgtatcccccgcacaatccccgcttctttgcgcgcatctttcgaaaataacaagatagactaccagcttgatagcgcgcggccagcgcaaaaatggggcacaaatggcgatacggagacttcgacgggccgcaaggctaaattcggtgatacgtacctgagtcgcctcggcgttgcgggcaagacatcctacacgcccaaggggacggatttcagcgacacgattcaggatgaggagtgggagaaggtgcggctgcgacgcgaactggcagagttagatgccaagctgcaggctgcgaataaggctgttgagggacggaaagctggtaaccggaacgacgggcggccgaactgggttctcattaagaaagaggctcttcagcttctggagtataaggaacgtgagctgcgtgaattgcgcgagggcagtgggcgggccaaagccggcggggatgtcgagcgtcttcgtgaagatgtccgcacagtgggcgagcaggtcgatggtttgaagaaccatctcatccagcgaaaaggtgtgcttgaggacttgcgaagagaaattgaagacgagcgggcgtctcggtagtctcatatataaacacgtcttccttcttgtacctatcctggcggtctaatcatgcatgcggatgtaagcaaatgggagaggt

SEQ ID NO: 4530 - DNA, 4955 bp, Emericella nidulans
gccccccagaagccagttaaggtatcatcctcgtctgaagagacgtcggaagaagaaagctcctctgaagaatcttcgtcttctgattctgagtctgaatctgcctctgagggcgaaggcaagacaaataatcccgcttcttctgtcaaacactcaactgtctcagcgtcacaaaaaacccaaatccacacccccttcggcccaacggactctcaattctccggctccgctttcgcagacgactcagtctcaggcacaagctcagccgcagtctagcgactggcgctggcccagaagctcgcaaactggggtcacccgcctttcgcttaagagcataaagggcgaagtggcaagccaggcgcaggcgcaagctgctgcgaaagcctctgccactggcaagcgcggtgcaaacgctcatccacgtagaggtgtcttctcgccccctgacagcgactcggaagagacagagagtgagagtgagagtgaaagtgagagcgagagcgagagcgagcgtagcagtagcagtaacagcgagggcggaagtggcagtgacagtgacaaaggaagggtgaagaagcgcagtccgagtcctcctagtgttgcggatcaggagatattatgtccagtggacagattcgaaaatgtcggactgcgcgtactgggggtcgtgcttaatcgctggatctacacccggtttgtagctactggatatgtcgggaagttaattttgactgcatgaatcaagaaattttcaaagcataggatcctgttggagtaagtgagattcccaagttaccttttctatttagggctaaccaaggatgtgaataagttcgagatgtctcgtccacgtgtagtattataggacaacaagtagcgtcttatggctgaaccatgaaagcacttttagtaccaattggatgcagtacaaatcatgcgacaggcttgagggacctcaatacccgcctcctccttctcatcagcagcgcccacccactccgccggcggagccttgacaacgcgattccatcccaaggtctcttcaatcttcccgagctggatccccttcaacgtcctcagaagctaaacacagacctctccgcctcctgcctcctccccgccacactcatattcaaacctattcccactagatcgcctcgtgatactccgaataggcaccaatgccgccgtcgtaccagcagccatcacctcgtcaaactcattcaactcttcatagggaatcctccgcttctcaacatcatatccgaaccaaagtttcccgatctcgcagaccgatgccgcagtcacactgtcaataacattagggctatccggctggaccagcgtaaccttcccagactccttattcttcttaacagcgatcatgccgctcgtcgaaaactcatctatttccgaacgcgtccggctatctagatgcagtgtaatcccgaacccctcggcatgagctttcgcactgtgtctcagaacaggcgcatagtttccgccaacttttgcactccctgttccctcgggtgctgcacggtcgaaatcctccagtattaatgcgtcaactgcatgcacgccgtggtatacaccagtcggcatgacaaagactacaaaggtatactcttccggcggggagaggcctaattgcgctgaagacccaaagataagcggacggatgtacatcgcggcccctgtttcatgaggaggaacgaatcccgcgttcgccccaacggccaattcgacggcttccagaaagagatcttccgggacaggtgggattgatataaacgaagcagagcgctgcatgcgcagagcattgcggtccggccggaaaattgtgatcttgctgttattggggtgtcggaaagccttgaggccttcgtacgcttgttggccgtagttcaaccctggagccatcccgtggatcggaaggtagggggatttgactagtttggggggtgaccaggatttcgtggctggggtatagtgggattcgacatggccgttaactattgcagaaagagggttaactggtgtttgtgtggttgaagggtgcatagacggtaaagaggggtagtaccttcgcgaactttaaagccgatattgctccagtcgatagtgtcgacgggaggaggagggaatgattgagatgccattgtgtcaatttgagggaggttgagttatggaatatgaggatgatagtgagaggaaagaagggagctggaagaagaggaggggtataggttggaatgtgacgccgaagtcggccttatgaaagatgctgtcagagctgagtcaggccacaacgatgatgatttttataatctagaaccatgtacgtgctaaaacatatatcgtacaagtattatcaagggacaaggaaatatcccaagtggaatctagatcttgtagtgctccatactgtggggaaatatatggatgtggattccccaatgtctccggtagggcgtgtggtccgtgggtgtgtctggtcctgtgatcggggatcttgggacctcccatgatacctcaggtactccatcagatccaaaattctctgtcttctcccattccgctgcaatttcggagtcctttcgtctcttgagcttccattaagaagtctacggactcagagcagctcaacaatagcctctgctattatgacgcagctccctcaggtgagggatgaattccaaagcacattatgccgcaattttagagcgcattgacgtatccctactcaggaatcgcatagtttccgttcttttttcttgattcctcactatggaggaaaagagatgtttcatcctgcatcaaccggcgcaggcctcttcaaaacatgcgtctctagtccgtggatctcgttcctaagcaggcagattccatggagctggttgtcacaagctgaagacgagggtatcgtctcaaaggggcccgatgctgctgaagatccaccttgggcaatctggaccaaccgtcccaagaccgcgtattccagcttcagcttgatgctataggcgacgggcttaaacatcacttgtacagcatagaagccagcatattcaacgatgacgacaacgaaatcgatgataagtacgacgacgttcatcgcgagcaattgtgcgaggatccggtgatggcgacgctctggacgcaatcgcagcagcttggcagtctcccagacatatattcctgagaggattgcctcttgaatacagaatccgaccagttggatccgttccgcaatgccataccctacactgaaggtatgtgctatgctttcattgggggaaacggtaccgtaaagcaggacggtggtggggacgtgcaggatgatcgcatcgacaattataaggactaggaggccgttcagcagccgcgtgttatggacaacaaagttcaaccgcgaccagagaacgagcgagtggccggtgacggtcccgtaccaaccgagaacgacgaaggttatggcagcgaagcgcgagatatcagggcgaaagaatagcaggatgtatccgctggtattcggtatcaggctggtcgacgcgataacaagacaccagaagtagaaactgccacgccgtttgaaagttgctaggcagaggactatcaactctatggcgttgtagtagatgaggcttgcgaagcaggcgaggacaacggtgacaatggaatcatgattaaggccgccaatgccggggggcgagagttccggtgacatgggcagacaatgacattcttcaatcaagcattgaggaactgggcaaggataaaggtgatgatctgctttttatctgctgtcctgtactcctgtctcgtgggctttggcatgttgatgagcaccttcgcccccagtgatcggcgaccctgagccactgcaaccacactattggatctagatcggcccgcaagccaaccacaaggacatctagagagcagattgcgtggagctggggttttgcttacccgtaagaaatcaggaacagcatcggggtccatccggacaaatactgtctcttttcccgaatgcgtcacacttatgactccaggggtctgtgatctgtggatctacatactcagtacgcacgttgttgaacaacactaattactcgattgcaatgaaacaataccttcgtctaggtaattgtgaacaatggaggaacttcgaagatatgtacaagagaaaatcattatttacaagtcctgacgtcagagccacacggtcccgatcgatcgattgcagaataggtacataatcaatttccgcgcccaatttctgccagctagcacagccaaggaacaaataaacttcgcaagcttggaacatgcggcagaagcgcaaactctccaatggcgctgatgagcgataccaccccaatgcccaacaaacggcagatttcggcatcgtgctgcgcgacttttatccgccagaaatgagcaacgcgcggtgcgaagcttacaacagcggaatcctggagcggccgattgaatcatggcaaaaagcatacacagagacgagcgctcagcagaatgcgatgaccgcgaacgcggcagtggtgcattggttcaaatccgatctacgtctacacgacaatcgcgctctgcagatggcgtatagggttgcgcgggagcacaagatccccctcattgggctttatattctctccccagaggacttgactgctcacctgtcaagtccggcgcgcgtggatttaacactgcgcactttggagcagctcaaacgcgatttgggggaactcgatgtccctttatatatggagacacaggcatgtcgaaaggacattccgcgccgcatcatcaatctctgtcaagaatggggcgcgaaccacctcttcgccaatctcgaatacgaagttgatgagctccggcgcgaggcaaagcttattcgactctgcgcggagaacgggatccgattcgagactgcgcac

SEQ ID NO: 4531 - DNA, 3378 bp, Emericella nidulans
ctcagcataccacgatatatactctacatctaagatattcttttccattaatatgcccttgatgttgtcggcgaccaggcgttgcatgataggcattggaataaatcgtccccctctgtcgctggtataaattcgcgaatccttgaggccctgctgaagcctcttcaaggccccgggagagtcgttgttctcctgaatgaaatcagaatttcttccatcatcatttggcggcggaaggtcactggcgttaagtggagtggtagcagcttgagtatcaggcagaccaaggcgatcacggcgacgatctcggaacacatagttagaaagtctccggaagaaacgggtcaagggcaaaaggcccctctgcaaggccttgcgaagcttcatttcataatatgtatcggtgctggctcaaaattacactcaaagaaagaaaaggattcgcaggaagatactcaggacggagataagatagagagcactaaataagagtcaaagtgccggttcgaaataaatgagaataagcatgcagagaaaggctgaaagagcgacacacagtggttatagtgagtctgggaagagggattgttttcaagacctaaagtgcatcatcctatgtgctgcgaaatgagcagaaaaggccgcaaaggcagaaaaaacagaaaataaaaagaaaaagacctttaagagccaagagtaatgagagccttacgtactgtattaggggagagatgggagaagtaagaataagtcaacgagaataagaaaaaagacccttctcctaagccacccttgtgctctgccccaacaagtcccgccgccaaatatgtcgcagtcatagtcatcgacagttcgtcgcaaaagccgcggtgttgcagctatgcaaggatatcgacaagggtcatgaccagagttttccctaaacaggaaatggcgaggctgcgtggggtaacccaggccacaacttgaacttaggcggacgttggtgacttacgcgatcgcagtagcctcctctgctttgggactgcgcctttgagcagcctcctcagtcgctgcttggtgagaccggcagaagggagctgggtatactcatatcgcacccacaccccccaccaaagaaccacaaatgccgtcagcggcacggccacagccaccatcacccagacgtacttggagatctggaggtccccaccctctgtttggacaaactgggtagagaagaagttctaagtgactatcagtcaaggcactcaaggcgcccagggcagaatcggcaacggatgacatacctctaccatagtagtaggcaggaaaatcagcccaatcagaatcaggagctttaccgctgtggcgtcctgaacagtgcgcatctgatacagactagtcagccacctgttcaatttttcatgatgggaatcatgccgtaagttgtttgatcacgacgctttcttcgttggatgctttagccagttctctcaaagcccgcacctcttcataccctaacagatctgatagctatagattgagcaaagtcagccaataccgctcgacatgccaggaaaaaggagtcttacaagattttggacagactgtactcggctctgtagagctttggcccgttcttggtagttttgagcctccagcgcgagatcttccaacctatctgccactctcctgcaagaacacttaactatagggggacatcttagagagcaatgcctttggcatactctctttatttggcgtattgttccgaccttggtatgaagaattacaagcatgtcggtgatctggaactcgattcgcttcaggctctgtctatcttccgcgttgaaattaagaggcctgctttcttgtgtgacatttaacggtatcgccataatgcgggccgactaatagagacggtcagtctattgttctttactagcatcaatcacaacatcacgaaccttcatcttcagctgctcttccagccagcacatatagtctacccaaccagcaaggctctcagccactagacactcatgggccgagaaggccaatgtcccaatatcggcattgtcggacgtcttcccggcgaggctttgcaagaactcattctcagcttcacgcgatggagtcaggagcaagagcattgacgcagggccttttgccttcccacgcccaaatacgaacttctggtaaacccctgtttgacgaaaggaccagggacactctaatggacctctgccgttcacctccgctcgtcgtagaacgtaagtcacttctttacatagttagaatgcttatcctcctattgatagagttctggcgaccaaccctgagtatcagctgactctgatctcgactcgcacacttgaagtgtcggaaagctatattcgttctcgaaccgcttccagccaaacgtaaggatgaccttccatatctctggaaacacattgtgaagcttcaacagcaggtcaaagagggagcgggagatatccagcggcatccaagagcgttcacgccgaatggtgtagatatacgtcccctcgctggaagtttccttcctaccgtgagcgagacttacccatacctcagcacataagtaggaaacttacggccctggccagcttctcaagctcagtttcactgttgattatcacccgcggcctagattcgagggtccatttgcctaaaccttggttgactttatcgatgaccagaagctcaagctggggacgattctccgtgacttgaaacaacttcgtcgtatgccgattcaccttttccagcatatggcgattcatggcaggctgtttaatggtagagtggagcttcggtaccagctatcaaggtaagagaatacattaatgtatgcagatgaggatatacggcgtagactagttgttaattcaagaacatctttttccaaaccttacctaaacaaagaaatcgccgcttgttcttcttgtcctaaatgtataagcaatattttagacttgcactaaaactgctactgttctcccaaggctttgggcattgtcgccctccaacccctctttttggccgccttgcaggaaggcgcagcgccgagaatttagcactggtttacaaagccgtgagcaattcagaaggcctccacgatcacttcaacaggaggtataatgaaaaagcgagacgagcctctttgttggctctttcttggccaattcatggtgccaaacacaaagtggagagcccccttgcgcctcccaatgttgcaaacaaatgcaatttcatcttacccggccaacagtgtgtccagtgcgccaaacaccagacgtatcaccctctctagttggctttgaagcgagctcttgattgtgtaagaagaagtgcattagcccacgtttactc

SEQ ID NO: 4532 - DNA, 1262 bp, Emericella nidulans
ttgccgcgagcctgagcctatacaagagtcgtgctgatgaatacttcagcaaacttgagcaagcagagatcacgcttctcaaggcttctcgtgcggagcaatttgccaaggcgcaggctaaggagactgaggataattgcgcccaaatcatggctgagcgcaaagagatggaggcaattattgatgatctacagcggcagacgcagtctcttgaggccagaatggaggaccaagcggcggagctgcaaggtgcgctccaggccaagcaacgtttgcaaaatgaactcgaggactacaggaatcagcgagccatcgatattgaggacaaggagacgtctatggagcagacgagacaaaaataccaaagagagataccacgctaacaatgagctcgagatggaacgtgagaaggtcctcaatggccgaacagaggcctcccgcctccgagaagaacttgaagatcttcgcagcaaatgggacaatgaggtcctgaacagttcaacctgggccaaggagaagtcacgtatggaagtcatgcttcaagatgtgactacttctcgtgatgaagcagtcaatgctcacaatgatgcccaggcccgagtggtttctctcctatcacaggtcaggagcctgagaacttctatcgacgatgtaactgcggaacgtgatatgttgcataaagagaagaaaatgctagaagcacgggtaacagaagctggagagcgcttggaggacctggcccaaagtggaaggtctttccatgcgcaacgctgctagcatggatcgtgaattgttagagcttaaggcgaagctagctcaacaggaagatctttctctcgcagccgtcggcaagatgaggagggcggaagctcttgcgactgagatgcagaaggaagttactgccgagagagaggcaaccgcacagctcttcaaggacaaggctgccttggagaaacagctgaaggaggcacagttgcggtgtgttgacttggaaacaaaaagctactcctctggtagccaagatataagattcctccacaaaagaatcaaagaggtaagcaagcgacttatgctagtcccagaggattaaatatctaacacgccttttagctggaaactcatctggaagaacaagaagcgaagaataactcagagcaacggtctttgcggaatgttgatcgaactgtcaaggacttgcaatatcaaatcgaacggcgcgaaaagatgaacgcacagctcgaagaggagggtaacacggtttg

SEQ ID NO: 4533 - DNA, 4567 bp, Emericella nidulans
acgtactatcactgacagacgctacaagtaagccgccacaatgcttacctgtacttgttctgagattaatcaaagggtcagcaagtggggcctatgcagtatatgaatgcaacccaagacgctcgaacgcctttttagcgccagtgaatcccccgcagtggtcttgtgatttgccagaccctgacattgggcctctcaggaccgtcgacactgcagatcttcacggatgtgtccagagtcagcctagcctcgatagcctgaatagctgggtgtgaagagacagctcagtcagggctgtcggagggttccgatggtcgccgactagtcatgcctcaaccataccaaccacggcgatgacgccggtcccataaattaaagccaatagccgactaattaaaccctgaaacatttggcggggtttgttaatgctagagataagcgagttgcaacgcagtctgcctaagcgaccgccaactgggaagtcgacatgctctgccgcgtcttcgcattcgttctcgccgcatcagtcttttacgtgctgtctctctctatcatgtctccgccaactccaaatcttgaagtccgactacaatctccctctgttcctgcaaaattcaccccgcccatccccctcacgatccaggtctctgtccagaataagggcgaaacccccgctaccgtcctgaaatggggctccccgctcgatgggcgcgccaacgtcctcggaattttcgagatccttgatacagagaacgataaagtggtcgaaatcaccacggtcaagttctctcgccagcttcctccctcagtggaggattttgtggagattccgcctggcggaaagatcgacgcggaggtaaagatcccgctcgttcctcttgagcagggaaagaagtataccatccaggccaaggggtggtggcaagctgtttgggagcagcacctgggcgaggttccgcgggagaatctagagaagttggcaggagcattgaggggagagtacgtatctgaggttgtccccgttgaagtggataaataggttggttattgttagtcggactcgataggtcaggcaggaactgggctatggatatgggtatagggctctccacgatataatatgaccctgtttcgtgcttcaataaccctgcttcgttctttagccgccttcttcagcgcagacgacatacgtgacaggcgtaaaatgaatattccctgccccctatccacccatgtctatcttggactacatagagaatattatcatcaagaaatgtttcatattcagttcatgcatcaagcatgttataatacatatgaagtatcgttcccttccccgggatgaccagcatcatctattccaggtccaccttatcctccggtccgccttttccttcgaagccctgcgccggcgaagggtccccggtcatcacggatgcccccctcgtcctcggggataggcttgcggtctgaggcggttgggactgcttctcggccatatcggacgtcggtgggctggtcgaatctgcgattgaccagctcgtcgacgccagattcgagggctatgaacattagtagcaccctgaattgccaatcgagcaatttgagtgatgggaacgtactcgaatcgctcttgcggccgagaccctgctttgcctggtaggtgttgaggtcctgctgggcgcgggtggccatgcggttggcttcagaggagtccattttttgcggcgcgttgaatcaggtttatgctgcgttgaataggtcttgtagtatcttcgttggaatacggaccattgttcctgaagttaagcggtttgctctctatatacgccaaactggtgcatgaaatcatcgccatgtcaattgtgacgtcacaagccaacatcacagtccacccaccaggtcttttaacattcgtgctgccaaagagaacgattcgagtatatcaaggataaaaagatcttagattagtgcaactcttttacgtcagtattgcaagtttggaatgccagctctgtcgcgtcccacgcccccataaaaactatcgcacccgcttcagcccttacaactgttcacccacccaatatcatctcgaaacaggtcctccagttctcaggaatccaaaatcattcgccatgccagacccaaacaatccgactgaggcgcccctctccacaaaatctcacgtcctagagaccgctgccgctgcaacccagaacttcacaccagtcaaccagatctgcgcgcatttgcacgccttccacgtctacgctgacgaccccacacgctgtgtcgatgcgaaccattactgtacgcatttgacagagggtacgtctcccggcctcatctaacttttgatcagtttttgaacaaggtgttgtgctgcgcagatatccgccaatgcctcatctacgacagcccgaacaagggcgcccggctaatcggggtcgaatacatggtctccccgcgcattttcgacactttaccttctgaagagcgaaagctctggcatacgcacacctacgaagtgaaatcaggtatgctgatcatgccgactccggccggtttaccaaacgcagcatgggaagctgcggagacgagcgaaatgcgcgacatcatcccgctctacggcaagacgtatcacctttggcaggttgaccgtggtgatccggtcccgctaggcgagccgaagctcatgttgagctttacagatgaggagaaggtgaagaatgcagtacccggggggctggatgaattggttaaggagcgagatcgagcgtttggagtagatacgaaggtgaagagggagaagagggcagacattgaggctacagagaaacatcctggtatgtcctggtttccaagtttgcttcagacttggccctagccggtgctaattacgcgcagatgcggacgcattgtggaagattcatgagaacgatggtcggaagtgagactgctgggacagatatcagatataacattcagaatgagctgctcaattgtcctgtaataccgactacgagggtcgtaggcgacatatcaaggtacaaatgcggagtgcggttgaaagcatctgtacctattatgctcaccagagccggcatggggtggaacaaagatcacgctcgagtcatgctgaatgtgatgaataggaatgaccttaaatggtagcacttgttgctgcatttgacttttgtgctgaccgcgttactacctagccgagcccgccaacggccagagttacaactgaaatcaactgaaatcaaatgagacatgacctctgatatatggatattcagcgaagttctgaaacgtagtatttgaacctcaccaggagtggttctgaatgggaggataataagtccttatatagcatagcctaccagtaccatgtctgcattaaaaacatatatatctcatatgtctggcattgcaaatccagccaccgcatataaatctgccatccaaaacgccatatcaagtcaaggaaaagctactagggcagtgattcagttttgcaaacgctttagcggcatgagcaaaatatgttccgctcactgcgatttgcactgtgttccacgtacactcacaaaggctctcacaacatccgactctatccttggctggcaatgaggttctggagacaagccatgcacccggaagagcaagaccaacccagagaaacaattaacgcttccatgtgatagaaactgagttaggaccatgactaatggctgcaacatcagactggactgctctcgccctgtcacatcgggaatggaaagggccagtgcatccaaaagcttgggctgaagtaagatggtagtaacatgctcgcttgagagtgcacacctatatacctatccatataaccctgttacactgccatgagaaccattgattacgcttgaaagttcaaatcaattggcagactgctacaggacaccatccaattcagccaatactatcatcatctcagagcgttctatttcacgtccagcttgcaacagaaaatcatccgatggctgagcgtcactcaagagaaaatgacccggtccggtgctatgaagtacagtgtaatactgtgcatagaggataccgtccgggtatatgagtaaggagggccaggtatcagctttcttgcctgtggttcctcgagagagtgctaacttgcccatcgttgccgtccaggatgcctcttacatctgtcgccggagctggaactgagagaaagacagcgagcacccgcgaggtgacgcaaagagatccggacacgatggaggcgcaacggggaggaggcagtgctgatgattcagggaggacgctcgccccagaagatgacaggtttggagatgctcacatttcctatcgggagaagcagcccttagacgtacgccgccacttgcgccgaatcctctcaccccaattctccctgttcaggcgtctgacagtactattcatagagatacctctccttcctggcatctcttttttgtccctcaaccctcttgcgtcctgtgagacagtcgccggcggtctcctggccgttctctacaatggcggg

SEQ ID NO: 4534 - DNA, 2932 bp, Emericella nidulans
ctctcagtctccccatctcagctggccgggtccttcacatctgcccggaaggaaggagtagatactcacgagactgtataaccctccccctacaagagcttgagcggtagcatgcaagacgaaggaagcctcaatgagcattacggtgaatatgctggtccctataagcaaaggctatgtacaactcagaaattctccgttcagcttttatgagctgaagtgaccgaccgtatctacctgaaacagcagtctcaatctcgtaattcccaccattagagcgccaaaatctacctcacgggcacgggcaatactatctgcttttcgatagtggacgtactgtttcagtctcataggaagcgtcttgacatacgaagagacaggcatagctgaatccgtcaattccgctcactgatgagtccgcgcccaatatatttgccatacctttcaaaagagcatggtggatttggcaagaacttatgctgacctaattttttttcttgaaaacacgcttgatggacttttctgggttgttagcatgcacggcgaaggaacttacaacagggtaagattctactcaaggcgaagactcggagactcggggtggcgcttgcttaattttttcttttcatcttttcttttcttgtcttcttttcattttttcttttctttttttttttttttttttttctcttttttgcgacactgctgcagatcacccacagcttgcgagcgcagtcaagcaactgcggaccggacgggcttatgcacttctagctccagccaaaatgcttggatgagtttgcataatgggtgattggtaccgagttcccacattcccgcttgcgtgcgccttggctggttctattagcggttggctgctggcttgatccgccactgggtccagaatgacgagtttgagctgacctggatcttggcatgcattcacatctgagaattcaggtttgtggcaacctgcacattcgactgcaatataggtctacggagtaaaagcggatcgtgggcgtggggtctagtacgcgcgtggtcgatagaagattctggccgtactgctgtctgctatactgctgtgctgctagtgcgggagcccgggttatgatcgattgactacaccgatcgagcgagcaagcctgctctatgggaaccgggaccgcctggtttctatcttgatccattgatcttcagaactgcatatatgaagttttaccaggtgatgatttctacttctcttacgagaggggtatacacgatgcacgatcgtggcccctcccccggccagcggtccagtctttgcctgaaaaggactcagtagtttgctccaccattactcttaggtaatggggatcaagatgggctgaaactgtgagccaccctggtccttggaatcttgggaagactacgggagtatccgggcgcagcgtaggtcggggtttgagatttctgcaagtgttcggcattaagtacagcgggcatggattcgtatctgaagctcaggaaggtcttgaagcgggaagaaacagttccgctcgtgcgtgatctgctggaatattatgatcagtagtaagctgcagattgcatggacgatcgaactgagtaagatgagaagaggtcctgactctctcaaacaagacaggtttaatgtttgagcagtgagagaagcgatcttgcgtcctcttctgcagcctggcagtgtcgggtttgtgggtagtagtgttctttctgaccatagagaggttcaagggtatgagtaaatatgcgtaaactggataatgctctgcagtctatgacgagctgaatggagcagagtagtaacagtatcccgtagtaaaacaagtgggatatgtgcttgtgagtttgccgcctgcaaacggtctacatactttcgtgattggcccttaagaacacgctccattgagtctcgatcgtaaatcgagacgccagggcgtggggagtctcagactgtcaatggagactgcaagcgtgaggatctagttactctcgcccgagagatcaacaggacagtccgcaccatgacgacaatgccccatcatagctattcagaatactccataatctcactagcatcaggccagctcctaatggagtgtgacaatagagtgaattgagtgaagatcaagcctaagagtgagaatggcctccgccatgtgactgaagatggataatcgatgggaagccattaaatcatatagaaaaaataatattgaaaagaaatgaacaaacaaaagagccactggatttgccgcaggttttgcataaccccaacataccggttgtggatatacttaccgagccatcggggagtcgccgcctcttattgctgcgtgaccggtaccagatcgccaattcgccaggctatcaatgcacttgaagagcgagggtctacctcagaagtctattcggacagcatttacattagatatgtacatcgatgcaacatcaatatcatcgtgcagctcgctcctcgcattaagatccagatcgggaaatctaggaacgccgcgacgggctggcaatgatgaaatccaaatgccgcgcaatacgctctaggcgctgaagcctgcgagtccacctgccaagccttaaattcaggaacacagtttttgctcctgacgattgttattgagagagggcagtcgtggtggagccggatcgtcgccgaaccggcgatacggccaactctggcttggtctagctcaacggacgataataccgttacagtgccaagtttgcatgctctattctatgcctcttatcgcgataacaatacgaagtttcagtgccgaggtcagtagagtgtgatctgagagcacatgctgaaaagataacgggacatctgcttctggatttaccccaagctggggcccaagttggagaggggaaagagcagaggaga

SEQ ID NO: 4535 - DNA, 2642 bp, Emericella nidulans
ttttcaaaagccagcctatggccccgggtttttccgccccaagttaacccggtggacccgggcggtcccggtttgaaacaagctcaggcgttaccacctacagattgatggaaaagagccaccggtcaagaaaaaagttgaaagaagttcgaaagcgctaaatggccccaattaagtaagccttaggccaaagaaacacccccctcggttagcggacgggaaacgccctagcgttagttgcaggataaaggcctatttataattctctatcacgcttcaaagccaaagatctttactgagtcttaattcgcgtatgacgctcctactgcacctgtggctgctgctgctgcatgcaaacaaaccaaactggattcaagttctgttaagtattattcagctagccctaactcatcatcgaaaacaccaaactccgacccaaccagaaaagaactatgcacagccatagaaatgtactgaaaagcataccatccccatgaatcccagtaaatgaagagtcatccttcaccctcaatacccggccgatgtcctctggctctccaaatcatcagccggtagcggcggccttttccaccctctacctgcattcgcgtccctcgccatccaattcatctgcttgagccggaactctcgcatatactgtctctgctcgtggctcatctcctttggctcgttttccccttgaaagccgttcgttgcgagatagtggatagagtagcccaggagaacgcttacaacacacccgacaatcacaattaggatttgcacttcttttgtgagggccatcgcggtagaaagtttcttgatggactgatggactgatgtattgacaggattgactgattgatggattaatgattaggtgggataggagggataggtaggggatgctgctgtctgatctactaaagtaaaagggtaagcagggagagtattagcgcagcgctgatctaggtaagggaggtgcactcactgttcgaaagaaagtaagaaaacgaatggacagacttgcagtctggaagaaacggaaaagggaggattgatagaacgctggtgtctgcgctggttgtgccacgatagaagacaaggagtcgtcaaccagacaaacgcacgccttcttatacatttgtcttaatctaaataaaatctaaataaagactcataatcgtctcagatattcgtcgcttgatcctccctctccccaccgtcaggatgaacaccgtctacgatgcatccatccaagagcttttagggcctttacagagcatatacttcctaatgcgggatagcgtaagagagctgtgacgtcatttgcgagccggccaatcagagaatgctatttcgggccacagttcagacgctaatttttcacagcgcgtatcagagcgccagctgggcctggcgcagcgtgaattggaccagaggccaggcactgacctgataccagagcttcaatttggctcgcagcctgccgatttagtcaaggatggcagcagcaaaagtccttgactcgcgtcagaggccgaaaccgtagtttttatttaaaaaaaaaaaaaaaaaaaaaaaaaaaaaaaagggggagccacgtgtctccactctgcgccagccatgtagaatacatcgaagacttgaaggagatagtaatgttgactcggtcagtgaccaaatgggacaccttattgaggtgcgctcgtgcgcaacaggctgagaacgaactgttggcatgtttgtcataaatcgtgctctaattccagctcgtaaggtctatatctcgctgaatcaacagcaaatatcgtatatacagatctattcaagtaccccgggaaaagccagttcatgcgctccctcgcctcaggcgaccagttggcttgcgctgtgctgagcccgaatttgaccgaacccgcgtattgcttcgcctggacaagctccgcgttgcggtcatccgccagctcgtcaagaacagcagtgacaaagtgctttgcgttcaccgcgttggccttcatattgcccatgaccatctcgacggtaacgtcctcggtggactcgtgccagcagtcgtagtcggtcgacatgcagatcatctggtaggcgatctcagcctcgcgggcgagcttggcttcgggaagacaggacatgttaatcacagagccggcccaggagcggtagagcttgcttcatgcgcgtgtcgagaactgaggcccttctatagtggaatcacctcctggtcaatacagatgatggaggatgcagcgtacccatgcaaatcagcgggccgcggtcgtgcagcttcaccccccctcccctcaaggctgtgtccgcaggcgcggacgatcttggcaacgctctcgtcgaagggatcgccgaatggaacatggccgacaacgcctccctcgaagaatgtgaacggccggatgccctttgtgcggtcgatgacctggtctgggacgacgaaatcgcgcggcttgatctcctcctgcaaactgccgacggcggagaaggcgatgatggtgcggacgccgatggagcgcagggcagcgatgttagcccgcgcgggaaccacatggggtgcgatctggtggtgcagaccgtgtcggctgaggaaggcgacggcgacagtcttgtcc

SEQ ID NO: 4536 - DNA, 578 bp, Emericella nidulans
ctatttcaataaatgccttgaatcttgaacaaagacatcaagagcttgagctagagaatcttgaattagagcttcaacaaaagagagctgatcttaagaagaaagaggaggactttcgcctgcaacaacttcaaaatgagaagttggaacttgatcttatggagaggaggatacatatacaggaagctcagcagcatgagctaagtagtttataactagtttacaagtaccttccaagtagttgaattgaaaatttgtgcgaaagaccttttatatatatcctgtacgggagatgtattcaatcctatataactattctcaattggaaagagacaccaaagataccatttcaaccctaattagtgattcgtaatagagcccttgcttactaaatacttaagaagtaataatcttcccttttagtttagagcacctctagtaatggcagtatggaagctagtttacatgtcgatggtaatacatttgaaagaggtagtacgggctgaaactttgtaaagacaggttgtacatcacatgactgccaaggccattatataatcaggtttgtcccgcacgac

SEQ ID NO: 4537 - DNA, 3410 bp, Emericella nidulans
gtcgcctagggtacgatccgtatatctccggctcttgcagggtaatcgccctgatagccaatcgctaaatcatgctggccgtgagtcgagctgacctgatatgcccaagcaggtattctaatctggcctgtagccgtgttccgatacacaaggcgttgttttccgtagatttctgtgtaccccttgtcaaaagtcgggctgggacgcgttccttggagccagcagaggatcgctgctaattaatcctttccaagtccagcacgcgcagccccgggcctgtagtgcttgcatgtcttttccttacattgtgggaatattctgcagcagtcagcggctacgactgggatcctgggcatctgtggcactcggagaattatcgtgcagttattgccagacatcgtccttgagatgtccccggttaactgcgcaaaaatccgtcgagatccggttgggattggtagggtacacgttaggatgcatcctgatagagcatttctacccaagagcgcatagtcctactgagccaggtgttggcatatacaagagcaggaatgagatgcaaactatatcacgaattcattttcgtctccatctcgtcagttggagctgagtcagtcgaaatcggctcagagagccaacatgctcgcaaaccaagaacgaagcgagcgttttggacggttggcagcactcgatgcagctctagacttctccgtcccattagtttcctggctggaaaactctacctgacttgtcttggaattcccaccctcagagacggtgacgtcctgctttaccaaaaatcctgcaaagtaagcttcaagtttctctacctcgtccggccaaatgctgaccccaagagcgagatccggacgtacgacggcgacggctccgcgggcgtgatttacgccgtaccagtagtgggcatcgtcatcaggggctcggtcatcgtatatgaatgttgcatgtcctcggagttgctcgagttcatcgccctggccattacgtgggcccagcaattcggcgatctggtagggcagggcctttgcgacgagaacgacattgaacctatttttcccgccgaactgataaaaaaatccatcagggctgaaagctctacgtgagaagacggccagtttctcgcgtactggtccttggagatctgagcagaaaatcaagatatggaactttgatactccggtcatcctgtcatacaagtatcccgtacggtcagtgtctagacatacccgaggacttggagcacgagcgccgttgcgaacagctaatggctgcttctcagggtcgggatgggttatcgcagattcgattatggggaactcgagccccatgaggaaccctgagttctgtctgtagaaggtgcccatgaactgcgagtctgcctcgatactaccgtcaatcttcggaaggcgctcgtcatgggattcgagttcatcgtggagacctcgcagcgatgctagaggaagatgcgagttgcataggaagcgcagatatgcccccgaacagcggatcactcggtttgctgcaagccggcgttcgctgtcatacgtcggtaagatgacggatggtagagcctgcttcctgatgcagagcccgagcttccagcccagattggcggcgtcgtatattgaagagttgaggccgaatgctcccagaacactgtggacgtgtgctgcgtcgcccccgaggtgcacacgcagatcgggcgacgagaagtgacgggcgacgcgctcgttgactttccatacagagaaccagctgatcggtgaagcgaattcgactgtccagggcgccaggatcttccgcagctgttcgagggcttcgtcaggcgtgataccgtgatcgtcgacgcgcattgtgcccacagaagaggcattccgtctggattgccgcgtctgatgcagacggcgcgctgtctcctcgttgacctggatgtagaaactgtagacattagctttcgagcctacaaggacatccatctggagttgacaccaaccgggtgaatccctcttcgcgtgggatgacaatgcaccccccatgctcactggtgatcatgctcataccaaacagatgcggatagtctgtcttaaattgacagtcgatgattgcccagtaaatatccgttcctagcccgtcaaacggtaccttcatctgttcgcggatgttgctggccgcaccgtcagcaccaatcaggtactgagcccgaacagtctcttcctttcctgttgcaacatttctcagcgtcgcgcgcaccgggtgtgtcgcctccgctccagcttcctgcacctgaaactccttcacgagtgtctccctctcgacgatgacgcggtgccgcagaaggtcccgaatgtagatcctctcgagctgtccctgtgtgatgacgctggagcctctgtacctggaatcgctgatggggtgattgttgtgacgcagcttgacgcccctgctgtagatggccgtcgagttgatcagcggcccttcttcggtggcctcatgggagatgccccaggagtggaggtgctcattggctcgtgggtgaacggcgtcagctcggccggagaggcacggtgtacttgctttatcttttgaaagcgtcagtcaaacatgtatactgagaggaaccccgtccccggattcacacctaagatgcgaaagctcaccccctgccgcgctagcaccattcctagttccaggccaaacggaccagctgaactgatcagtaacagcgacgtgaggtggagtaaccgtgagaataactggctactgaccaccgcaaatcaagacatccacctcttctgccggctaaaccattccggcctctggtacgccgttccatcgtataggctcggccatgtccgaagatgcgtcagtcccagagcgttccctatggtcgaagcaggagcatcgatgtggacggggagtctatagtgcgcttgttcgccggtctccgtgatgtagttcctcttgtccccacatgaatatgtctctgcaggacaagcgaagccggtctcccatgtcttcggtgggacggtacacgccatttagtgacagagccgcggtatctacttaaggcggaaaaggaaagataaccctgagttacctgcatggacaggcagcagcgaccacgcttttaacccactcgtcgaagcgagcgcggtgcggtaacccgggttagacgtgggttgaggcgcggtgtggcccagcaatcataatgtcccctcttacgcttccggcaacaatactatggcttggactggcctgttgctcgaggtcgattcctgccttttcctgggcatgcaggatctttggtttgtgcctggatctaaattacgggcgcctttcagcccaacctatttttggggtttggggcaccgtaactgccctagctttttaga

SEQ ID NO: 4538 - DNA, 4336 bp, Emericella nidulans
  unsure (1)..(4336): unsure at all n locations
catcttatcatcagagtctcctgtcaggctagcgatgacagacatggcctcgataccgatgattcccttcagggcgaggttggtttgatttctagagacgccattagtttggtttgacaagcacctatacgccagtagggacgtacgccaatggacctgcgaaatcatctgtcgatatttggttcgccggataaagagaatcttcgatcaagtagtccgtccaacgtctcagtattgtgtagtggctttccaggtacgctgtgtccccggccttctgcgcatatgctagagccatgatcaccatattaccgcactcctccaacggcattggctcgtcattgccatccggatggcctgtagcgttagggtaatgagcaccgatatcatgcatagcataggagttggggtaatttccagactcctggatctccaaatgtgggcgcaggagatatttaagcagtgctgggtttgtgtataagaagacgggatgagcagggaagatcacatctaccgtgttcatgttgccgttggaggagatttctttcataaagagatacggatcatttgctggcccacacagctgggttgcagcgaaagcttgacgaatgctgagggatgtaatggtaaggtagtcgtgaccggcagcggcaacggaatcttgtgcaattcgccgatcaagatctgaagaaagagagtttgacttctgataatcatggtggaagaagtcaagctaaaatagggtttttgagtaagtcccagggtgtctagcttctacacggggagcactcacggcatccaaggcagtgctgaaatagctcgtccacagagcaggcaaaggagaaagggtggaagagttcccgctatactggattgcctctcgctgggttagccctattgagaaaagcaccttagtagaagagctgatagacccaaggtcatgggcaaaaccaaacaccggccagttgttggagatagctctgtagttgacgtcattgctattggctagctttacattgcgcgcataagcttcccggacattaacatgtggaccagcctgctaagtgagtcctgctacattgtcagttgcccaggaccaatcaccccattcagcttggtgtctatgctcagagaataggagcggggtctggcgatagatcttatgataggctacgccgtcactggtaacaccatagatccattgtgctatggcggaacggtcgccagacgcagattctagggaacaatcaataatggttgttcacttggctgaagtatgtccaggtaaactcaccagctgatatgtcagcgtacacctgtacactgtgggactggccgtcgagtgaggtgacactcacgtcaagatacgaaaacactagggactgccgtcgaagatcattcggtgtaattggtgaaaggaaggttatcttcatctctaccatatcaccaatatgcatggtgaaaatgctcttcgttgaagtgtactcatacgcagtctggttcacagtggctgagcctggaaggcccatccatgtatagacctggccatccacacgaataaggccagcccatcctgttatttggcctctataacaatgattctttttcagctctctgtaattgttatgccaggttcatagcactcactcccagaacgctggccattcccctgcaaggtagcctccattgccgccgtctttccccgccggcagccaagtactcaagtacggagatttgaccgctagaggaagagccggaggcgatgctggagaaaaagtcgatgcggctcctgtaaggatagccaggggtgcgcacaggatgcctagtagaaaagtacgcatattgatctgggtaggtgatcctcagccgtgcaaccnccttctaataggccccgtttaaaagactcaacaacaggagaattatgaagcaatttcaaggagtgacaaataatcgagcagcaatgtgggccttgggaatgggcagcggaatgctaggcacggctgtacagtggatatatcttgcattccaggcggatgaaggtttctttatagaattctaggagtggactcttggtgccagcatgtggaaagccctgtctagactctttcgaatcgaggcagaagcatctgcacatgcataggcataactttctcgaataatgtcgtctgaccgatcattctatctgcaccagcgcatgccgtcgccactatacacatggaaaacgaaagaaaatagccaatcgagcgaagggaacaggggtttgaaattgggtgtatactccacagaggagatccgctcctataagaatcaatcatgagtatttcttgtatgctccaccgctactctgcagaacggtttgaaatacgactgaccagggaggatcaacccaaaacggcgcgggagcctatagtaaccaagcttagaaataagcatgaagttcgaccaagcgaagtagatctgttacgccgtcagtaaggtcatttgccatggtagcatgggttatcaacgaacgcgggccccccccccggagggttatgagagggttccaagctgattcagagcaggagcatacgaaggagagaagtgttttgtgggaaaatagaggagttggagagcgaggagcgaggcgaaaacgtgggactggagagtaccctaagaggaaagtgccatgctcaaagtcctccctactcttccgtccagcacttgaagaaacccttcactcttcacgccctttgtcatcccaagcaatatttccacatacggcccctcacattccagtacggaatgacgcgggagaggaccatgcaagagactggattagatattgccctcatctctctggttcttctcttggctgtcctgcgctgcaactagaatcctggcaaccgactggccaactcattgtttgcatactctgtacaaaggtgttggctggatgtctgtgcctgcattgtgtgacatcgttcccaccatacaaagtcagtgtctgccccgagtatcttctacccctcatatgtacatcaccggatcagcgtacatcacaagagactgacttgatgcagatccgtgcatgacccagcccaacccgagccaagtgacacgctaacagccagattcaaagagaaatgcggaggtcccgtcattaacccactacttgcccccctgcggctcggcgtatatcctcagcacatataacgcataaacagaaggctgaaatggctatggacacacagagatccgtttcggcctcgccgtgaaggcgaatgttgtcggacgaacaggcttggagcgatccgcttcgtttggcacagcagatgctgggagtgccatccacgcaggtacagagcacatgggacaatcgagtcttgccggtccggtcctcgggttacggattaagtaggcgaacgctgcaagctgaggtgctgatacttgcacagcatagcggaccagggttcgttagtgcttacacgttgagaccggagcctcctaaggtataataatttcgcggttcgccacccagcagttatacgcccagcagactctcgaagtttgataatagggtgttcaatcttgtggtacgtagtatggagtattcgtgcagtacacggatcatttcagaatgccgtacgccctagacattggatatccctgccgttggcttgacgaaagtaaaatcgtgacaccggcaccagtcctcgcatggtttcatcgtccttaagtatgatttaaattggtagaaacagcaaacagcaaacaacgagcttgcgttcccgcccatgtttctattgccaaccgttacgcgattcaggggtcacatatttagggacaagctgtcctaattttcataaatcatcatacaagccgcctttgagaatcataactcaggccgtgagaatccgccagaagaagagttaacatagaaagcagagacatataaaacagagacattgacgctctcaactcatctctttgccgcatgcgtcttcgagctgcgcgccaactgtatgcagaactctccccactcactcccaccactactgggcaagatttcctccgcaatagcctcctccagtcgttcgccatatcgccgccggaactcaacctttacattctcaagatgtctcggttcccagtggaggcgaacaagtctggaaatcaacaactccgatctctctctaccagaccgggactcccgaagagcctgatggagaagaagtgcatcgcgcataggtcggttgattgctccattcaaaatatgtgctagagtttcaccctattcacagataagtataaagaaaccttgaggaagagaagagaactcaccacaagattttgagat

SEQ ID NO: 4539 - DNA, 1893 bp, Emericella nidulans
ctcgcttgaattcctggccggggacggcggctgcggtaccttcttccctctctccgtgggttgccgtcactgcagaagttatcaataggtggtcaccgcagcctgaagagaaaccagaaacatacccttgctcaaaacatgctgtaggtcgacgagtctggagacagcctttatgccatccgcgacgggtgcaattgggacaactccaagaaattcagttatgtaaagctccagggcgccagggtcagttgcactctctccgtagtttgaaaggatgagcagcgctctatcatagattgtcacctggcaatcctcgaactcctgcgagcggcacttagaaagcgaggcctggcggcgcagagcacccacgataacggcgtaatattccgggtcgttgagaatttcaagcagaacggagctgggactgctgcgcctacggtacctgcggaccaggtcgtcgactttcttttgcggaccgtcacctctggcacggtcactgcgatggagggtgccagttgggggcatgtcgactgcaattgggagtagactaaatagatactgatttatgagagagtaaaggtatgggacaggattccaggaatgggaagtttctacatcaaatggtttggtggatgtagatcttgaataaatgaaagaagagggcgtttgtgctggggacaaagcaaaacatttgtgttggattcactcaacagtcattgcagtacctatcgcaacctgttgccgtgatgagactttatagctcagtgacacatagctcaatagcagagctcatccagcataaagaacttctgccaggcaaaattcttagctaagagggaagtgtgcagcactaatgccttaagcattagaggtactgggatatatttgctaggagctcatatctctagcaaggttgtgagtgtgtcaaagcttggtagccatgatccaagccctcgggctcattagcgaacagcaagttcggcaagggctgggctcgtccatgtggatgttcagggtaagaagactcaacgcctgaaggtaaagttttggttactggctcgagacagcgtaatggtgtttgactgggaagacttatcaataaccatgaggaaagcaggataaatgtatgcattctcatcagatccaaaataaagacttgtaattcgccatgacatgtcggcgtctttgtcctataaatatacatatgccgaacgcagtcggccacattataatgtcattaacagttcatgaaaagctcatcagcctaatcatcgctcatactgtacccaagaatcagaactttttaaagctcagtttctctgttcccagagctcctcaatttcgtcgactaataccggcactttactgccctcgccatccttcgcgcagtccttccagatcccgccatctcggacacaccatatggtgtcatcgagacgaacggtgcaactcgtcttcacaccgagctccgcgctatgacgagcgctctcccgtaggaggcgaacaccgctcaacggaccgtcatgagtggatttgttggggttgtcatcttgctggctgacgcagtcatttagagcatcaaagtcgataccgtgttccaacgcgcattgttcgaccagcgtcctgtctgggatatcttggtacgagctgatgaggcaggtccaaacccaagatatctaacggtgggtgttcggtcctgagcggtgccgtcctttggactaaaggggatatttgcagcgcagagcataagcatatcgccatacactcttcgggaccgtgcattgcacttaacatcccgagtattattcgattcactgctggttggttagtcctcctcgtttcggaagttatgaaattccacctacgttgcgttgattgaaagcttaagtttac

SEQ ID NO: 4540 - DNA, 5895 bp, Emericella nidulans
ttgcgtgctacagtccctggccagtgtcattgttgtaagtagtatctcaagcgtttgttgctttcggtgctcttgaccatctgtaactctggatgacctcgcactgtttctttattgcttcatatatcgacattgtgttcagtccgtataagggcaatgctaacgtgggcccgacagtggtgattcaaccaagatggcctcgccactctccgagaaggagattgaaacttcgcaaagactgcgagagcctgaagcatcctctacgtctcaagatgatgcaattatcgagactgagaaaaataaagatacagcagacctcgactgcaagtctcaacttccccgtgaccctacggcaggtactactctacatcaattagagaacaagcctggcgagaagatcgagttgaccgaagacgactgctatgaccaactcggttatgcgtggccaagctggaagaaatggatggtcatctcagtgatctttctcgttcagacttccatgaacttcaacaccagtctttattccaatgctcttgttggcatttcagaagagtttggcgtaagcatgcaagctgcgcgttgtggtgcaatgatattccttgtcctgtatgcctttggttgcgagctgtgggcaccctggagtgaggagcttggtcgcaagccgatcctgcaggcgagtctctttcttgtcaacgtctggcagcttcctgtggcacttgcgcccaacttcgcctcaatcatggttggtcgtgctctgggtggtctgagctcagctggtggttcagtgaccctgggaatgattgccgatctctgggaagtggatgtagtgagagcagagtgtgtaagcgtagtgctgtgtgtgccgtccagccctgactggtggtccagggtctggctggttatagacgtcgtatacccgccagaagaggtccaatcaactcgtgagtcctcagttggcgtttcaataggggatgttgcgttggtcaaagtagatgaaggagtgtcggttacagaatcagttgctcttggttctcgtcgtacctttgtgcatctgagtccttggtagaagataatggaagggtccgtcgacatggcaatcagcgctcttaaactataggctgactacattgagatttaggaaaaggagtgatgcgtccagcgatatagtacgaaaggcgggtagaagacggccagatgaggcgagaaagaggctgtaaagccagtcaggccatgctcgacggttcaccagcagtcctcccaggaggcagagagcgaagatgagccggaagtcagaagactgggcctgagcctggccgactaaggcataataactaatccccacgatgctcggtgcgcatggaccctcgaggaacagtctcgatgaccgtgcagtaatacctagccatgggtccatggctgcgaagcccatccagtggcgcatgttcctgagctgggtcctgaacgaaagcagtcaattatcacagtggtggaatacgaaggattgggtgaaacatattccgtccaatgggtcggcccaagtaatctatagagaacggtagtctgactagggtccaacaggctaaccacgagtagccaacaggggcgaaccgtcagcccgccccagccaaatttggtagatggaggcggaagtcgggacttctctgcttcgtatcattgtacaactttccaacacagagaccaactggggaaacgaaggatggactgagtcgagaaaggaatgagaggcggatcccaaaggagagccgctcggtgggtaaccgattacgtcatatgataggtcagcaggttcggcccgacatatattccggcttccggtcgggtaggcccatcggtcacatgatcactgtcgatacgtcgattatcatgcatcaaaacgactgctcaaacgcgaatcccagggcattccaggacattgaacgccttgtcagccttctatcgaatgcccatggagaccaatggcttcaatcatgccgtgggtggcaggcagagtacgaaaccccccgggccctggctgcaagatgccgctccacatgcagggaatatcgacccaaccatcactcgtccgtctgccttggacacactccccctcctttcctcctattcttccttcaattccaggtctttggcctcttgtttgacatctttcgtgtaaccggtgcatgcatttctttggatgaatcgaggcatcttgccacttccgcccctcttacttcccctcgtcccctgaaccacactttcacactaagaggttcctggacttggaggcccatataatcgcatgtgactctgatgcattcctggtctcctgccacttccgaatctcgtgcatttcagcagttccgtttcgtcaagtagagccacgatgtttggttggagtagtgcgatcggtaagtccctaagccacccgcacgacggagtcaatgccaccgccgtgatgcacatcgcctagaacgctgacgagtaacggctgttcctgcagggctccccgcaatcttgtcggaccccgacagagaacgctctcccccacctccattaaactccctcgacttccccatctaccgcctccccgccgtccccgacgagccctctgaagactcgctgcggaatcttcaggccgtccttgcctctatccgccgtccccaagacattaccaccgacaaattcagagacctcaacctcaaactcgagactgacgtgccattgtcctcaattgtgcgtcacgatggcgcgaagacggcgcctccgctgccctgggaactggactcccccaagccctctctcgggtcgccgctcccggccgacgggacccctatctttctggaaaacggaaacccgtacccgaccagggacaaatacgagctactcgaaaacgaactgctactggataatgacgatgccttccgggaggttgcccgattggaaccccgcgctggccgcgaacgggtgcgagtgacgcagaccaggaagttttggacggcgctggagcggatgtcacaatactgggatgatagcatggatcagtactacgaccgggccaaatcgccggaaccgagtgagaagaaggcggacgacgccgaagcggctggggacacggagaccaccgccgaaacaacgccaatggaaatagacccgccgacaaacacgtctacacaagacaaggccgaaccggaacttgtcaagaagtacaaaggacgtcgcattgccgccggccaagccatgccagaagacatccgcgacgagactatccgcgccctaaccgagatggcggcgtggccattcggctgccaggcctccctccccatgaaccctcccaagctcttactcgggacgctcctgttccccgtccgacagaccttccaggcaacccgctcccccaaagaccgccaactcgcccgcaacggtattctcgaagggcccgtcttcgtcgctcaatgccgccccgaaaccgtcttccgcgcccctggcgaaacacacgggtatggactcggcgatacctgcgacctcgtccgtgaggtaggcgctatgctcctggccgctcaggaacgcgcgcgagagggcgctatcgaggtcagacccggggagggaaaatggtggacgacgaagccccgatggggtggtgcacctaatgatgcgattggcgatagtgtgcgcgtaacaaatgagcaggaacgagaagcggccgcgctgacggggcgtgcacgctcggggtcccggccgcagccgccagggctacgccggcctgggttgcgtcgggcaatgagcagtagcgacaaatggaagattatccagccaggaccgagtctctgggataagcgcatgcggtatattcagattggacgggacagggagtgtccgtttgacgatgtacgttctattttctttcctttctactgtcttcctttctaacagtccgccagatctacatgctctcgtcaataaaccaccatctctcaattctgcacctccgcatccaccgccgctacctcgatatcatcacaaccgggagaagcactgtccctccgacctcgaacgacgagtcacacccctggcatatcctcaagctgcggcgtacaaggtggtacgatctattcgacgcccaggaccgcgtcgacgtcttccggggtatctggacgattttccatgtcatgctccgtgcacctcgtccgcctgaggctatgccaccggctagtcttccacccatcactccggttgatccggcagttgtttatcggagtttgccgttggagtccgtttagattgttctgtgggctttccagtggaaatagattaggctgtacataccactggcgattgattcatgagctttttggtttcagcatgcatgcatacatggatagaatgtggattcatgttcggagtgtgattgcgtacgtacccatggattgggtaaattggaccaattttagtacattacaaggcgtgcttctaatgggaattctttcccccggccgtaactaagactgcatttaagaggtaacgtaggctacaatattgccgctctgttcctctgtgacacacacatatataaatatgcaaccataccttcctcggtccccgcccgacaaaagtcattaactgaagatataagctacgaccctcagaagataggcacacatcctctcgctatcgtctatgtgcatcgaattggacttatacgaacaaatttgcatccagattttgtacgattttcagtactatgaactcctggcccagaaactgctaagcagacctctaccaaccacacattgcctctcgcggatccgggttaaatacgacagattagttgaatccacgacgtaagggctcctaccgctgttcctgtacgtgtctatgtatctcctttcctcctcactagagcctgtaaccaaataaccaaggctgtccgtgcgtgcgagaagatcagctccacacgacagactacggcttggacccggattaattctccttgcgctcttactgcccgctcaatgctgacttatgataaggatggcgctacacttgtctggaacttgggttgctggattatcgatttgatagatcagtctgacctgtacatccagaccattccaagcccccggttcacgagctgcgtgcgtcggcgttgcgctttgattgcagcttagactctacacagtaggcagcggagtgcttccaaggcagcgcaagcaaaaaaaaagccgttggtccactgccctggttttggccgcagagtggctgggtagacggtccggagccgtggcatttggctattccactgactacgtgtgtagggtggtgatgggtggactagatagatcaactgcatctaatcgaagctgaggcttcagccgcaaggagctcgcttgggtactgtacgcagtatgctgaacatctgcaaggagttaccccgtatcctggggtgcaggcgcgcttggttacgagaattagagtggagtgacagagacatggctctcacttctctcgatatcaatcctattatatggggtaattgcacggcaatatacaattccttgtctataggactgtaaaccctcaatagcaatgttataccatctcattgatcattgaacatagcaacagcactgtccaagttgcagattacctagtcagaaaaggacaagaagaaaattagaaaaagaaataaactatttaacaaataaatgctgacgagaccaggcccagctctattgagagtgcaaccagcattaacttggatgaatcctaattttaagacttcttttggcttatccattttttagtacatccagcaagtccaagggcagcttcaggttcagctcgaatccgcacctcttgcgtggcgaactgcatggccgcgaaccgatcgacgacttc

SEQ ID NO: 4541 - DNA, 2747 bp, Emericella nidulans
ggaccaaaaccaaaggtaccaatcataggcccctggcctttcttttttcgactaccggaaccagaacggaggggagccaattaccataaccggggaccaacaaacctgaaatatgctggggccatgcacggtttttccttgtgtttcgcgcgagattaaagtcgaagggggggaaatgtctaggccattttgagactctggctgcagcggccagcaggcctgagaaaaagggggaaacacattacgaagagggtgaggtcaatgacatatacaccgccgatgacggtcagacgaggattccaaagttctattcaggtacactgcaattcgagttaactggtgtctagaggaatgcatttgcccaagaaaactaaacggaatagtcgagtcatagggcaagtgtagtcaccggctcgcaacgcataatattgcctgccaatgctagaaattgatggctgtaatcaatgcgaagcattggactcaattgccacccattgctcaagatgccaccgtcacttcataactttcccggtatacctgcaagttctgacccaacagtatctatacttgggccttggacactatcgctcgtaacaactgcaactgagattatgcggtctaattggtgccgttcgtaggtcggaggagaccgatcctcttcagcttcatgtttgtggagcctctgagctatgtggactcgtttgtcctcaggtttcatgtatatataaagaggaatattttccacaatctaggtatgtttatcttagcttgaatatctcgaagtttggctactgctcgataactcaccctcgtgttcgattccccgtccttgttcctcgattccgcctcgatgacaagcacatgctcaatctgaatattccttgaggagtagctttgtgaacaggtaccttctccagtgggcagacgcactggcacactgatctgctgaacattcatgtcctcaggcagtattggacgatcatcatagctgtatttttcttccacgatgacatggtgtgcatctgaccttatacaatggatatcatactgcgcggcctgagttgctgtcgcagtaaagcagagtcgatgacgttcaatcacgcggactgtgagatccgatacagttacgccttctgatagcctgaaccagcattcgaccgggaacacagagccgtgtggaacgagtgtgtcagggatggaaaagtgataatctaggtcgtggcgggagcagcttttgacggtctattattgctcgttagtactcttctatccaccgtcaatggcgcacgggggagcggtggtattaccttggccaaccctagcccagtactcaacatgggatatcgatgtaccctcagcggcttcgatatgaccaggttaggccacatcaaacgatctaccaatacctccacacgataggcatggtactcgtgctttggaccggtgagtgtgtcatatagagccccagacagcggtatttcaaagaggaatccatagtctccctttggcatcgtgaaaagctcgcgcagtttcgaacaagcgatagtctggctgcgctcgaaggtcacttgctcccgggggccgcccaagaagagcccgcattgaggactattctcaatgttagagtcataccagcgaagttctttgttttaattttaaggactaacgtcttcattattccaataactcggacggtgatgcgttgaaccagttagagcagcaacacccagtttgccttccataaagattggatgagaggcaactactgcgccgttatgagtacaaagttccccctagatctcaaagtttgttgacgaacatgtgagtaggagcattctgacggacagaatttccctgcaatcttgataatctctgaggatctcaacgatcttcttacacaggagcaagatttcgccgtaccagatattgcgactatggacctttgatgtatctccccagctgcctgcagaagatcgtccagaatcttggtggcggtcttgtcacattccgagtcagtgagaagggggaagcagctccgtttccaagaagggcagttcaacagctgcaaaggctcgctattctgcaaatatagcaagaatggacgacaagaagacaggctataggagaccccaatatcagactgcacgagcggagcaaaagtgcggtcgatcaaagaagtaagcaagaaaaggtactccaggagagaaatgtccactgcaaaccagggagtagcaataagatattgagccagttcctaggccagagattacaggactagattcgcgtacttatcccatggagaagtcggcggatattatgatcgaatcatagtcataacagcggcaaatccgtggccacgaagacggaacttcaaatatcttttacagtctagcaagatagacgtatttactggcagtttctcctagactggcctttccctgaccgataactgttgcgcagagttctctgagtccgccacctaggtcataccagagcccagctaagtattgcagcccgcatgaatgacagcagcttgtatttactgagtccagcgttgaattgccggtgtgggagcgttcatatatgagtatagggaatgtcttaatgattgagagcgtgcagaagaattggtacggactgttgggattcttgtgcttcatctgaatcagtgcttgatgcacagggtgaacctctaccttctttttattatttttatattttatattttggctatcaaggatggtgaa

SEQ ID NO: 4542 - DNA, 1982 bp, Emericella nidulans
ggggtttcctatatccaagatgttacctactaagtgctagttactgcgcaccagatgcaatccttgtaatagctgtttattggcttaaaatgaacacaactcacgatcgcaatctattatactagccattaatactaaggttacaggcatggcagattataatcttaataatttatattatttatgtaaatcaaactgacagataaaatgcagtactaaaataataggttatttatattattaactactactagtagagagttataatgtaatcaaccactgagtagcagatactatcaagcagcagatattattaagcagcagatttttatagtaattattactatttaaaactttactactaccaacactatttgatttaactaaatatataaaataatagctattcaatagtataataggacatatttagatagatcttcctatttagacatactatatatacaagaaagaattactagaaaagagaaaggaaaaagggattactatttaaggaagtcttatagatagcgcactacctttaagataatataggccttggccaagttactaagttctaaggtccttgtataggcaaggacctataatagtacccccccttttccctcttatataggaggtatggggatataaggttaagttatattatcttagtctttatatatatctctctatttagtaagctatcctgaagtctatattactttatataattttattagttatctagagcttatactttgtctagagctggtataactttataagttagctaagtatagtctaactcttttactaggtattatagctagtaacctcttctatatttctataatatttatagattttctttattatatattctttcttactatttaccctgatactagggggctaggtattattagtcctctaaaaaaaaataaatctgataaagccacctaaaataggtctatataaaaaactaggtagattttaggatatttctaattatatagtatagctacctattaggtttataattttatacttagtattatttttctagtctagtttcttgcgagggtagtttatatagatatttttttaaagcttaactagattttattttctacttagttatttatagctaggttcttatatttattagcctggttctctatattctattacgcataggctataaagacttaagcctagtctaagcctttcttaactttctatataattactttctttttctagataagatttttagtagacctgttaaaccacgggttggggcgggttttcaggcctagctgatctgcccacgcgggttttggggtaggttaccttcacagtaaactgcccatgggtttagcaaataattctaacccaatctaaataacctaaaataacctagttatatatattattactctaataagtagtaatctatatagttaataaaatactatatttaaatactgtattataactatctaagtaagtaaatataatctaaatatagtaatatacctatttagatatcttggcaacctagtaggttactctgccaggctttggggcagctaaaaatatctaaaacctaatagataattagaaggtctaacctaacctattttttggcaggtcagggcaggttagggcaggttttatagattaggtttaacaagtctatttaatagcaagattttaatagcttatatataaaatatctttttattcttagtagaagttagacttattaaactacaggttaggacaggttttcaggcctagctaatctgcctatatagtttttagggtaggttacttgaacagtaaactgcctataggtttagtaaataattctaacctaacctaaataacctaaaataacctaggtatatatattattactctaataagcagtaatctatataactaataaaatactatatttaaatactatatta
